United States Patent Application Publication US 2024/0327476 A1 - sequence listing, part 76

SEQ ID NO: 143313 - DNA, 1977 bp, synthetic construct
  misc_feature 1..1977: note = Description of Artificial Sequence: Synthetic coding sequence
  source 1..1977: mol_type = other DNA
atggccgaggccgctgctgctgctgggggcaccggcctgggcgctggggccagctatggcagcgctgctgaccgggaccgggaccctgaccctgaccgggccggccggcggctgcgggtgctgagcggccacctgctgggccggccccgggaggccctgagcaccaatgaatgcaaggccaggagagctgccagcgctgccacagctgcccccacagccaccccagctgcccaggagagcggcaccatccccaagaagaggcaggaggtgatgaagtggaatggctggggctacaatgacagcaagttcatcttcaacaagaagggccagatcgagctgaccgggaagcgctaccccctgagcggcatgggcctgcccaccttcaaggagtggatccagaacaccctgggcgtgaatgtggagcacaagaccaccagcaaggccagcctgaaccccagcgacaccccacccagcgtggtgaatgaagacttcctgcatgacctgaaggagaccaacatctcctacagccaggaggctgatgacagagtcttccgggcccacggccactgcctgcacgagatcttcctgctgcgggagggcatgtttgagcgcatcccagacatcgtgctgtggcccacctgccatgatgatgtggtgaagatcgtgaacctggcctgcaagtacaacctgtgcatcatccccatcggcggcggcacctctgtgtcctatggcctgatgtgcccagcagatgagaccaggaccatcatcagcctggacaccagccagatgaaccgcatcctgtgggtggatgagaacaacctgacagcccacgtggaggccggcatcaccggccaggagctggagcggcagctgaaggagagcggctactgcaccggccacgagccagacagcctggagttcagcacagtgggcggctgggtgtccacccgggccagcggcatgaagaagaacatctacggcaacatcgaggacctggtggtgcacatcaagatggtgaccccccggggcatcatcgagaagagctgccagggccccaggatgagcacaggccctgacatccaccacttcatcatgggcagcgagggcaccctgggcgtcatcacagaggccaccatcaagatccggcctgtgcctgagtaccagaagtatggctctgtggccttccccaactttgagcagggcgtggcctgcctgcgggagatcgccaagcagagatgtgccccagccagcatccggctgatggacaacaagcagttccagtttggccacgccctgaagccccaggtgagcagcatcttcaccagcttcctggatggcctgaagaagttctacatcaccaagttcaagggctttgaccccaaccagctgtctgtggccaccctgctgtttgaaggagaccgggagaaggtgctgcagcacgagaagcaggtgtatgacattgctgccaagtttggaggcctggccgccggggaggacaatggccagaggggctacctgctgacctacgtgattgcctacatccgggacctggccctggagtactacgtgctgggggagagctttgagaccagcgccccctgggacagagtggtggacctgtgcagaaatgtgaaggagcgcatcacccgggagtgcaaggagaagggcgtgcagtttgcccccttcagcacctgccgggtgacccagacctatgatgctggggcctgcatctacttctactttgccttcaactaccggggcatcagtgaccccctgactgtgtttgagcagacagaggccgccgcccgggaggagatcctggccaatggaggcagcctgagccaccaccacggcgtgggcaagctgaggaagcagtggctgaaggagagcatcagtgatgtgggcttcggcatgctgaagtctgtgaaggagtatgtggaccccaacaacatcttcggcaacagaaacctgctgtag

SEQ ID NO: 143314 - DNA, 966 bp, synthetic construct
  misc_feature 1..966: note = Description of Artificial Sequence: Synthetic coding sequence
  source 1..966: mol_type = other DNA
atggaccccaagtacccctggagcaaatgtggccacaagaccaccagcaaggccagcctgaaccccagcgacaccccacccagcgtggtgaatgaagacttcctgcatgacctgaaggagaccaacatctcctacagccaggaggctgatgacagagtcttccgggcccacggccactgcctgcacgagatcttcctgctgcgggagggcatgtttgagcgcatcccagacatcgtgctgtggcccacctgccatgatgatgtggtgaagatcgtgaacctggcctgcaagtacaacctgtgcatcatccccatcggcggcggcacctctgtgtcctatggcctgatgtgcccagcagatgagaccaggaccatcatcagcctggacaccagccagatgaaccgcatcctgtgggtggatgagaacaacctgacagcccacgtggaggccggcatcaccggccaggagctggagcggcagctgaaggagagcggctactgcaccggccacgagccagacagcctggagttcagcacagtgggcggctgggtgtccacccgggccagcggcatgaagaagaacatctacggcaacatcgaggacctggtggtgcacatcaagatggtgaccccccggggcatcatcgagaagagctgccagggccccaggatgagcacaggccctgacatccaccacttcatcatgggcagcgagggcaccctgggcgtcatcacagaggccaccatcaagatccggcctgtgcctgagtaccagaagtatggctctgtggccttccccaactttgagcagggcgtggcctgcctgcgggagatcgccaagcagagatgtgccccagccagcatccggctgatggacaacaagcagttccagtttggccacgccctgaagccccaggtgagcagcatcttcaccagcttcctggatggcctgaagaagttctactag

SEQ ID NO: 143315 - DNA, 1176 bp, synthetic construct
  misc_feature 1..1176: note = Description of Artificial Sequence: Synthetic coding sequence
  source 1..1176: mol_type = other DNA
atggacatggccagcgagagcgtgggcggcaagatcctgtttgccacagatgacttctttgccccagctgagaacctgatcaagagtgacagcccctgcttcaaggagcacgagtacacagaatttgggaagtggatggatggctgggagaccaggaggaagagaattcctggccatgactggtgtgtgctgcggctgggcatccagggcgtcatccggggctttgatgtggatgtgtcctacttcaccggggactatgccccccgggtgtccatccaggccgccaacctggaggaggacaagctgcctgagatccctgagcggggcaccaggactggagctgctgccaccccagaggagtttgaggccatcgccgagctgaagagtgatgactggagctacctggtgcccatgacagagctgaagccaggcaacccagccagcggccacaactacttcctggtgaacagccagcagcgctggacccacatccggctgaacatcttcccagatggcggcatcgcccggctgcgggtgtttggcaccggccagaaggactggacagccacagaccccaaggagcctgctgacctggtggccatcgcctttggaggagtgtgtgtgggcttcagcaatgccaagtttggccaccccaacaacatcatcggcgtgggcggggccaagtccatggctgatggctgggagacagcccggcggctggacaggcctcccatcctggagaatgatgaaaatggcatcctgctggtgcccggctgtgagtgggccgtgttccggctggcccaccctggggtcatcaccagaattgaaattgacaccaagtactttgagggcaatgccccagacagctgcaaggtggatggctgcatcctgaccacccaggaggaggaggccgtcatccggcagaagtggatcctgcctgcccacaagtggaagcccctgctgcctgtgaccaagctgagccccaaccagagccacctgtttgacagcctgaccctggagctgcaggatgtgatcacccacgcccggctgaccatcgtgcctgatggaggagtgtcccggctgcggctgcggggcttccccagcagcatctgcctgctgcggccccgggagaagcccatgctgaagttctctgtgtccttcaaggccaacccctag

SEQ ID NO: 143316 - DNA, 486 bp, synthetic construct
  misc_feature 1..486: note = Description of Artificial Sequence: Synthetic coding sequence
  source 1..486: mol_type = other DNA
ggcaggaaggccagcgagaagacaggaggccgggagggggagcctgctgaccggggcctgcagctgggcggcaaggccttcggcctgctgaaggcccagcaggaggagcggctggatgagatcaacaagcagttcctggatgaccccaagtacagcagtgatgaggacctgcccagcaagctggagggcttcaaggagaagtacatggagtttgacctgaatggaaatggagacatcgacatcatgagcctgaagaggatgctggagaagctgggcgtgcccaagacccacctggagctgaagaagctgattggagaggtgagcagcggcagcggggagaccttctcctacccagacttcctgaggatgatgctgggcaagaggtctgccatcctgaagatgatcctgatgtatgaggagaaggcccgggagaaggagaagcccactggacctccagccaagaaggccatcagcgagctgccctag

SEQ ID NO: 143317 - DNA, 282 bp, synthetic construct
  misc_feature 1..282: note = Description of Artificial Sequence: Synthetic coding sequence
  source 1..282: mol_type = other DNA
atggagtttgacctgaatggaaatggagacatcgacatcatgagcctgaagaggatgctggagaagctgggcgtgcccaagacccacctggagctgaagaagctgattggagaggtgagcagcggcagcggggagaccttctcctacccagacttcctgaggatgatgctgggcaagaggtctgccatcctgaagatgatcctgatgtatgaggagaaggcccgggagaaggagaagcccactggacctccagccaagaaggccatcagcgagctgccctag

SEQ ID NO: 143318 - DNA, 444 bp, synthetic construct
  misc_feature 1..444: note = Description of Artificial Sequence: Synthetic coding sequence
  source 1..444: mol_type = other DNA
atgagccagacccgggacctgcagggcggcaaggccttcggcctgctgaaggcccagcaggaggagcggctggatgagatcaacaagcagttcctggatgaccccaagtacagcagtgatgaggacctgcccagcaagctggagggcttcaaggagaagtacatggagtttgacctgaatggaaatggagacatcgacatcatgagcctgaagaggatgctggagaagctgggcgtgcccaagacccacctggagctgaagaagctgattggagaggtgagcagcggcagcggggagaccttctcctacccagacttcctgaggatgatgctgggcaagaggtctgccatcctgaagatgatcctgatgtatgaggagaaggcccgggagaaggagaagcccactggacctccagccaagaaggccatcagcgagctgccctag

SEQ ID NO: 143319 - DNA, 282 bp, synthetic construct; identical to SEQ ID NO: 143317
  misc_feature 1..282: note = Description of Artificial Sequence: Synthetic coding sequence
  source 1..282: mol_type = other DNA

SEQ ID NO: 143320 - DNA, 444 bp, synthetic construct; identical to SEQ ID NO: 143318
  misc_feature 1..444: note = Description of Artificial Sequence: Synthetic coding sequence
  source 1..444: mol_type = other DNA

SEQ ID NO: 143321 - DNA, 486 bp, synthetic construct; identical to SEQ ID NO: 143316
  misc_feature 1..486: note = Description of Artificial Sequence: Synthetic coding sequence
  source 1..486: mol_type = other DNA

SEQ ID NO: 143322 - DNA, 444 bp, synthetic construct; identical to SEQ ID NO: 143318
  misc_feature 1..444: note = Description of Artificial Sequence: Synthetic coding sequence
  source 1..444: mol_type = other DNA

SEQ ID NO: 143323 - DNA, 444 bp, synthetic construct; identical to SEQ ID NO: 143318
  misc_feature 1..444: note = Description of Artificial Sequence: Synthetic coding sequence
  source 1..444: mol_type = other DNA

SEQ ID NO: 143324 - DNA, 282 bp, synthetic construct; identical to SEQ ID NO: 143317
  misc_feature 1..282: note = Description of Artificial Sequence: Synthetic coding sequence
  source 1..282: mol_type = other DNA

SEQ ID NO: 143325 - DNA, 282 bp, synthetic construct; identical to SEQ ID NO: 143317
  misc_feature 1..282: note = Description of Artificial Sequence: Synthetic coding sequence
  source 1..282: mol_type = other DNA

SEQ ID NO: 143326 - DNA, 486 bp, synthetic construct; identical to SEQ ID NO: 143316
  misc_feature 1..486: note = Description of Artificial Sequence: Synthetic coding sequence
  source 1..486: mol_type = other DNA

SEQ ID NO: 143327 - DNA, 282 bp, synthetic construct; identical to SEQ ID NO: 143317
  misc_feature 1..282: note = Description of Artificial Sequence: Synthetic coding sequence
  source 1..282: mol_type = other DNA

SEQ ID NO: 143328 - DNA, 282 bp, synthetic construct; identical to SEQ ID NO: 143317
  misc_feature 1..282: note = Description of Artificial Sequence: Synthetic coding sequence
  source 1..282: mol_type = other DNA

SEQ ID NO: 143329 - DNA, 444 bp, synthetic construct; identical to SEQ ID NO: 143318
  misc_feature 1..444: note = Description of Artificial Sequence: Synthetic coding sequence
  source 1..444: mol_type = other DNA

SEQ ID NO: 143330 - DNA, 486 bp, synthetic construct; identical to SEQ ID NO: 143316
  misc_feature 1..486: note = Description of Artificial Sequence: Synthetic coding sequence
  source 1..486: mol_type = other DNA

SEQ ID NO: 143331 - DNA, 444 bp, synthetic construct; identical to SEQ ID NO: 143318
  misc_feature 1..444: note = Description of Artificial Sequence: Synthetic coding sequence
  source 1..444: mol_type = other DNA

SEQ ID NO: 143332 - DNA, 486 bp, synthetic construct; identical to SEQ ID NO: 143316
  misc_feature 1..486: note = Description of Artificial Sequence: Synthetic coding sequence
  source 1..486: mol_type = other DNA

SEQ ID NO: 143333 - DNA, 486 bp, synthetic construct; identical to SEQ ID NO: 143316
  misc_feature 1..486: note = Description of Artificial Sequence: Synthetic coding sequence
  source 1..486: mol_type = other DNA

SEQ ID NO: 143334 - DNA, 282 bp, synthetic construct; identical to SEQ ID NO: 143317
  misc_feature 1..282: note = Description of Artificial Sequence: Synthetic coding sequence
  source 1..282: mol_type = other DNA

SEQ ID NO: 143335 - DNA, 1062 bp, synthetic construct
  misc_feature 1..1062: note = Description of Artificial Sequence: Synthetic coding sequence
  source 1..1062: mol_type = other DNA
atgagcaagcccccagacctgctgctgcggctgctgcggggggccccccggcagagggtgtgcaccctcttcatcatcggcttcaagttcaccttctttgtgtccatcatgatctactggcacgtggtgggggagcccaaggagaagggccagctgtacaacctgcctgctgagatcccctgccccaccctgaccccacccaccccacccagccacggccccaccccaggcaacatcttcttcctggagaccagtgacaggaccaaccccaacttcctgttcatgtgcagcgtggagagcgctgcccggacccaccctgagagccacgtgctggtgctgatgaagggcctgcccggcggcaatgccagcctgcccaggcacctgggcatcagcctgctgagctgcttccccaacgtgcagatgctgcccctggacctgcgggagctgttccgggacacccccctggccgactggtacgccgctgtgcagggccgctgggagccctacctgctgcctgtgctgagtgatgccagccgcatcgccctgatgtggaagtttggaggcatctacctggacacagacttcatcgtgctgaagaacctgaggaacctgaccaacgtgctgggcacccagagccgctacgtgctgaatggagccttcctggcctttgaaagaagacatgagttcatggccctgtgcatgagggactttgtggaccactacaacggctggatctggggccaccagggcccccagctgctgaccagggtcttcaagaagtggtgcagcatccgcagcctggccgagagccgggcctgccggggcgtgaccaccctgcccccagaggccttctaccccatcccctggcaggactggaagaagtactttgaggacatcaaccctgaggagctgccccggctgctgagcgccacctatgctgtgcacgtgtggaacaagaagagccagggcaccaggtttgaggccaccagccgggccctgctggcccagctgcacgcccgctactgccccaccacccatgaggccatgaagatgtacctgtag

SEQ ID NO: 143336 - DNA, 1062 bp, synthetic construct; identical to SEQ ID NO: 143335
  misc_feature 1..1062: note = Description of Artificial Sequence: Synthetic coding sequence
  source 1..1062: mol_type = other DNA

SEQ ID NO: 143337 - DNA, 1062 bp, synthetic construct; identical to SEQ ID NO: 143335
  misc_feature 1..1062: note = Description of Artificial Sequence: Synthetic coding sequence
  source 1..1062: mol_type = other DNA

SEQ ID NO: 143338 - DNA, 1311 bp, synthetic construct
  misc_feature 1..1311: note = Description of Artificial Sequence: Synthetic coding sequence
  source 1..1311: mol_type = other DNA
atgagcaagcccccagacctgctgctgcggctgctgcggggggccccccggcagagggtgtgcaccctcttcatcatcggcttcaagttcaccttctttgtgtccatcatgatctactggcacgtggtgggggagcccaaggagaagggccagctgtacaacctgcctgctgagatcccctgccccaccctgaccccacccaccccacccagccacggccccaccccaggcaacatcttcttcctggagaccagtgacaggaccaaccccaacttcctgttcatgtgcagcgtggagagcgctgcccggacccaccctgagagccacgtgctggtgctgatgaagggcctgcccggcggcaatgccagcctgcccaggcacctgggcatcagcctgctgagctgcttccccaacgtgcagatgctgcccctggacctgcgggagctgttccgggacacccccctggccgactggtacgccgctgtgcagggccgctgggagccctacctgctgcctgtgctgagtgatgccagccgcatcgccctgatgtggaagtttggaggcatctacctggacacagacttcatcgtgctgaagaacctgaggaacctgaccaacgtgctgggcacccagagccgctacgtgctgaatggagccttcctggcctttgaaagaagacatgagttcatggccctgtgcatgagggactttgtggaccactacaacggctggatctggggccaccagggcccccagctgctgaccagggtcttcaagaagtggtgcagcatccgcagcctggccgagagccgggcctgccggggcgtgaccaccctgcccccagaggccttctaccccatcccctggcaggactggaagaagtactttgaggacatcaaccctgaggagctgccccggctgctgagcgccacctatgctgtgcacgtgtggaacaagaagagccagggcacagctggccctgctgcctgccccctgctgccccatgatgcccggggccatgaaaatgtgctggtgcggggccccccaggccacctgcccaacctgctgctgatgggccactgggccgccctgcctggagaggcccggctgcgggcccgggagcgggaggcccgggccgccaccggcctgcggcaggccgtggaggagctgtgggagcaggcccagtgggaggccgtggacacccccaggacagtgtcctgcctggaggccggcctgacccacggggccatcgccagcggcggccgctctgtgtctgcccctggcctgctggacaaccggcaggagggctag

SEQ ID NO: 143339 - DNA, 309 bp, synthetic construct
  misc_feature 1..309: note = Description of Artificial Sequence: Synthetic coding sequence
  source 1..309: mol_type = other DNA
atggccctgctgaaggccaacaaggacctgatctctgctggcctgaaggagttctctgtgctgctgaaccagcaggtgttcaatgaccccctggtgtctgaggaggacatggtgacagtggtggaggactggatgaacttctacatcaactactaccggcagcaggtgactggagagccccaggagcgggacaaggccctgcaggagctgcggcaggagctgaacaccctggccaaccccttcctggccaagtacagagacttcctgaagagccatgagctgcccagccaccccccacccagcagctag

SEQ ID NO: 143340 - DNA, 1488 bp, synthetic construct
  misc_feature 1..1488: note = Description of Artificial Sequence: Synthetic coding sequence
  source 1..1488: mol_type = other DNA
atgtccatgctggtggtgttcctgctgctgtggggcgtgacctggggccctgtgacagaagctgccatcttctatgagacccagcccagcctgtgggccgagagcgagagcctgctgaagcccctggccaacgtgaccctgacctgccaggcccacctggagaccccagacttccagctgttcaagaatggagtggcccaggagcctgtgcacctggacagccctgccatcaagcaccagttcctgctgaccggggacacccagggccgctaccgctgccgcagcggcctgagcacaggctggacccagctgagcaagctgctggagctgaccggccccaagagcctgcctgccccctggctgtccatggcccctgtgtcctggatcaccccaggcctgaagaccacagctgtgtgccggggcgtgctgcggggcgtgaccttcctgctgcggcgggagggggaccacgagttcctggaggtgcctgaggcccaggaggatgtggaggccaccttccctgtgcaccagcccggcaactacagctgcagctacagaacagatggagagggcgccctgtctgagcccagcgccaccgtgaccatcgaggagctggccgcccctcctcctcctgtgctgatgcaccacggggagagcagccaggtgctgcaccctggcaacaaggtgaccctgacctgtgtggcccccctgtctggagtggacttccagctgcggcggggggagaaggagctgctggtgcccaggagcagcaccagcccagaccgcatcttcttccacctgaatgctgtggccctgggagatggcggccactacacctgccgctaccgcctgcatgacaaccagaatggctggagcggggacagcgcccctgtggagctgatcctgagtgatgagaccctgcctgcccctgagttcagccctgagcctgagagcggccgggccctgcggctgcgctgcctggcccccctggagggcgccaggtttgccctggtgagagaagatcggggcggccggcgggtgcaccgcttccagagccctgctggaacagaggccctgtttgagctgcacaacatctctgtggccgacagcgccaactacagctgtgtgtatgtggacctgaagcccccatttggaggcagcgcccccagcgagcggctggagctgcacgtggatggccccccaccccggccccagctgcgggccacctggagcggggctgtgctggccggcagagatgctgtgctgcgctgtgagggccccatcccagatgtgacctttgagctgctgcgggagggggagaccaaggctgtgaagacagtgaggaccccaggagctgctgccaacctggagctgatctttgtgggcccccagcacgccggcaactaccgctgccgctaccgctcctgggtgccccacacctttgagagcgagctgagtgaccctgtggagctgctggtggccgagagctag

SEQ ID NO: 143341 - DNA, 1059 bp, synthetic construct
  misc_feature 1..1059: note = Description of Artificial Sequence: Synthetic coding sequence
  source 1..1059: mol_type = other DNA
atgaggagcctgggcgccctgctgctgctgctgagcgcctgcctggccgtgtctgctggccctgtgcccaccccaccagacaacatccaggtgcaggagaacttcaacatcagccgcatctacggcaagtggtacaacctggccatcggcagcacctgcccctggctgaagaagatcatggacaggatgacagtgtccaccctggtgctgggggagggcgccacagaagctgagatctccatgaccagcacccgctggaggaagggcgtgtgtgaggagaccagcggggcctatgagaagacagacacagatggcaagttcctgtaccacaagagcaagtggaacatcaccatggagagctatgtggtgcacaccaactatgatgaatatgccatcttcctgaccaagaagttcagccgccaccacggccccaccatcacagccaagctgtatggccgggccccccagctgcgggagaccctgctgcaggacttccgggtggtggcccagggcgtgggcatccctgaggacagcatcttcaccatggctgacagaggagaatgtgtgcctggagagcaggagcctgagcccatcctgatcccccgggtgcggcgggctgtgctgccccaggaggaggagggcagcggcggcggccagctggtgacagaggtgaccaagaaggaggacagctgccagctgggctacagcgctggcccctgcatgggcatgaccagccgctacttctacaacggcacctccatggcctgtgagaccttccagtatggaggctgcatgggaaatggaaacaactttgtgacagagaaggagtgcctgcagacctgcaggacagtggccgcctgcaacctgcccatcgtgcggggcccctgccgggccttcatccagctgtgggcctttgatgctgtgaagggcaaatgtgtgctcttcccctatggaggctgccagggcaatggaaacaagttctacagcgagaaggagtgccgggagtactgcggcgtgcctggagatggagatgaggagctgctgcgcttcagcaactag

SEQ ID NO: 143342 - DNA, 813 bp, synthetic construct
  misc_feature 1..813: note = Description of Artificial Sequence: Synthetic coding sequence
  source 1..813: mol_type = other DNA
atggacaggatgacagtgtccaccctggtgctgggggagggcgccacagaggccgagatctccatgaccagcacccgctggaggaaaggagtgtgtgaggagaccagcggggcctatgagaagacagacacagatggcaagttcctgtaccacaagagcaagtggaacatcaccatggagagctatgtggtgcacaccaactatgatgaatatgccatcttcctgaccaagaagttcagccgccaccacggccccaccatcacagccaagctgtatggccgggccccccagctgcgggagaccctgctgcaggacttccgggtggtggcccagggcgtgggcatcccagaagattccatcttcaccatggctgacagaggagaatgtgtgcctggagagcaggagcctgagcccatcctgatcccccgggtgagaagagctgtgctgccccaggaggaggagggcagcggcggcggccagctggtgacagaggtgaccaagaaggaggacagctgccagctgggctacagcgctggcccctgcatgggcatgaccagccgctacttctacaacggcacctccatggcctgtgagaccttccagtatggaggctgcatgggaaatggaaacaactttgtgacagagaaggaatgtctgcagacctgcaggacagtgggagaatgtggcagcccccccctgtgtgccctgcacccccaggaccctgtgccccctgtgaaccacctgcgcatcgagaaggtggccaacagaggccacagcagcggccgcacccctgggggcttcctgaagagctag

SEQ ID NO: 143343 - DNA, 897 bp, synthetic construct
  misc_feature 1..897: note = Description of Artificial Sequence: Synthetic coding sequence
  source 1..897: mol_type = other DNA
atggtgaggatggtgcctgtgctgctgagcctgctgctgctgctgggccctgctgtgccccaggagaaccaggacggccgctacagcctgacctacatctacacaggcctgagcaagcacgtggaggatgtgcctgccttccaggccctgggcagcctgaatgacctgcagttcttccgctacaacagcaaggacaggaagagccagcccatgggcctgtggaggcaggtggagggcatggaggactggaagcaggacagccagctgcagaaggcccgggaggacatcttcatggagaccctgaaggacatcgtggagtactacaatgacagcaatggcagccacgtgctgcagggccgcttcggctgtgaaattgagaacaacagaagcagcggggccttctggaagtactactatgatggcaaggactacatcgagttcaacaaggagatcccagcctgggtgccctttgatcctgctgcccagatcaccaagcagaagtgggaggccgagcctgtgtatgtgcagagggccaaggcctacctggaggaggagtgcccagccaccctgaggaagtacctgaagtacagcaagaacatcctggaccggcaggacccccccagcgtggtggtgaccagccaccaggcccctggagagaagaagaagctgaagtgcctggcctatgacttctacccaggcaagattgatgtgcactggacccgggccggggaggtgcaggagcctgagctgcggggagatgtgctgcacaatggaaatggcacctaccagagctgggtggtggtggccgtgcccccccaggacacagccccctacagctgccacgtgcagcacagcagcctggcccagcccctggtggtgccctgggaggccagctag

SEQ ID NO: 143344 - DNA, 1104 bp, synthetic construct
  misc_feature 1..1104: note = Description of Artificial Sequence: Synthetic coding sequence
  source 1..1104: mol_type = other DNA
atgaagagcctggtgctgctgctgtgcctggcccagctgtggggctgccacagcgcccctcatggccctggcctcatctaccggcagcccaactgtgatgatcctgagacagaggaggccgccctggtggccatcgactacatcaaccagaacctgccctggggctacaagcacaccctgaaccagattgatgaggtgaaggtgtggccccagcagcccagcggggagctgtttgaaattgaaattgacaccctggagaccacctgccacgtgctggaccccacccctgtggcccgctgcagcgtgcggcagctgaaggagcacgctgtggagggggactgtgacttccagctgctgaagctggatggcaagttctctgtggtgtatgccaagtgtgacagcagcccagacagcgcagaagatgtgaggaaggtgtgccaggactgccccctgctggcccccctgaatgacaccagggtggtgcatgctgccaaggccgccctggccgccttcaatgcccagaacaacggcagcaacttccagctggaggagatcagccgggcccagctggtgcccctgccccccagcacctacgtggagttcaccgtgtctggaacagactgtgtggccaaggaggccacagaggccgccaagtgcaacctgctggccgagaagcagtatggcttctgcaaggccaccctgtctgagaagctgggcggcgctgaggtggccgtgacctgcatggtgttccagacccagcctgtgagcagccagccccagcctgagggcgccaatgaagctgtgcccacccctgtggtggaccctgatgccccacccagcccccccctgggcgcccctggcctgcccccagctggcagccccccagacagccacgtgctgctggccgcccctcctggccaccagctgcaccgggcccactatgacctgcggcacaccttcatgggcgtggtgtccctgggcagccccagcggggaggtgagccaccccaggaagaccaggacagtggtgcagcccagcgtgggcgctgctgctggccctgtggtgcccccctgccccggccgcatccgccacttcaaggtgtag

SEQ ID NO: 143345 - DNA, 1302 bp, synthetic construct
  misc_feature 1..1302: note = Description of Artificial Sequence: Synthetic coding sequence
  source 1..1302: mol_type = other DNA
atgtttgctggctgcttcttcttcctgctgaaccagagcaggaaccaccctgtgtccctgtgcaacagcagcggccgcctgcagcagatcaacaaggcccaccaccccccctgggtgtacctgagccagcagagcacctgggtgggccctgaggccagcaaccacctgcacgcctgccagggcctgtctggagctgccatgaagagcctggtgctgctgctgtgcctggcccagctgtggggctgccacagcgcccctcatggccctggcctcatctaccggcagcccaactgtgatgatcctgagacagaggaggccgccctggtggccatcgactacatcaaccagaacctgccctggggctacaagcacaccctgaaccagattgatgaggtgaaggtgtggccccagcagcccagcggggagctgtttgaaattgaaattgacaccctggagaccacctgccacgtgctggaccccacccctgtggcccgctgcagcgtgcggcagctgaaggagcacgctgtggagggggactgtgacttccagctgctgaagctggatggcaagttctctgtggtgtatgccaagtgtgacagcagcccagacagcgcagaagatgtgaggaaggtgtgccaggactgccccctgctggcccccctgaatgacaccagggtggtgcatgctgccaaggccgccctggccgccttcaatgcccagaacaacggcagcaacttccagctggaggagatcagccgggcccagctggtgcccctgccccccagcacctacgtggagttcaccgtgtctggaacagactgtgtggccaaggaggccacagaggccgccaagtgcaacctgctggccgagaagcagtatggcttctgcaaggccaccctgtctgagaagctgggcggcgctgaggtggccgtgacctgcatggtgttccagacccagcctgtgagcagccagccccagcctgagggcgccaatgaagctgtgcccacccctgtggtggaccctgatgccccacccagcccccccctgggcgcccctggcctgcccccagctggcagccccccagacagccacgtgctgctggccgcccctcctggccaccagctgcaccgggcccactatgacctgcggcacaccttcatgggcgtggtgtccctgggcagccccagcggggaggtgagccaccccaggaagaccaggacagtggtgcagcccagcgtgggcgctgctgctggccctgtggtgcccccctgccccggccgcatccgccacttcaaggtgtag

SEQ ID NO: 143346 - DNA, 4425 bp, synthetic construct
  misc_feature 1..4425: note = Description of Artificial Sequence: Synthetic coding sequence
  source 1..4425: mol_type = other DNA
atgggcaagaacaagctgctgcaccccagcctggtgctgctgctgctggtgctgctgcccacagatgcctctgtgtctgggaagccccagtacatggtgctggtgcccagcctgctgcacacagagaccacagagaagggctgtgtgctgctgagctacctgaatgaaacagtgacagtgtctgccagcctggagagcgtgcggggcaacagaagcctcttcacagacctggaggccgagaatgatgtgctgcactgtgtggcctttgctgtgcccaagagcagcagcaatgaggaggtgatgttcctgactgtgcaggtgaagggccccacccaggagttcaagaagaggaccaccgtgatggtgaagaatgaagacagcctggtgtttgtgcagacagacaagagcatctacaagccaggccagacagtgaagttccgggtggtgtccatggatgagaacttccaccccctgaatgaactcatccccctggtgtacatccaggaccccaagggcaacagaattgcccagtggcagagcttccagctggagggcggcctgaagcagttctccttccccctgagcagcgagcccttccagggcagctacaaggtggtggtgcagaagaagagcggcggccgcacagagcaccccttcaccgtggaggagtttgtgctgcccaagtttgaggtgcaggtgacagtgcccaagatcatcaccatcctggaggaggagatgaatgtgtctgtgtgtggcctgtacacctacggcaagcctgtgcccggccacgtgacagtgtccatctgcaggaagtacagtgatgccagtgactgccacggggaggacagccaggccttctgtgagaagttcagcggccagctgaacagccacggctgcttctaccagcaggtgaagaccaaggtgttccagctgaagaggaaggagtatgagatgaagctgcacacagaggcccagatccaggaggagggcaccgtggtggagctgaccggccggcagagcagcgagatcaccaggaccatcaccaagctgagctttgtgaaggtggacagccacttccggcagggcatccccttcttcggccaggtgcggctggtggatggaaaaggagtgcccatccccaacaaggtgatcttcatcagaggaaatgaggccaactactacagcaatgccaccacagatgagcacggcctggtgcagttcagcatcaacaccaccaacgtgatgggcaccagcctgactgtgcgggtgaactacaaggacaggagcccctgctacggctaccagtgggtgtctgaggagcacgaggaggcccaccacacagcctacctggtgttcagccccagcaagagctttgtgcacctggagcccatgagccatgagctgccctgtggccacacccagacagtgcaggcccactacatcctgaatggaggcaccctgctgggcctgaagaagctgtccttctactacctgatcatggccaagggcggcatcgtgaggacaggcacccacggcctgctggtgaagcaggaggacatgaagggccacttcagcatcagcatccctgtgaagagtgacatcgcccctgtggcccggctgctgatctatgctgtgctgcccactggagatgtgattggagacagcgccaagtatgatgtggagaactgcctggccaacaaggtggacctgtccttcagccccagccagagcctgcctgccagccacgcccacctgcgggtgacagctgccccccagagcgtgtgtgccctgcgggctgtggaccagagcgtgctgctgatgaagccagatgctgagctgagcgccagctctgtgtacaacctgctgcctgagaaggacctgaccggcttccctggccccctgaatgaccaggacaatgaagactgcatcaacagacacaacgtgtacatcaatggcatcacctacacccctgtgagcagcaccaatgagaaggacatgtacagcttcctggaggacatgggcctgaaggccttcaccaacagcaagatcaggaagcccaagatgtgcccccagctgcagcagtatgagatgcacggccctgagggcctgcgggtgggcttctatgaaagtgatgtgatgggccggggccacgcccggctggtgcacgtggaggagccccacacagagaccgtgaggaagtacttccctgagacctggatctgggacctggtggtggtgaacagcgctggggtggccgaggtgggcgtgacagtgcctgacaccatcacagagtggaaggccggggccttctgcctgtctgaagatgctggcctgggcatcagcagcacagccagcctgcgggccttccagcccttctttgtggagctgaccatgccctacagcgtcatccggggggaggccttcaccctgaaggccaccgtgctgaactacctgcccaagtgcatccgggtgtctgtgcagctggaggccagccctgccttcctggccgtgcctgtggagaaggagcaggccccccactgcatctgtgccaacggccggcagacagtgtcctgggccgtgacccccaagagcctgggcaatgtgaacttcaccgtgtctgctgaggccctggagagccaggagctgtgtggcacagaggtgcccagcgtgcctgagcacggcaggaaggacaccgtcatcaagcccctgctggtggagcctgagggcctggagaaggagaccaccttcaacagcctgctgtgccccagcggcggggaggtgtctgaggagctgagcctgaagctgccccccaacgtggtggaggagagcgcccgggcctctgtgtctgtgctgggggacatcctgggcagcgccatgcagaacacccagaacctgctgcagatgccctacggctgtggggagcagaacatggtgctgtttgcccccaacatctacgtgctggactacctgaatgagacccagcagctgaccccagagatcaagagcaaggccatcggctacctgaacacaggctaccagaggcagctgaactacaagcactatgatggcagctacagcaccttcggggagagatatggcaggaaccagggcaacacctggctgacagcctttgtgctgaagacctttgcccaggcccgggcctacatcttcattgatgaggcccacatcacccaggccctgatctggctgagccagaggcagaaggacaatggctgcttccgcagcagcggcagcctgctgaacaatgccatcaagggcggcgtggaggatgaggtgaccctgagcgcctacatcaccatcgccctgctggagatccccctgactgtgacccaccctgtggtgagaaatgccctcttctgcctggagagcgcctggaagacagcccaggagggggaccacggcagccacgtgtacaccaaggccctgctggcctatgcctttgccctggccggcaaccaggacaagaggaaggaggtgctgaagagcctgaatgaggaggccgtgaagaaggacaacagcgtgcactgggagcggccccagaagcccaaggcccctgtgggccacttctatgagccccaggcccccagcgctgaggtggagatgaccagctatgtgctgctggcctacctgacagcccagcctgcccccaccagcgaggacctgaccagcgccaccaacatcgtgaagtggatcaccaagcagcagaatgcccagggcggcttcagcagcacccaggacacagtggtggccctgcacgccctgagcaagtacggggccgccaccttcaccaggacaggcaaggccgcccaggtgaccatccagagcagcggcaccttcagcagcaagttccaggtggacaacaacaaccggctgctgctgcagcaggtgtccctgcctgagctgcctggagagtacagcatgaaggtgactggagagggctgtgtgtacctgcagaccagcctgaagtacaacatcctgcctgagaaggaggagttcccctttgccctgggcgtgcagaccctgccccagacctgtgatgagcccaaggcccacaccagcttccagatcagcctgtctgtgtcctacacaggcagccgcagcgccagcaacatggccatcgtggatgtgaagatggtgtctggcttcatccccctgaagcccaccgtgaagatgctggagaggagcaaccacgtgtccaggacagaggtgagcagcaaccacgtgctgatctacctggacaaggtgagcaaccagaccctgagcctcttcttcaccgtgctgcaggatgtgcctgtgcgggacctgaagccagccatcgtgaaggtgtatgactactatgaaacagatgaatttgccatcgccgagtacaatgccccctgcagcaaggacctgggcaatgcctag

SEQ ID NO: 143347 - DNA, 507 bp, synthetic construct
  misc_feature 1..507: note = Description of Artificial Sequence: Synthetic coding sequence
  source 1..507: mol_type = other DNA
atgggcaagaacaagctgctgcaccccagcctggtgctgctgctgctggtgctgctgcccacagatgcctctgtgtctgggaagccccagtacatggtgctggtgcccagcctgctgcacacagagaccacagagaagggctgtgtgctgctgagctacctgaatgaaacagtgacagtgtctgccagcctggagagcgtgcggggcaacagaagcctcttcacagacctggaggccgagaatgatgtgctgcactgtgtggcctttgctgtgcccaagagcagcagcaatgaggaggtgatgttcctgactgtgcaggtgaagggccccacccaggagttcaagaagaggaccaccgtgatggtgaagaatgaagacagcctggtgtttgtgcagacagacaagagcatctacaagccaggccagacagtgaagttccgggtggtgtccatggatgagaacttccaccccctgaatgaactcatccccctggtgtacatccagtag

SEQ ID NO: 143348 - DNA, 4470 bp, synthetic construct
  misc_feature 1..4470: note = Description of Artificial Sequence: Synthetic coding sequence
  source 1..4470: mol_type = other DNA
cgggtgcagtatgtgtgcagccccccagcccccagcttctgcaacatgggcaagaacaagctgctgcaccccagcctggtgctgctgctgctggtgctgctgcccacagatgcctctgtgtctgggaagccccagtacatggtgctggtgcccagcctgctgcacacagagaccacagagaagggctgtgtgctgctgagctacctgaatgagaccgtgacagtgtctgccagcctggagagcgtgcggggcaacagaagcctcttcacagacctggaggctgaaaatgatgtgctgcactgtgtggcctttgctgtgcccaagagcagcagcaatgaggaggtgatgttcctgactgtgcaggtgaagggccccacccaggagttcaagaagaggaccaccgtgatggtgaagaatgaagacagcctggtgtttgtgcagacagacaagagcatctacaagccaggccagacagtgaagttccgggtggtgtccatggatgagaacttccaccccctgaatgagctgatccccctggtgtacatccaggaccccaagggcaaccgcatcgcccagtggcagagcttccagctggagggcggcctgaagcagttctccttccccctgagcagcgagcccttccagggcagctacaaggtggtggtgcagaagaagagcggcggccgcacagagcaccccttcaccgtggaggagtttgtgctgcccaagtttgaggtgcaggtgacagtgcccaagatcatcaccatcctggaggaggagatgaatgtgtctgtgtgtggcctgtacacctacggcaagcctgtgcccggccacgtgacagtgtccatctgcaggaagtacagtgatgccagtgactgccacggggaggacagccaggccttctgtgagaagttcagcggccagctgaacagccacggctgcttctaccagcaggtgaagaccaaggtgttccagctgaagaggaaggagtatgagatgaagctgcacacagaggcccagatccaggaggagggcaccgtggtggagctgaccggccggcagagcagcgagatcaccaggaccatcaccaagctgagctttgtgaaggtggacagccacttccggcagggcatccccttcttcggccaggtgcggctggtggatggcaagggcgtgcccatccccaacaaggtgatcttcatcagaggaaatgaggccaactactacagcaatgccaccacagatgaacatggcctggtgcagttcagcatcaacaccaccaacgtgatgggcaccagcctgactgtgcgggtgaactacaaggacaggagcccctgctacggctaccagtgggtgtctgaggagcacgaggaggcccaccacacagcctacctggtgttcagccccagcaagagctttgtgcacctggagcccatgagccatgagctgccctgtggccacacccagacagtgcaggcccactacatcctgaatggaggcaccctgctgggcctgaagaagctgtccttctactacctgatcatggccaagggcggcatcgtgaggacaggcacccacggcctgctggtgaagcaggaggacatgaagggccacttcagcatcagcatccctgtgaagagtgacatcgcccctgtggcccggctgctgatctatgctgtgctgcccactggagatgtgattggagacagcgccaagtatgatgtggagaactgcctggccaacaaggtggacctgtccttcagccccagccagagcctgcctgccagccacgcccacctgcgggtgacagctgccccccagagcgtgtgtgccctgcgggctgtggaccagagcgtgctgctgatgaagccagatgctgagctgagcgccagctctgtgtacaacctgctgcctgagaaggacctgaccggcttccctggccccctgaatgaccaggacaatgaagactgcatcaacagacacaacgtgtacatcaatggcatcacctacacccctgtgagcagcaccaatgagaaggacatgtacagcttcctggaggacatgggcctgaaggccttcaccaacagcaagatcaggaagcccaagatgtgcccccagctgcagcagtatgagatgcacggccctgagggcctgcgggtgggcttctatgaaagtgatgtgatgggccggggccacgcccggctggtgcacgtggaggagccccacacagaaacagtgaggaagtacttccctgagacctggatctgggacctggtggtggtgaacagcgctggggtggccgaggtgggcgtgacagtgcctgacaccatcacagagtggaaggccggggccttctgcctgtctgaagatgctggcctgggcatcagcagcacagccagcctgcgggccttccagcccttctttgtggagctgaccatgccctacagcgtcatccggggggaggccttcaccctgaaggccaccgtgctgaactacctgcccaagtgcatccgggtgtctgtgcagctggaggccagccctgccttcctggccgtgcctgtggagaaggagcaggccccccactgcatctgtgccaacggccggcagacagtgtcctgggccgtgacccccaagagcctgggcaatgtgaacttcaccgtgtctgctgaggccctggagagccaggagctgtgtggcacagaggtgcccagcgtgcctgagcacggcaggaaggacaccgtcatcaagcccctgctggtggagcctgagggcctggagaaggagaccaccttcaacagcctgctgtgccccagcggcggggaggtgtctgaggagctgagcctgaagctgcccccaaatgtggtggaggagagcgcccgggcctctgtgtctgtgctgggggacatcctgggcagcgccatgcagaacacccagaacctgctgcagatgccctacggctgtggggagcagaacatggtgctgtttgcccccaacatctacgtgctggactacctgaatgagacccagcagctgaccccagagatcaagagcaaggccatcggctacctgaacacaggctaccagaggcagctgaactacaagcactatgatggcagctacagcacctttggagagagatatggaagaaaccagggcaacacctggctgacagcctttgtgctgaagacctttgcccaggcccgggcctacatcttcattgatgaggcccacatcacccaggccctgatctggctgagccagaggcagaaggacaatggctgcttccgcagcagcggcagcctgctgaacaatgccatcaagggcggcgtggaggatgaggtgaccctgagcgcctacatcaccatcgccctgctggagatccccctgactgtgacccaccctgtggtgagaaatgccctcttctgcctggagagcgcctggaagacagcccaggagggggaccacggcagccacgtgtacaccaaggccctgctggcctatgcctttgccctggccggcaaccaggacaagaggaaggaggtgctgaagagcctgaatgaggaggccgtgaagaaggacaacagcgtgcactgggagcggccccagaagcccaaggcccctgtgggccacttctatgagccccaggcccccagcgctgaggtggagatgaccagctatgtgctgctggcctacctgacagcccagcctgcccccaccagcgaggacctgaccagcgccaccaacatcgtgaagtggatcaccaagcagcagaatgcccagggcggcttcagcagcacccaggacacagtggtggccctgcacgccctgagcaaatatggagctgccaccttcaccaggacaggcaaggccgcccaggtgaccatccagagcagcggcaccttcagcagcaagttccaggtggacaacaacaaccggctgctgctgcagcaggtgtccctgcctgagctgcccggggagtacagcatgaaggtgactggagagggctgtgtgtacctgcagaccagcctgaagtacaacatcctgcctgagaaggaggagttcccctttgccctgggcgtgcagaccctgccccagacctgtgatgagcccaaggcccacaccagcttccagatcagcctgtctgtgtcctacacaggcagccgcagcgccagcaacatggccatcgtggatgtgaagatggtgtctggcttcatccccctgaagcccaccgtgaagatgctggagaggagcaaccacgtgtccaggacagaggtgagcagcaaccacgtgctgatctacctggacaaggtgagcaaccagaccctgagcctcttcttcaccgtgctgcaggatgtgcctgtgcgggacctgaagccagccatcgtgaaggtgtatgactactatgaaacagatgaatttgccatcgccgagtacaatgccccctgcagcaaggacctgggcaatgcctag

SEQ ID NO: 143349 - DNA, 4365 bp, synthetic construct
  misc_feature 1..4365: note = Description of Artificial Sequence: Synthetic coding sequence
  source 1..4365: mol_type = other DNA
atgtgggcccagctgctgctgggcatgctggccctgagccctgccatcgccgaggagctgcccaactacctggtgaccctgcctgcccggctgaacttccccagcgtgcagaaggtgtgcctggacctgagccctggctacagtgatgtgaagttcaccgtgaccctggagaccaaggacaagacccagaagctgctggagtacagcggcctgaagaagaggcacctgcactgcatctccttcctggtgcccccacctgctgggggcacagaggaggtggccaccatccgggtgtctggagtgggcaacaacatcagctttgaggagaagaagaaggtgctgatccagaggcagggcaatggcacctttgtgcagacagacaagcccctgtacaccccaggccagcaggtgtacttcagaattgtgaccatggacagcaactttgtgcctgtgaatgacaagtacagcatggtggagctgcaggaccccaacagcaaccgcatcgcccagtggctggaggtggtgcctgagcagggcatcgtggacctgtccttccagctggcccctgaggccatgctgggcacctacacagtggccgtggccgagggcaagaccttcggcaccttctctgtggaggagtatgtgctgcccaagttcaaggtggaggtggtggagcccaaggagctgagcacagtgcaggagagcttcctggtgaagatctgctgccgctacacctacggcaagcccatgctgggcgctgtgcaggtgtctgtgtgccagaaggccaacacctactggtaccgggaggtggagcgggagcagctgcctgacaagtgcaggaacctgagcggccagacagacaagacaggctgcttcagcgcccctgtggacatggccacctttgacctgattggctacgcctacagccaccagatcaacatcgtggccaccgtggtggaggagggcactggagtggaggccaatgccacccagaacatctacatcagcccccagatgggctccatgacctttgaggacaccagcaacttctaccaccccaacttccccttcagcggcaagatccgggtgcggggccatgatgacagcttcctgaagaaccacctggtgttcctggtgatctacggcaccaacggcaccttcaaccagaccctggtgacagacaacaacggcctggcccccttcaccctggagaccagcggctggaatggaacagatgtgtccctggagggcaagttccagatggaggacctggtgtacaaccctgagcaggtgccccgctactaccagaatgcctacctgcacctgcggcccttctacagcaccaccaggagcttcctgggcatccaccggctgaatggccccctgaagtgtggccagccccaggaggtgctggtggactactacatcgaccctgcagatgccagcccagaccaggagatctccttctcctactacctgattggcaagggcagcctggtgatggagggccagaagcacctgaacagcaagaagaagggcctgaaggccagcttcagcctgagcctgaccttcaccagccggctggccccagaccccagcctggtgatctatgccatcttccccagcggcggcgtggtggccgacaagatccagttctctgtggagatgtgctttgacaaccaggtgtccctgggcttcagccccagccagcagctgcctggagctgaggtggagctgcagctgcaggccgcccctggcagcctgtgtgccctgcgggctgtggatgaatctgtgctgctgctgcggccagaccgggagctgagcaacagatctgtgtatggcatgttccccttctggtacggccactacccctaccaggtggccgagtatgaccagtgccctgtgtctggcccctgggacttcccccagcccctgattgaccccatgccccagggccacagcagccagaggagcatcatctggaggcccagcttcagcgagggcacagacctcttctccttcttcagagatgtgggcctgaagatcctgagcaatgccaagatcaagaagcctgtggactgcagccacaggagccctgagtacagcacagccatgggcgccggcggcggccaccctgaggcctttgagagcagcacccccctgcaccaggccgaggacagccaggtgcggcagtacttccctgagacctggctgtgggacctcttccccatcggcaacagcggcaaggaggccgtgcacgtgacagtgcctgatgccatcacagagtggaaggccatgtccttctgcaccagccagagccggggcttcggcctgagccccaccgtgggcctgacagccttcaagcccttctttgtggacctgaccctgccctacagcgtggtgcggggggagagcttccggctgacagccaccatcttcaactacctgaaggactgcatccgggtgcagacagacctggccaagagccatgagtaccagctggagagctgggccgacagccagaccagcagctgcctgtgtgctgatgatgccaagacccaccactggaacatcacagctgtgaagctgggccacatcaacttcaccatcagcaccaagatcctggacagcaatgagccctgtggcggccagaagggctttgtgccccagaagggccgcagtgacaccctcatcaagcctgtgctggtgaagccagagggcgtgctggtggagaagacccacagcagcctgctgtgccccaagggcaaggtggccagcgagagcgtgtccctggagctgcctgtggacatcgtgcctgacagcaccaaggcctacgtgacagtgctgggggacatcatgggcacagccctgcagaacctggatggcctggtgcagatgcccagcggctgtggggagcagaacatggtgctgtttgcccccatcatctacgtgctgcagtacctggagaaggccggcctgctgacagaggagatccgcagcagagctgtgggcttcctggagatcggctaccagaaggagctgatgtacaagcacagcaatggcagctacagcgccttcggggagagagatggaaatggaaacacctggctgacagcctttgtgaccaagtgcttcggccaggcccagaagttcatcttcatcgaccccaagaacatccaggatgccctgaagtggatggccggcaaccagctgcccagcggctgctacgccaacgtgggcaacctgctgcacacagccatgaagggcggcgtggatgatgaggtgtccctgacagcctacgtgacagctgccctgctggagatgggcaaggatgtggatgaccccatggtgtcccagggcctgcgctgcctgaagaacagcgccaccagcaccaccaacctgtacacccaggccctgctggcctacatcttcagcctggccggggagatggacatccggaacatcctgctgaagcagctggaccagcaggccatcatctctggagagagcatctactggagccagaagcccacccccagcagcaatgccagcccctggagcgagcctgctgctgtggatgtggagctgacagcctatgccctgctggcccagctgaccaagcccagcctgacccagaaggagatcgccaaggccaccagcatcgtggcctggctggccaagcagcacaatgcctacggcggcttcagcagcacccaggacacagtggtggccctgcaggccctggccaagtatgccaccacagcctacatgcccagcgaggagatcaacctggtggtgaagagcacagagaacttccagaggaccttcaacatccagagcgtgaaccggctggtgttccagcaggacaccctgcccaacgtgcccggcatgtacaccctggaggccagcggccagggctgtgtgtatgtgcagacagtgctgcgctacaacatcctgccccccaccaacatgaagaccttcagcctgtctgtggagatcggcaaggcccgctgtgagcagcccaccagccccaggagcctgaccctgaccatccacaccagctatgtgggcagccgcagcagcagcaacatggccatcgtggaggtgaagatgctgagcggcttcagccccatggagggcaccaaccagctgctgctgcagcagcccctggtgaagaaggtggagtttggaacagacaccctgaacatctacctggatgagctgatcaagaacacccagacctacaccttcaccatcagccagagcgtgctggtgaccaacctgaagccagccaccatcaaggtgtatgactactacctgcctgatgagcaggccaccatccagtacagcgacccctgtgagtag

SEQ ID NO: 143350 - DNA, 4365 bp, synthetic construct
  misc_feature 1..4365: note = Description of Artificial Sequence: Synthetic coding sequence
  source 1..4365: mol_type = other DNA
atgtgggcccagctgctgctgggcatgctggccctgagccctgccatcgccgaggagctgcccaactacctggtgaccctgcctgcccggctgaacttccccagcgtgcagaaggtgtgcctggacctgagccctggctacagtgatgtgaagttcaccgtgaccctggagaccaaggacaagacccagaagctgctggagtacagcggcctgaagaagaggcacctgcactgcatctccttcctggtgcccccacctgctgggggcacagaggaggtggccaccatccgggtgtctggagtgggcaacaacatcagctttgaggagaagaagaaggtgctgatccagaggcagggcaatggcacctttgtgcagacagacaagcccctgtacaccccaggccagcaggtgtacttcagaattgtgaccatggacagcaactttgtgcctgtgaatgacaaggtgtcctgggaggagggccaggaccccaacagcaaccgcatcgcccagtggctggaggtggtgcctgagcagggcatcgtggacctgtccttccagctggcccctgaggccatgctgggcacctacacagtggccgtggccgagggcaagaccttcggcaccttctctgtggaggagtatgtgctgcccaagttcaaggtggaggtggtggagcccaaggagctgagcacagtgcaggagagcttcctggtgaagatctgctgccgctacacctacggcaagcccatgctgggcgctgtgcaggtgtctgtgtgccagaaggccaacacctactggtaccgggaggtggagcgggagcagctgcctgacaagtgcaggaacctgagcggccagacagacaagacaggctgcttcagcgcccctgtggacatggccacctttgacctgattggctacgcctacagccaccagatcaacatcgtggccaccgtggtggaggagggcactggagtggaggccaatgccacccagaacatctacatcagcccccagatgggctccatgacctttgaggacaccagcaacttctaccaccccaacttccccttcagcggcaagatccgggtgcggggccatgatgacagcttcctgaagaaccacctggtgttcctggtgatctacggcaccaacggcaccttcaaccagaccctggtgacagacaacaacggcctggcccccttcaccctggagaccagcggctggaatggaacagatgtgtccctggagggcaagttccagatggaggacctggtgtacaaccctgagcaggtgccccgctactaccagaatgcctacctgcacctgcggcccttctacagcaccaccaggagcttcctgggcatccaccggctgaatggccccctgaagtgtggccagccccaggaggtgctggtggactactacatcgaccctgcagatgccagcccagaccaggagatctccttctcctactacctgattggcaagggcagcctggtgatggagggccagaagcacctgaacagcaagaagaagggcctgaaggccagcttcagcctgagcctgaccttcaccagccggctggccccagaccccagcctggtgatctatgccatcttccccagcggcggcgtggtggccgacaagatccagttctctgtggagatgtgctttgacaaccaggtgtccctgggcttcagccccagccagcagctgcctggagctgaggtggagctgcagctgcaggccgcccctggcagcctgtgtgccctgcgggctgtggatgaatctgtgctgctgctgcggccagaccgggagctgagcaacagatctgtgtatggcatgttccccttctggtacggccactacccctaccaggtggccgagtatgaccagtgccctgtgtctggcccctgggacttcccccagcccctgattgaccccatgccccagggccacagcagccagaggagcatcatctggaggcccagcttcagcgagggcacagacctcttctccttcttcagagatgtgggcctgaagatcctgagcaatgccaagatcaagaagcctgtggactgcagccacaggagccctgagtacagcacagccatgggcgccggcggcggccaccctgaggcctttgagagcagcacccccctgcaccaggccgaggacagccaggtgcggcagtacttccctgagacctggctgtgggacctcttccccatcggcaacagcggcaaggaggccgtgcacgtgacagtgcctgatgccatcacagagtggaaggccatgtccttctgcaccagccagagccggggcttcggcctgagccccaccgtgggcctgacagccttcaagcccttctttgtggacctgaccctgccctacagcgtggtgcggggggagagcttccggctgacagccaccatcttcaactacctgaaggactgcatccgggtgcagacagacctggccaagagccatgagtaccagctggagagctgggccgacagccagaccagcagctgcctgtgtgctgatgatgccaagacccaccactggaacatcacagctgtgaagctgggccacatcaacttcaccatcagcaccaagatcctggacagcaatgagccctgtggcggccagaagggctttgtgccccagaagggccgcagtgacaccctcatcaagcctgtgctggtgaagccagagggcgtgctggtggagaagacccacagcagcctgctgtgccccaagggcaaggtggccagcgagagcgtgtccctggagctgcctgtggacatcgtgcctgacagcaccaaggcctacgtgacagtgctgggggacatcatgggcacagccctgcagaacctggatggcctggtgcagatgcccagcggctgtggggagcagaacatggtgctgtttgcccccatcatctacgtgctgcagtacctggagaaggccggcctgctgacagaggagatccgcagcagagctgtgggcttcctggagatcggctaccagaaggagctgatgtacaagcacagcaatggcagctacagcgccttcggggagagagatggaaatggaaacacctggctgacagcctttgtgaccaagtgcttcggccaggcccagaagttcatcttcatcgaccccaagaacatccaggatgccctgaagtggatggccggcaaccagctgcccagcggctgctacgccaacgtgggcaacctgctgcacacagccatgaagggcggcgtggatgatgaggtgtccctgacagcctacgtgacagctgccctgctggagatgggcaaggatgtggatgaccccatggtgtcccagggcctgcgctgcctgaagaacagcgccaccagcaccaccaacctgtacacccaggccctgctggcctacatcttcagcctggccggggagatggacatccggaacatcctgctgaagcagctggaccagcaggccatcatctctggagagagcatctactggagccagaagcccacccccagcagcaatgccagcccctggagcgagcctgctgctgtggatgtggagctgacagcctatgccctgctggcccagctgaccaagcccagcctgacccagaaggagatcgccaaggccaccagcatcgtggcctggctggccaagcagcacaatgcctacggcggcttcagcagcacccaggacacagtggtggccctgcaggccctggccaagtatgccaccacagcctacatgcccagcgaggagatcaacctggtggtgaagagcacagagaacttccagaggaccttcaacatccagagcgtgaaccggctggtgttccagcaggacaccctgcccaacgtgcccggcatgtacaccctggaggccagcggccagggctgtgtgtatgtgcagacagtgctgcgctacaacatcctgccccccaccaacatgaagaccttcagcctgtctgtggagatcggcaaggcccgctgtgagcagcccaccagccccaggagcctgaccctgaccatccacaccagctatgtgggcagccgcagcagcagcaacatggccatcgtggaggtgaagatgctgagcggcttcagccccatggagggcaccaaccagctgctgctgcagcagcccctggtgaagaaggtggagtttggaacagacaccctgaacatctacctggatgagctgatcaagaacacccagacctacaccttcaccatcagccagagcgtgctggtgaccaacctgaagccagccaccatcaaggtgtatgactactacctgcctgatgagcaggccaccatccagtacagcgacccctgtgagtag

SEQ ID NO: 143351 - DNA, 3015 bp, synthetic construct
  misc_feature 1..3015: note = Description of Artificial Sequence: Synthetic coding sequence
  source 1..3015: mol_type = other DNA
tccttcctgggcatccaccggctgaatggccccctgaagtgtggccagccccaggaggtgctggtggactactacatcgaccctgcagatgccagcccagaccaggagatctccttctcctactacctgattggcaagggcagcctggtgatggagggccagaagcacctgaacagcaagaagaagggcctgaaggccagcttcagcctgagcctgaccttcaccagccggctggccccagaccccagcctggtgatctatgccatcttccccagcggcggcgtggtggccgacaagatccagttctctgtggagatgtgctttgacaaccaggtgtccctgggcttcagccccagccagcagctgcctggagctgaggtggagctgcagctgcaggccgcccctggcagcctgtgtgccctgcgggctgtggatgaatctgtgctgctgctgcggccagaccgggagctgagcaacagatctgtgtatggcatgttccccttctggtacggccactacccctaccaggtggccgagtatgaccagtgccctgtgtctggcccctgggacttcccccagcccctgattgaccccatgccccagggccacagcagccagaggagcatcatctggaggcccagcttcagcgagggcacagacctcttctccttcttcagagatgtgggcctgaagatcctgagcaatgccaagatcaagaagcctgtggactgcagccacaggagccctgagtacagcacagccatgggcgccggcggcggccaccctgaggcctttgagagcagcacccccctgcaccaggccgaggacagccaggtgcggcagtacttccctgagacctggctgtgggacctcttccccatcggcaacagcggcaaggaggccgtgcacgtgacagtgcctgatgccatcacagagtggaaggccatgtccttctgcaccagccagagccggggcttcggcctgagccccaccgtgggcctgacagccttcaagcccttctttgtggacctgaccctgccctacagcgtggtgcggggggagagcttccggctgacagccaccatcttcaactacctgaaggactgcatccgggtgcagacagacctggccaagagccatgagtaccagctggagagctgggccgacagccagaccagcagctgcctgtgtgctgatgatgccaagacccaccactggaacatcacagctgtgaagctgggccacatcaacttcaccatcagcaccaagatcctggacagcaatgagccctgtggcggccagaagggctttgtgccccagaagggccgcagtgacaccctcatcaagcctgtgctggtgaagccagagggcgtgctggtggagaagacccacagcagcctgctgtgccccaagggcaaggtggccagcgagagcgtgtccctggagctgcctgtggacatcgtgcctgacagcaccaaggcctacgtgacagtgctgggggacatcatgggcacagccctgcagaacctggatggcctggtgcagatgcccagcggctgtggggagcagaacatggtgctgtttgcccccatcatctacgtgctgcagtacctggagaaggccggcctgctgacagaggagatccgcagcagagctgtgggcttcctggagatcggctaccagaaggagctgatgtacaagcacagcaatggcagctacagcgccttcggggagagagatggaaatggaaacacctggctgacagcctttgtgaccaagtgcttcggccaggcccagaagttcatcttcatcgaccccaagaacatccaggatgccctgaagtggatggccggcaaccagctgcccagcggctgctacgccaacgtgggcaacctgctgcacacagccatgaagggcggcgtggatgatgaggtgtccctgacagcctacgtgacagctgccctgctggagatgggcaaggatgtggatgaccccatggtgtcccagggcctgcgctgcctgaagaacagcgccaccagcaccaccaacctgtacacccaggccctgctggcctacatcttcagcctggccggggagatggacatccggaacatcctgctgaagcagctggaccagcaggccatcatctctggagagagcatctactggagccagaagcccacccccagcagcaatgccagcccctggagcgagcctgctgctgtggatgtggagctgacagcctatgccctgctggcccagctgaccaagcccagcctgacccagaaggagatcgccaaggccaccagcatcgtggcctggctggccaagcagcacaatgcctacggcggcttcagcagcacccaggacacagtggtggccctgcaggccctggccaagtatgccaccacagcctacatgcccagcgaggagatcaacctggtggtgaagagcacagagaacttccagaggaccttcaacatccagagcgtgaaccggctggtgttccagcaggacaccctgcccaacgtgcccggcatgtacaccctggaggccagcggccagggctgtgtgtatgtgcagacagtgctgcgctacaacatcctgccccccaccaacatgaagaccttcagcctgtctgtggagatcggcaaggcccgctgtgagcagcccaccagccccaggagcctgaccctgaccatccacaccagctatgtgggcagccgcagcagcagcaacatggccatcgtggaggtgaagatgctgagcggcttcagccccatggagggcaccaaccagctgctgctgcagcagcccctggtgaagaaggtggagtttggaacagacaccctgaacatctacctggatgagctgatcaagaacacccagacctacaccttcaccatcagccagagcgtgctggtgaccaacctgaagccagccaccatcaaggtgtatgactactacctgcctgatgagcaggccaccatccagtacagcgacccctgtgagtag

SEQ ID NO: 143352 - DNA, 1830 bp, synthetic construct
  misc_feature 1..1830: note = Description of Artificial Sequence: Synthetic coding sequence
  source 1..1830: mol_type = other DNA
atgaagtgggtggagagcatcttcctgatcttcctgctgaacttcacagagagcaggaccctgcacagaaatgaatatggcatcgccagcatcctggacagctaccagtgcacagctgagatcagcctggccgacctggccaccatcttctttgcccagtttgtgcaggaggccacctacaaggaggtgtccaagatggtgaaggatgccctgacagccatcgagaagcccactggagatgagcagagcagcggctgcctggagaaccagctgcctgccttcctggaggagctgtgccacgagaaggagatcctggagaagtatggccacagcgactgctgcagccagagcgaggagggccgccacaactgcttcctggcccacaagaagcccaccccagccagcatccccctcttccaggtgcctgagcctgtgaccagctgtgaggcctatgaagaagatcgggagaccttcatgaacaagttcatctatgagatcgcccggcggcaccccttcctgtatgcccccaccatcctgctgtgggccgcccgctatgacaagatcatccccagctgctgcaaggccgagaatgctgtggagtgcttccagaccaaggccgccaccgtgaccaaggagctgcgggagagcagcctgctgaaccagcacgcctgtgctgtgatgaagaactttggcaccaggaccttccaggccatcaccgtgaccaagctgagccagaagttcaccaaggtgaacttcacagagatccagaagctggtgctggatgtggcccacgtgcatgagcactgctgcagaggagatgtgctggactgcctgcaggatggagagaagatcatgagctacatctgcagccagcaggacaccctgagcaacaagatcacagagtgctgcaagctgaccaccctggagcggggccagtgcatcatccatgctgaaaatgatgagaagccagagggcctgagccccaacctgaaccgcttcctgggggaccgggacttcaaccagttcagcagcggggagaagaacatcttcctggccagctttgtgcatgagtacagccgccgccacccccagctggccgtgtctgtcatcctgcgggtggccaagggctaccaggagctgctggagaagtgcttccagacagagaaccccctggagtgccaggacaagggggaggaggagctgcagaagtacatccaggagagccaggccctggccaagaggagctgtggcctcttccagaagctgggggagtactacctgcagaatgccttcctggtggcctacaccaagaaggccccccagctgaccagcagcgagctgatggccatcaccaggaagatggccgccacagctgccacctgctgccagctgtctgaggacaagctgctggcctgtggggagggcgctgctgacatcatcatcggccacctgtgcatcagacatgagatgacccctgtgaaccctggggtgggccagtgctgcaccagcagctatgccaacagaagaccctgcttcagcagcctggtggtggatgagacctacgtgcccccagccttcagtgatgacaagttcatcttccacaaggacctgtgccaggcccagggcgtggccctgcagaccatgaagcaggagttcctgatcaacctggtgaagcagaagccccagatcacagaggagcagctggaggccgtgattgctgacttcagcggcctgctggagaagtgctgccagggccaggagcaggaggtgtgctttgctgaggagggccagaagctgatcagcaagaccagggctgccctgggcgtgtag

SEQ ID NO: 143353 - DNA, 3735 bp, synthetic construct
  misc_feature 1..3735: note = Description of Artificial Sequence: Synthetic coding sequence
  source 1..3735: mol_type = other DNA
atgaacaaccagaaggtggtggccgtgctgctgcaggagtgcaagcaggtgctggaccagctgctgctggaggccccagatgtgtctgaggaggacaagtctgaggaccagcgctgccgggccctgctgcccagcgagctgcggaccctcatccaggaggccaaggagatgaagtggccctttgtgcctgagaagtggcagtacaagcaggccgtgggccctgaggacaagaccaacctgaaggatgtgattggagctggcctgcagcagctgctggccagcctgcgggccagcatcctggcccgggactgtgccgctgctgctgccatcgtgttcctggtggaccgcttcctgtatggcctggatgtgtctgggaagctgctgcaggtggccaagggcctgcacaagctgcagcctgccacccccatcgccccccaggtggtgatccggcaggcccgcatctctgtgaacagcggcaagctgctgaaggccgagtacatcctgagcagcctcatcagcaacaatggagccaccggcacctggctgtacagaaatgaaagtgacaaggtgctggtgcagagcgtgtgcatccagatccggggccagatcctgcagaagctgggcatgtggtatgaagctgctgagctgatctgggccagcatcgtgggctacctggccctgccccagcctgacaagaagggcctgagcaccagcctgggcatcctggccgacatctttgtgtccatgagcaagaatgactatgagaagttcaagaacaacccccagatcaacctgagcctgctgaaggagtttgaccaccacctgctgtctgctgctgaggcctgcaagctggccgccgccttcagcgcctacacccccctgtttgtgctgacagctgtgaacatccggggcacctgcctgctgagctacagcagcagcaatgactgccccccagagctgaagaacctgcacctgtgtgaggccaaggaggcctttgagatcggcctgctgaccaagagagatgatgagcctgtgacaggcaagcaggagctgcacagctttgtgaaggccgccttcggcctgaccaccgtgcaccggcggctgcatggagagaccggcaccgtgcatgctgccagccagctgtgcaaggaggccatgggcaagctgtacaacttcagcaccagcagccgcagccaggaccgggaggccctgagccaggaggtgatgtctgtcatcgcccaggtgaaggagcacctgcaggtgcagagcttcagcaatgtggatgacaggagctatgtgcctgagagctttgagtgccgcctggacaagctgatcctgcacggccagggcgacttccagaagatcctggacacctacagccagcaccacacctctgtgtgtgaggtgtttgaaagtgactgtggcaacaacaagaatgagcagaaggatgccaagacaggagtgtgcatcacagccctgaagacagagatcaagaacatcgacacagtgtccaccacccaggagaagccccactgccagagggacaccggcatcagcagcagcctgatgggcaagaatgtgcagcgggagctgcggcggggcggcagaagaaactggacccacagtgatgccttccgggtgtccctggaccaggatgtggagacagaaacagagcccagcgactacagcaatggagagggcgctgtgttcaacaagagcctgagcggcagccagaccagcagcgcctggagcaacctgagcggcttcagcagcagcgcctcctgggaggaggtgaactaccacgtggatgacagaagtgccaggaaggagcccgggaaggagcacctggtggacacccagtgcagcacagccctgtctgaggagctggagaatgaccgggagggccgggccatgcacagcctgcacagccagctgcatgacctgagcctgcaggagcccaacaatgacaacctggagcccagccagaaccagccccagcagcagatgcccctgacccccttcagcccccacaacaccccaggcatcttcctggcccctggggccggcctgctggagggcgcccctgagggcatccaggaggtgaggaacatgggccccaggaacaccagcgcccacagccggcccagctacagaagtgcctcctggagcagtgacagcggccggcccaagaacatgggcacccaccccagcgtgcagaaggaggaggcctttgagatcatcgtggagttccctgagaccaactgtgatgtgaaggaccggcagggcaaggagcagggcgaggagatcagcgagcggggggccggccccaccttcaaggccagccccagctgggtggaccctgagggggagacagctgagagcacagaagatgcccccctggacttccaccgggtgctgcacaacagcctgggcaacatctccatgctgccctgcagcagcttcacccccaactggcctgtgcagaacccagacagcaggaagagcggcggccctgtggccgagcagggcatcgaccctgatgccagcacagtggatgaggagggccagctgctggacagcatggatgtgccctgcaccaatggacatggcagccaccggctgtgcatcctgcggcagcccccaggccagagagctgagacccccaacagctctgtgtctggcaacatcctcttccctgtgctgtctgaggactgcaccaccacagaggagggcaaccagcccggcaacatgctgaactgcagccagaacagcagcagcagctctgtgtggtggctgaagagccctgccttcagcagcggcagcagcgagggggacagcccctggagctacctgaacagcagcggcagctcctgggtgtccctgcccgggaagatgaggaaggagatcctggaggcccggaccctgcagccagatgactttgagaagctgctggccggcgtgagacatgactggctgttccagaggctggagaacacaggagtcttcaagcccagccagctgcaccgggcccacagcgccctgctgctgaagtacagcaagaagtctgagctgtggacagcccaggagaccatcgtgtacctgggggactacctgactgtgaagaagaagggccggcagagaaatgccttctgggtgcaccacctgcaccaggaggagatcctgggccgctacgtgggcaaggactacaaggagcagaagggcctgtggcaccacttcacagatgtggagcggcagatgacagcccagcactacgtgacagagttcaacaagaggctgtatgagcagaacatccccacccagatcttctacatccccagcaccatcctgctgatcctggaggacaagaccatcaagggctgcatctctgtggagccctacatcctgggggagtttgtgaagctgagcaacaacaccaaggtggtgaagacagagtacaaggccacagaatatggcctggcctacggccacttctcctatgagttcagcaaccacagagatgtggtggtggacctgcagggctgggtgactggaaatggcaagggcctcatctacctgacagacccccagatccacagcgtggaccagaaggtgttcaccaccaactttgggaagaggggcatcttctacttcttcaacaaccagcacgtggagtgcaatgagatctgccaccggctgagcctgacccggcccagcatggagaagccctgcacctag

SEQ ID NO: 143354 - DNA, 429 bp, synthetic construct
  misc_feature 1..429: note = Description of Artificial Sequence: Synthetic coding sequence
  source 1..429: mol_type = other DNA
atgaacaaccagaaggtggtggccgtgctgctgcaggagtgcaaggccctgctgcccagcgagctgcggaccctcatccaggaggccaaggagatgaagtggccctttgtgcctgagaagtggcagtacaagcaggccgtgggccctgaggacaagaccaacctgaaggatgtgattggagctggcctgcagcagctgctggccagcctgcgggccagcatcctggcccgggactgtgccgctgctgctgccatcgtgttcctggtggaccgcttcctgtatggcctggatgtgtctgggaagctgctgcaggtggccaagggcctgcacaagctgcagcctgccacccccatcgccccccaggtggtgatccggcaggcccgcatctctgtgaacagcggcagccacccagccaagcacagcatgtag

SEQ ID NO: 143355 - DNA, 3735 bp, synthetic construct; identical to SEQ ID NO: 143353
  misc_feature 1..3735: note = Description of Artificial Sequence: Synthetic coding sequence
  source 1..3735: mol_type = other DNA

SEQ ID NO: 143356 - DNA, 3501 bp, synthetic construct
  misc_feature 1..3501: note = Description of Artificial Sequence: Synthetic coding sequence
  source 1..3501: mol_type = other DNA
atgtgcaggaagaggacccgggcccggaccagcgctgctgaggccagcctgcgggccagcatcctggcccgggactgtgccgctgctgctgccatcgtgttcctggtggaccgcttcctgtatggcctggatgtgtctgggaagctgctgcaggtggccaagggcctgcacaagctgcagcctgccacccccatcgccccccaggtggtgatccggcaggcccgcatctctgtgaacagcggcaagctgctgaaggccgagtacatcctgagcagcctcatcagcaacaatggagccaccggcacctggctgtacagaaatgaaagtgacaaggtgctggtgcagagcgtgtgcatccagatccggggccagatcctgcagaagctgggcatgtggtatgaagctgctgagctgatctgggccagcatcgtgggctacctggccctgccccagcctgacaagaagggcctgagcaccagcctgggcatcctggccgacatctttgtgtccatgagcaagaatgactatgagaagttcaagaacaacccccagatcaacctgagcctgctgaaggagtttgaccaccacctgctgtctgctgctgaggcctgcaagctggccgccgccttcagcgcctacacccccctgtttgtgctgacagctgtgaacatccggggcacctgcctgctgagctacagcagcagcaatgactgccccccagagctgaagaacctgcacctgtgtgaggccaaggaggcctttgagatcggcctgctgaccaagagagatgatgagcctgtgacaggcaagcaggagctgcacagctttgtgaaggccgccttcggcctgaccaccgtgcaccggcggctgcatggagagaccggcaccgtgcatgctgccagccagctgtgcaaggaggccatgggcaagctgtacaacttcagcaccagcagccgcagccaggaccgggaggccctgagccaggaggtgatgtctgtcatcgcccaggtgaaggagcacctgcaggtgcagagcttcagcaatgtggatgacaggagctatgtgcctgagagctttgagtgccgcctggacaagctgatcctgcacggccagggcgacttccagaagatcctggacacctacagccagcaccacacctctgtgtgtgaggtgtttgaaagtgactgtggcaacaacaagaatgagcagaaggatgccaagacaggagtgtgcatcacagccctgaagacagagatcaagaacatcgacacagtgtccaccacccaggagaagccccactgccagagggacaccggcatcagcagcagcctgatgggcaagaatgtgcagcgggagctgcggcggggcggcagaagaaactggacccacagtgatgccttccgggtgtccctggaccaggatgtggagacagaaacagagcccagcgactacagcaatggagagggcgctgtgttcaacaagagcctgagcggcagccagaccagcagcgcctggagcaacctgagcggcttcagcagcagcgcctcctgggaggaggtgaactaccacgtggatgacagaagtgccaggaaggagcccgggaaggagcacctggtggacacccagtgcagcacagccctgtctgaggagctggagaatgaccgggagggccgggccatgcacagcctgcacagccagctgcatgacctgagcctgcaggagcccaacaatgacaacctggagcccagccagaaccagccccagcagcagatgcccctgacccccttcagcccccacaacaccccaggcatcttcctggcccctggggccggcctgctggagggcgcccctgagggcatccaggaggtgaggaacatgggccccaggaacaccagcgcccacagccggcccagctacagaagtgcctcctggagcagtgacagcggccggcccaagaacatgggcacccaccccagcgtgcagaaggaggaggcctttgagatcatcgtggagttccctgagaccaactgtgatgtgaaggaccggcagggcaaggagcagggcgaggagatcagcgagcggggggccggccccaccttcaaggccagccccagctgggtggaccctgagggggagacagctgagagcacagaagatgcccccctggacttccaccgggtgctgcacaacagcctgggcaacatctccatgctgccctgcagcagcttcacccccaactggcctgtgcagaacccagacagcaggaagagcggcggccctgtggccgagcagggcatcgaccctgatgccagcacagtggatgaggagggccagctgctggacagcatggatgtgccctgcaccaatggacatggcagccaccggctgtgcatcctgcggcagcccccaggccagagagctgagacccccaacagctctgtgtctggcaacatcctcttccctgtgctgtctgaggactgcaccaccacagaggagggcaaccagcccggcaacatgctgaactgcagccagaacagcagcagcagctctgtgtggtggctgaagagccctgccttcagcagcggcagcagcgagggggacagcccctggagctacctgaacagcagcggcagctcctgggtgtccctgcccgggaagatgaggaaggagatcctggaggcccggaccctgcagccagatgactttgagaagctgctggccggcgtgagacatgactggctgttccagaggctggagaacacaggagtcttcaagcccagccagctgcaccgggcccacagcgccctgctgctgaagtacagcaagaagtctgagctgtggacagcccaggagaccatcgtgtacctgggggactacctgactgtgaagaagaagggccggcagagaaatgccttctgggtgcaccacctgcaccaggaggagatcctgggccgctacgtgggcaaggactacaaggagcagaagggcctgtggcaccacttcacagatgtggagcggcagatgacagcccagcactacgtgacagagttcaacaagaggctgtatgagcagaacatccccacccagatcttctacatccccagcaccatcctgctgatcctggaggacaagaccatcaagggctgcatctctgtggagccctacatcctgggggagtttgtgaagctgagcaacaacaccaaggtggtgaagacagagtacaaggccacagaatatggcctggcctacggccacttctcctatgagttcagcaaccacagagatgtggtggtggacctgcagggctgggtgactggaaatggcaagggcctcatctacctgacagacccccagatccacagcgtggaccagaaggtgttcaccaccaactttgggaagaggggcatcttctacttcttcaacaaccagcacgtggagtgcaatgagatctgccaccggctgagcctgacccggcccagcatggagaagccctgcacctag

SEQ ID NO: 143357 - DNA, 1149 bp, synthetic construct
  misc_feature 1..1149: note = Description of Artificial Sequence: Synthetic coding sequence
  source 1..1149: mol_type = other DNA
atggccctgcagggcatctctgtggtggagctgagcggcctggcccctggccccttctgtgccatggtgctggccgactttggagcccgggtggtgcgggtggacaggcctggcagccgctatgatgtgtcccggctgggccggggcaagaggagcctggtgctggacctgaagcagcccagaggagctgctgtgctgcggcggctgtgcaagagaagtgatgtgctgctggagcccttcagaagaggagtgatggagaagctgcagctgggccctgagatcctgcagcgggagaaccccaggctcatctatgcccggctgagcggcttcggccagagcggcagcttctgccgcctggccggccatgacatcaactacctggccctgagcggcgtgctgagcaagattggccgctctggagagaacccctatgcccccctgaacctgctggccgactttgctgggggcggcctgatgtgtgccctgggcatcatcatggccctgtttgacaggaccaggacaggcaagggccaggtgattgatgccaacatggtggagggcacagcctacctgagcagcttcctgtggaagacccagaagctgagcctgtgggaggccccccggggccagaacatgctggatggaggagcccccttctacaccacctacagaacagcagatggagagttcatggctgtgggcgccatcgagccccagttctatgagctgctgatcaagggcctgggcctgaagagtgatgagctgcccaaccagatgtccatggatgactggccagagatgaagaagaagtttgctgatgtgtttgctgagaagaccaaggccgagtggtgccagatctttgatggaacagatgcctgtgtgacccctgtgctgacctttgaggaggtggtgcaccacgaccacaacaaggagcggggcagcttcatcaccagcgaggagcaggatgtgagccccaggcctgcccccctgctgctgaacaccccagccatccccagcttcaagagggaccccttcatcggggagcacacagaggagatcctggaggagtttggcttcagccgggaggagatctaccagctgaacagcgacaagatcatcgagagcaacaaggtgaaggccagcctgtag

SEQ ID NO: 143358 - DNA, 597 bp, synthetic construct
  misc_feature 1..597: note = Description of Artificial Sequence: Synthetic coding sequence
  source 1..597: mol_type = other DNA
atggccctgcagggcatctctgtggtggagctgagcggcctggcccctggccccttctgtgccatggtgctggccgactttggagcccgggtggtgcgggtggacaggcctggcagccgctatgatgtgtcccggctgggccggggcaagaggagcctggtgctggacctgaagcagcccagaggagctgctgtgctgcggcggctgtgcaagagaagtgatgtgctgctggagcccttcagaagaggagtgatggagaagctgcagctgggccctgagatcctgcagcgggagaaccccaggctcatctatgcccggctgagcggcttcggccagagcggcagcttctgccgcctggccggccatgacatcaactacctggccctgagcggcggcagaaattccatcttcaagttcttctctgtggagaacagcgagattgaatctgtgggcagcaccagcaggacagagcacgtgggctggtggagcaccttcctgtatgacctgcaggacagccgctggggcatccacggctgctggagcaacagaacacctgtgctgcgggctgctgaccagaggacctggaccaaggtgtag

SEQ ID NO: 143359 - DNA, 690 bp, synthetic construct
  misc_feature 1..690: note = Description of Artificial Sequence: Synthetic coding sequence
  source 1..690: mol_type = other DNA
atggccctgcagggcatctctgtggtggagctgagcggcctggcccctggccccttctgtgccatggtgctggccgactttggagcccgggtggtgcgggtggacaggcctggcagccgctatgatgtgtcccggctgggccggggcaagaggagcctggtgctggacctgaagcagcccagaggagctgctgtgctgcggcggctgtgcaagagaagtgatgtgctgctggagcccttcagaagaggagtgatggagaagctgcagctgggccctgagatcctgcagcgggagaaccccaggctcatctatgcccggctgagcggcttcggccagagcggcagcttctgccgcctggccggccatgacatcaactacctggccctgagcggcggcagaaattccatcttcaagttcttctctgtggagaacagcgagattgaatctgtgggcagcaccagcaggacagagcacgtgggctggtggagcaccttcctgtatgacctgcaggacagccgctggggcatccacggctgctggagcaacagaacacctgtgctgcgggctgctgaccagaggagcctcatcccctacttcaacctgtacctgcagttcctgaacatctccatgcagaacctcttcaaggtgcacaccctgctgcggccctgctacttcctgggccagaagtag

SEQ ID NO: 143360 - DNA, 1185 bp, synthetic construct
  misc_feature 1..1185: note = Description of Artificial Sequence: Synthetic coding sequence
  source 1..1185: mol_type = other DNA
atggccctgcagggcatctctgtggtggagctgagcggcctggcccctggccccttctgtgccatggtgctggccgactttggagcccgggtggtgcgggtggacaggcctggcagccgctatgatgtgtcccggctgggccggggcaagaggagcctggtgctggacctgaagcagcccagaggagctgctgtgctgcggcggctgtgcaagagaagtgatgtgctgctggagcccttcagaagaggagtgatggagaagctgcagctgggccctgagatcctgcagcgggagaaccccaggctcatctatgcccggctgagcggcttcggccagagcggcagcttctgccgcctggccggccatgacatcaactacctggccctgagcggcgtgctgagcaagattggccgctctggagagaacccctatgcccccctgaacctgctggccgactttgctgggggcggcctgatgtgtgccctgggcatcatcatggccctgtttgacaggaccaggacaggcaagggccaggtgattgatgccaacatggtggagggcacagcctacctgagcagcttcctgtggaagacccagaagctgagcctgtgggaggccccccggggccagaacatgctggatggaggagcccccttctacaccacctacagaacagcagatggagagttcatggctgtgggcgccatcgagccccagttctatgagctgctgatcaagggcctgggcctgaagagtgatgagctgcccaaccagatgtccatggatgactggccagagatgaagaagaagtttgctgatgtgtttgctgagaagaccaaggccgagtggtgccagatctttgatggaacagatgcctgtgtgacccctgtgctgacctttgaggaggtggtgcaccacgaccacaacaaggagcggggcagcttcatcaccagcgaggagcaggatgtgagccccaggcctgcccccctgctgctgaacaccccagccatccccagcttcaagagggaccccttcatcggggagcacacagaggagatcctggaggagtttggcttcagccgggaggagatctaccagctgaacagcgacaagatcatcgagagcaacaaggccggcagcaagttctggatcctgtaccccacccacagcaacatccagaagtag

SEQ ID NO: 143361 - DNA, 1002 bp, synthetic construct
  misc_feature 1..1002: note = Description of Artificial Sequence: Synthetic coding sequence
  source 1..1002: mol_type = other DNA
atggctgctggctgctgcggcgtgaagaagcagaagctgagcagcagccccccatctggcagcggcggcggcggcggggccagcagcagcagccactgcagcggggagagccagtgcagagctggggagctgggcctgggcggggccggcacccggctgaatggcctgggcggcctgaccggcggcggcagcggcagcggctgcaccctgagccccccccagggctgcggcggcggcggcggcggcatcgccctgagccccccacccagctgtggggtgggcaccctgctgagcaccccagctgctgccaccagcagcagccccagcagcagcagcgctgccagcagcagcagccctggcagcaggaagatggtggtgtctgctgagatgtgctgcttctgctttgatgtgctgtactgccacctgtatggctaccagcagcccaggaccccccgcttcaccaatgagccctaccccctgtttgtgacctggaagattggccgggacaagaggctgcggggctgcatcggcaccttcagcgccatgaacctgcacagcggcctgcgggagtacaccctgaccagcgccctgaaggacagccgcttcccccccatgaccagagatgagctgcccaggctcttctgcagcgtgtccctgctgaccaactttgaagatgtgtgtgactacctggactgggaggtgggcgtgcacggcatcagaattgagttcatcaatgagaagggcagcaagaggacagccacctacctgcctgaggtggccaaggagcagggctgggaccacatccagaccatcgacagcctgctgaggaaaggaggctacaaggcccccatcaccaatgagttcaggaagaccatcaagctgacccgctacagaagtgagaagatgaccctgtcctatgcagagtacctggcccaccggcagcaccaccacttccagaatggcatcggccaccccctgcccccctacaaccactacagctag

SEQ ID NO: 143362 - DNA, 633 bp, synthetic construct
  misc_feature 1..633: note = Description of Artificial Sequence: Synthetic coding sequence
  source 1..633: mol_type = other DNA
atggtggtgtctgctgagatgtgctgcttctgctttgatgtgctgtactgccacctgtatggctaccagcagcccaggaccccccgcttcaccaatgagccctaccccctgtttgtgacctggaagattggccgggacaagaggctgcggggctgcatcggcaccttcagcgccatgaacctgcacagcggcctgcgggagtacaccctgaccagcgccctgaaggacagccgcttcccccccatgaccagagatgagctgcccaggctcttctgcagcgtgtccctgctgaccaactttgaagatgtgtgtgactacctggactgggaggtgggcgtgcacggcatccgcatcgagttcatcaatgagaagggcagcaagaggacagccacctacctgcctgaggtggccaaggagcagggctgggaccacatccagaccatcgacagcctgctgaggaagggcggctacaaggcccccatcaccaatgagttcaggaagaccatcaagctgacccgctacagaagtgagaagatgaccctgtcctatgcagagtacctggcccaccggcagcaccaccacttccagaatggaattggccaccccctgcccccctacaaccactacagctag

SEQ ID NO: 143363 - DNA, 891 bp, synthetic construct
  misc_feature 1..891: note = Description of Artificial Sequence: Synthetic coding sequence
  source 1..891: mol_type = other DNA
atggctgctggctgctgcggcgtgaagaagcagaagctgagcagcagccccccatctggcagcggcggcggcggcggggccagcagcagcagccactgcagcggggagagccagtgcagagctggggagctgggcctgggcggggccggcacccggctgaatggcctgggcggcctgaccggcggcggcagcggcagcggctgcaccctgagccccccccagggctgcggcggcggcggcggcggcatcgccctgagccccccacccagctgtggggtgggcaccctgctgagcaccccagctgctgccaccagcagcagccccagcagcagcagcgctgccagcagcagcagccctggcagcaggaagatggtggtgtctgctgagatgtgctgcttctgctttgatgtgctgtactgccacctgtatggctaccagcagcccaggaccccccgcttcaccaatgagccctatgccctgaaggacagccgcttcccccccatgaccagagatgagctgcccaggctcttctgcagcgtgtccctgctgaccaactttgaagatgtgtgtgactacctggactgggaggtgggcgtgcacggcatccgcatcgagttcatcaatgagaagggcagcaagaggacagccacctacctgcctgaggtggccaaggagcagggctgggaccacatccagaccatcgacagcctgctgaggaagggcggctacaaggcccccatcaccaatgagttcaggaagaccatcaagctgacccgctacagaagtgagaagatgaccctgtcctatgcagagtacctggcccaccggcagcaccaccacttccagaatggaattggccaccccctgcccccctacaaccactacagctag

SEQ ID NO: 143364 - DNA, 2862 bp, synthetic construct
  misc_feature 1..2862: note = Description of Artificial Sequence: Synthetic coding sequence
  source 1..2862: mol_type = other DNA
atgtgcaaccctgaggaggccgccctgctgcggctggaggaggtgttttctgccaccctggcccacgtgaacagcctggtgctgcagcccctgctgcctgctgccccagaccccagcgacccctggggcagagaatgtctgcggctgctgcagcagctgcacaagagcagccagcagctgtgggaggtgacagaggagagcctgcacagcctgcaggagcggctgcgctacccagacagcacaggcctggagagcctgctgctgctgcggggagctgacagagtgctgcaggcccacatcgagtacatcgagagctacaccagctgcatggtggtgcaggccttccagaaggccgccaagagaagaagtgagtactggaggggccagaggaaggccctgcggcagctgctgagcggcgtgagcagcgagggctctgtgggcgccagcctgggccaggccctgcaccagcccctggcccaccacgtgcagcagtatgtgctgctgctgctgagcctgggggacaccatcggggagcaccaccccacccgggagctggtggtgaatgctgtgaccctgtttggaaacctgcagagcttcatgaagcaggagctggaccaggccgtggccacccaggccctgtggcacaccctgcggggccgcctgagagatgtgctgtgcaccccagcccaccggctgctgcaggacagccaggatgtgcctgtgacagtggcccccctgcgggcagagcgggtgctgctgtttgatgatgccctggtgctgctgcagggccacaacgtgcacacctttgacctgaagctggtgtgggtggaccccggccaggacggctgcaccttccacctgctgaccccagaggaggagttctccttctgtgccaaggacagccagggccaggccgtgtggcagtggaaggtgacctgggccgtgcaccaggccctgcacggcaagaaggacttccctgtgctgggcgccggcctggagcccagccagcccccagactgccgctgtgccgagtacaccttccaggccgagggccgcctgtgccaggccacctatgaaggagagtggtgccggggccggccccacggcaagggcaccctgaagtggccagatggaagaaatcatgtgggcaacttctgccagggcctggagcacggcttcggcatccggctgctgccccaggccagcgaggacaagtttgactgctacaagtgccactggagggagggctccatgtgtggctacggcatctgtgagtacagcacagatgaggtgtacaagggctacttccaggagggcctgcggcacggcttcggcgtgctggagagcggcccccaggccccccagcccttccgctacacaggccactgggagcggggccagaggagcggctatggaattgaagaagatggagacagaggagagcgctacatcggcatgtggcaggccggccagagacatggccctggggtgatggtgacccaggccggcgtgtgctaccagggcaccttccaggccgacaagacagtgggccctggcatcctgctgtctgaagatgacagcctgtatgagggcaccttcacccgggacctgaccctgatgggcaagggcaaggtgaccttccccaacggcttcaccctggagggcagctttggaagtggagctggccggggcctgcacacccagggcgtgctggacacagctgccctgcccccagaccccagcagcacctgcaagaggcagctgggcgtgggcgccttccctgtggagagccgctggcagggcgtgtacagccccttccgggactttgtgtgtgccggctgcccccgggacctgcaggaggccctgctgggctttgatgtgcagagcagccgggagctgcggcgcagccaggactacctgagctgtgagaggacccaccctgaggacagcgtgggctccatggaggacatcctggaggagctgctgcagcaccgggagcccaaggccctgcagctgtacctgaggaaggccctgagcaacagcctgcaccccctgggcaagctgctgcggaccctgatgctgaccttccaggccacctacgccggcgtgggcgccaacaagcacctgcaggagctggcccaggaggaggtgaagcagcacgcccaggagctgtgggccgcctaccggggcctgctgcgggtggccctggagaggaagggccaggccctggaggaggatgaggacacagagacccgggacctgcaggtgcacggcctggtgctgcccctgatgctgcccagcttctacagcgagctgttcaccctgtacctgctgctgcacgagagagaagattccttctacagccagggcatcgccaacctgagcctcttcccagacacccagctgctggagttcctggatgtgcagaagcacctgtggcccctgaaggacctgaccctgaccagcaaccagcgctacagcctggtgcgggacaagtgcttcctgagcgccacagaatgtctgcagaagatcatgaccaccgtggacccccgggagaagctggaggtgctggagaggacctatggagaaattgagggcaccgtgtcccgggtgctgggccgggagtacaagctgcccatggatgacctgctgcccctgctgatctacgtggtgtcccgggcccgcatccagcacctgggcgctgagatccacctgatccgggacatgatggaccccaaccacactggaggcctgtatgacttcctgctgacagccctggagagctgctatgagcacatccagaaggaggacatgaggctgcaccggctgcccggccactggcacagccgggagctgtggtag

SEQ ID NO: 143365 - DNA, 903 bp, synthetic construct
  misc_feature 1..903: note = Description of Artificial Sequence: Synthetic coding sequence
  source 1..903: mol_type = other DNA
atggaggacatcctggaggagctgctgcagcaccgggagcccaaggccctgcagctgtacctgaggaaggccctgagcaacagcctgcaccccctgggcaagctgctgcggaccctgatgctgaccttccaggccacctacgccggcgtgggcgccaacaagcacctgcaggagctggcccaggaggaggtgaagcagcacgcccaggagctgtgggccgcctaccggggcctgctgcgggtggccctggagaggaagggccaggccctggaggaggatgaggacacagagacccgggacctgcaggtgcacggcctggtgctgcccctgatgctgcccagcttctacagcgagctgttcaccctgtacctgctgctgcacgagcgggaggacagcttctacagccagggcatcgccaacctgagcctcttcccagacacccagctgctggagttcctggatgtgcagaagcacctgtggcccctgaaggacctgaccctgaccagcaaccagcgctacagcctggtgcgggacaagtgcttcctgagcgccacagagtgcctgcagaagatcatgaccaccgtggacccccgggagaagctggaggtgctggagaggacctacggggagattgagggcaccgtgtcccgggtgctgggccgggagtacaagctgcccatggatgacctgctgcccctgctgatctacgtggtgtcccgggcccgcatccagcacctgggcgctgagatccacctgatccgggacatgatggaccccaaccacactggaggcctgtatgacttcctgctgacagccctggagagctgctatgagcacatccagaaggaggacatgaggctgcaccggctgcccggccactggcacagccgggagctgtggtag

SEQ ID NO: 143366 - DNA, 2862 bp, synthetic construct; identical to SEQ ID NO: 143364
  misc_feature 1..2862: note = Description of Artificial Sequence: Synthetic coding sequence
  source 1..2862: mol_type = other DNA

SEQ ID NO: 143367 - DNA, 12504 bp, synthetic construct
  misc_feature 1..12504: note = Description of Artificial Sequence: Synthetic coding sequence
  source 1..12504: mol_type = other DNA
atggagcctgaggacctgccctggccaggagagctggaggaggaggaggaggaggaggaggaggaggaggaggaggaggaggaggccgctgctgctgctgctgccaacgtggatgatgtggtggtggtggaggaggtggaggaggaggccggccgggagctggacagcgacagccactacggcccccagcacctggagagcattgatgatgaggaggatgaggaggccaaggcctggctgcaggcccaccctggccgcatcctgccccccctgagccccccccagcaccgctacagcgagggggagaggaccagcctggagaagatcgtgcccctgacctgccacgtgtggcagcagatcgtgtaccagggcaacagcaggacccagatcagtgacaccaacgtggtgtgcctggagaccacagcccagaggggcagcggagatgaccagaagacagagagctggcactgcctgccccaggagatggacagcagccagaccctggacaccagccagacccgcttcaacgtgaggacagaggacacagaggtgacagacttccccagcctggaggagggcatcctgacccagagcgagaaccaggtgaaggagcccaacagagacctcttctgcagccccctgctggtgatccaggacagctttgccagcccagacctgcccctgctgacctgcctgacccaggaccaggagtttgccccagacagcctcttccaccagagcgagctgagctttgcccccctgcggggcatcccagacaagtctgaggacacagagtggagcagccggcccagcgaggtgtctgaggccctcttccaggccacagctgaggtggccagtgacctggccagcagccgcttctctgtgtcccagcaccccctgattggcagcacagctgtgggcagccagtgccccttcctgcccagcgagcagggcaacaatgaggagaccatcagctctgtggatgagctgaagatccccaaggactgtgacagatatgatgacctgtgcagctacatgtcctggaagaccaggaaggacacccagtggccagagaacaacctggccgacaaggaccaggtgtctgtggccaccagctttgacatcacagatgagaacatcgccaccaagagaagtgaccactttgatgctgcccggagctatggccagtactggacccaggaggacagcagcaagcaggccgagacctacctgaccaagggcctgcagggcaaggtggagagtgatgtgatcaccctggatggcctgaatgaaaatgctgtggtgtgcagcgagcgggtggccgagctgcagaggaagcccacccgggagagcgagtaccacagcagtgacctgaggatgctgaggatgagcccagacacagtgcccaaggcccccaagcacctgaaggccggggacaccagcaagggcggcatcgccaaggtgacccagagcaacctgaagagcggcatcaccaccacccctgtggacagcgacatcggcagccacctgagcctgagcctggaggacctgagccagctggccgtgagcagcctggagaccaccaccggccagcacacagacaccctgaaccagaagaccctggccgacacccacctgacagaggagaccctgaaggtgacagccatccctgagcctgctgaccagaagacagccacccccaccgtgctgagcagcagccacagccaccggggcaagcccagcatcttctaccagcagggcctgcctgacagccacctgacagaggaggccctgaaggtgtctgctgcccctggcctggccgaccagaccaccggcatgagcaccctgaccagcaccagctacagccaccgggagaagccaggcaccttctaccagcaggagctgcctgagagcaacctgacagaggagcccctggaggtgtctgctgcccctggccctgtggagcagaagacaggcatccccaccgtgagcagcaccagccacagccacgtggaggacctgctcttcttctaccggcagaccctgcctgatggccacctgacagaccaggccctgaaggtgtctgctgtgtctggccctgctgaccagaagacaggaacagccaccgtgctgagcaccccccacagccaccgggagaagccaggcatcttctaccagcaggagtttgctgacagccaccagacagaggagaccctgaccaaggtgtctgccaccccaggccctgctgaccagaagacagagatcccagctgtgcagagcagcagctacagccagcgggagaagcccagcatcctgtacccccaggacctggccgacagccacctgcctgaggagggcctgaaggtgtctgctgtggccggccctgctgaccagaagacaggcctgcccaccgtgcccagcagcgcctacagccaccgggagaagctgctggtgttctaccagcaggccctgctggacagccacctgcctgaggaggccctgaaggtgtctgctgtgtctggccctgcagatggcaagacaggcaccccagctgtgaccagcaccagcagcgccagcagcagcctgggggagaagcccagcgccttctaccagcagaccctgcccaacagccacctgacagaggaggccctgaaggtgtccatcgtgcccggccctggggaccagaagacaggcatccccagcgcccccagcagcttctacagccaccgggagaagcccatcatcttcagccagcagaccctgcctgacttcctgtttcctgaggaggccctgaaggtgtctgctgtgtctgtgctggccgcccagaagacaggcacccccaccgtgagcagcaacagccacagccacagcgagaagagctctgtgttctaccagcaggagctgcctgacagcgacctgccccgggagagcctgaagatgtctgccatccctggcctgacagaccagaagacagtgcccacccccaccgtgcccagcggcagcttcagccaccgggagaagcccagcatcttctaccagcaggagtggccagacagctatgccacagagaaggccctgaaggtgtccacaggccctggccctgctgaccagaagacagagatcccagctgtgcagagcagcagctacccccagcgggagaagcccagcgtgctgtacccccaggtgctgagtgacagccacctgcctgaggagagcctgaaggtgtctgccttccctggccctgctgaccagatgacagacaccccagctgtgcccagcaccttctacagccagcgggagaagccaggcatcttctaccagcagaccctgcctgagagccacctgcccaaggaggccctgaagatctctgtggcccctggcctggccgaccagaagacaggcacccccaccgtgaccagcaccagctacagccagcaccgggagaagcccagcatcttccaccagcaggccctgcccggcacccacatccctgaggaggcccagaaggtgtctgctgtgacaggccctggcaaccagaagacctggatcccccgggtgctgagcaccttctacagccagcgggagaagccaggcatcttctaccagcagaccctgcccggcagccacatccctgaggaggcccagaaggtgtcccctgtgctgggccctgctgaccagaagacaggcacccccacccccaccagcgccagctacagccacacagagaagccaggcatcttctaccagcaggtgctgcctgacaaccaccccacagaggaggccctgaagatctctgtggccagcgagcctgtggaccagaccaccggcaccccagctgtgaccagcaccagctacagccagtaccgggagaagcccagcatcttctaccagcagagcctgcccagcagccacctgacagaggaggccaagaatgtgtctgctgtgcccggccctgctgaccagaagacagtcatccccatcctgcccagcaccttctacagccacacagagaagccaggagtcttctaccagcaggtgctgccccacagccaccccacagaggaggccctgaagatctctgtggccagcgagcctgtggaccagaccaccggcacccccaccgtgaccagcaccagctacagccagcacacagagaagcccagcatcttctaccagcagagcctgcccggcagccacctgacagaggaggccaagaatgtgtctgctgtgcccggccctggggacaggaagacaggcatccccaccctgcccagcaccttctacagccacacagagaagccaggcagcttctaccagcaggtgctgccccacagccacctgcctgaggaggccctggaggtgtctgtggcccctggccctgtggaccagaccatcggcacccccaccgtgaccagccccagcagcagctttggagagaagcccatcgtcatctacaagcaggccttccctgagggccacctgcctgaggagagcctgaaggtgtctgtggcccctggccctgtgggccagaccaccggggcccccaccatcaccagccccagctacagccagcaccgggccaagagcggcagcttctaccagctggccctgctgggcagccagatccctgaggaggccctgcgggtgtcctctgcccctggccctgctgaccagaccaccggcatccccaccatcaccagcaccagctacagctttggagagaagcccatcgtgaactacaagcaggccttcccagatggccacctgcctgaggaggccctgaaggtgtccatcgtgtctggccccacagagaagaagacagacatcccagctggccccctgggcagcagcgccctgggggagaagcccatcaccttctaccggcaggccctgctggacagccccctgaacaaggaggtggtgaaggtgtctgctgcccctggccctgctgaccagaagacagagaccctgcctgtgcacagcaccagctacagcaacagaggcaagcctgtgatcttctaccagcagaccctgagtgacagccacctgcctgaggaggccctgaaggtgccccctgtgcccggcccagatgcccagaagacagagaccccatctgtgagcagcagcctgtacagctaccgggagaagcccatcgtgttctaccagcaggccctgcctgacagcgagctgacccaggaggccctgaaggtgtctgctgtgccccagcctgctgaccagaagacaggcctgagcacagtgaccagcagcttctacagccacacagagaagcccaacatctcctaccagcaggagctgcctgacagccacctgacagaggaggccctgaaggtgtccaatgtgcccggccctgctgaccagaagacaggagtgtccacagtgaccagcaccagctacagccaccgggagaagcccatcgtgtcctaccagcgggagctgccccacttcacagaagctggcctgaagatcctgcgggtgcccggccctgctgaccagaagacaggcatcaacatcctgcccagcaacagctacccccagcgggagcacagcgtcatctcctatgagcaggagctgcctgacctgacagaggtgaccctgaaggccatcggcgtgcccggccctgctgaccagaagacaggcatccagatcgccagcagcagcagctacagcaaccgggagaaggccagcatcttccaccagcaggagctgcctgatgtgacagaggaggccctgaatgtgtttgtggtgcccggccagggcgacaggaagacagagatccccaccgtgcccctgagctactacagccggcgggagaagcccagcgtcatcagccagcaggagctgcctgacagccacctgacagaggaggccctgaaggtgtcccctgtgtccatcccagctgagcagaagacaggcatccccatcggcctgagcagcagctacagccacagccacaaggagaagctgaagatcagcacagtgcacatcccagatgaccagaagacagagttccctgctgccaccctgagcagctacagccagatcgagaagcccaagatcagcaccgtcatcggccccaatgaccagaagacccccagccagacagccttccacagcagctacagccagacagtgaagcccaacatcctcttccagcagcagctgcctgaccgggaccagagcaagggcatcctgaagatctctgctgtgcctgagctgacagatgtgaacacaggcaagcctgtgtccctgagcagcagctacttccaccgggagaagagcaacatcttcagcccccaggagctgcccggcagccacgtgacagaagatgtgctgaaggtgtccaccatccctggccctgctggccagaagacagtgctgcccacagccctgcccagcagcttcagccaccgggagaagccagacatcttctaccagaaggacctgcctgacagacacctgacagaagatgccctgaagatcagcagcgccctgggccaggccgaccagatcaccggcctgcagacagtgcccagcggcacctacagccacggggagaaccacaagctggtgtctgagcacgtgcagaggctgattgacaacctgaacagcagtgacagctctgtgagcagcaacaacgtgctgctgaacagccaggctgatgacagagtggtgatcaacaagccagagagcgctggcttcagagatgtgggcagcgaggagatccaggatgctgagaacagcgccaagaccctgaaggagatccgcaccctgctgatggaggccgagaacatggccctgaagcgctgcaacttccctgcccccctggcccgcttccgggacatcagtgacatctccttcatccagagcaagaaggtggtgtgcttcaaggagcccagcagcactggagtgtccaatggagacctgctgcaccggcagcccttcacagaggagagccccagcagccgctgcatccagaaggacatcggcacccagaccaacctgaagtgccggcggggcatcgagaactgggagttcatcagcagcaccaccgtgcgcagccccctgcaggaggccgagagcaaggtgtccatggccctggaggagaccctgcggcagtaccaggccgccaagtctgtgatgaggtctgagcctgagggctgcagcggcaccatcggcaacaagatcatcatccccatgatgaccgtcatcaagagtgacagcagcagtgatgccagtgatggaaatggcagctgctcctgggacagcaacctgcctgagagcctggagagcgtgtctgatgtgctgctgaacttcttcccctacgtgagccccaagaccagcatcacagacagccgggaggaggagggcgtgtctgagagtgaagatggcggcggcagctctgtggacagcctggccgcccacgtgaagaacctgctgcagtgtgagagcagcctgaaccacgccaaggagatcctgagaaatgctgaggaggaggagagccgggtgcgggcccacgcctggaacatgaagttcaacctggcccatgactgtggctacagcatcagcgagctgaatgaagatgacaggaggaaggtggaggagatcaaggccgagctgtttggacatggccgcaccacagacctgagcaagggcctgcagagcccccggggcatgggctgcaagccagaggccgtgtgcagccacatcatcatcgagagccatgagaagggctgcttccgcaccctgaccagcgagcacccccagctggacagacacccctgtgccttccgctctgctggccccagcgagatgacccggggccggcagaaccccagcagctgccgggccaagcacgtgaacctgagcgccagcctggaccagaacaacagccacttcaaggtgtggaacagcctgcagctgaagagccacagccccttccagaacttcatcccagatgagttcaagatcagcaagggcctgaggatgccctttgatgagaagatggacccctggctgtctgagctggtggagcccgcctttgtgccccccaaggaggtggacttccacagcagcagccagatgcccagccctgagcccatgaagaagttcaccaccagcatcaccttcagcagccaccgccacagcaagtgcatcagcaacagctctgtggtgaaggtgggcgtgacagagggcagccagtgcaccggggcctctgtgggcgtcttcaacagccacttcacagaggagcagaaccccccccgggacctgaagcagaagaccagcagccccagcagcttcaagatgcacagcaacagccaggacaaggaggtgaccatcctggccgagggccggcggcagagccagaagctgcctgtggactttgagaggagcttccaggaggagaagcccctggagaggagtgacttcaccggcagccacagcgagcccagcacccgggccaactgcagcaacttcaaggagatccagatcagtgacaaccacaccctcatctccatgggccggcccagcagcaccctgggcgtgaacagaagcagcagccggctgggcgtgaaggagaagaatgtgaccatcaccccagacctgcccagctgcatcttcctggagcagcgggagctgtttgagcagagcaaggcccccagggcagatgaccacgtgaggaagcaccacagccccagcccccagcaccaggactatgtggccccagacctgcccagctgcatcttcctggagcagcgggagctgtttgagcagtgcaaggccccctacgtggaccaccagatgagggagaaccacagccccctgccccagggccaggacagcatcgccagtgacctgcccagccccatcagcctggagcagtgccagagcaaggcccctggggtggatgaccagatgaacaagcaccacttccccctgccccagggccaggactgtgtggtggagaagaacaaccagcacaagcccaagagccacatcagcaacatcaacgtggaggccaagttcaacacagtggtgtcccagagcgcccccaaccactgcaccctggccgccagcgccagcaccccacccagcaacaggaaggccctgagctgtgtgcacatcaccctgtgccccaagaccagcagcaagctggacagcggcaccctggatgagcgcttccacagcctggatgctgccagcaaggccaggatgaacagcgagttcaactttgacctgcacacagtgagcagccgcagcctggagcccaccagcaagctgctgaccagcaagcctgtggcccaggaccaggagagcctgggcttcctgggccccaagagcagcctggacttccaggtggtgcagcccagcctgcctgacagcaacaccatcacccaggacctgaagaccatccccagccagaacagccagatcgtgaccagccggcagatccaggtgaacatcagtgactttgagggccacagcaaccctgagggcacccctgtgtttgctgaccggctgcctgagaagatgaagacccccctgagcgccttcagcgagaagctgagcagtgatgctgtgacccagatcaccacagagagccctgagaagaccctcttcagcagcgagatcttcatcaatgctgaggaccggggccacgagatcatcgagcccggcaaccagaagctgaggaaggcccctgtgaagtttgccagcagcagctctgtgcagcaggtgaccttcagccggggcacagatggccagcccctgctgctgccctacaagcccagcggcagcaccaagatgtactacgtgccccagctgcggcagatcccccccagcccagacagcaagagtgacaccaccgtggagagcagccacagcggcagcaatgatgccatcgccccagacttccctgcccaggtgctgggcaccagagatgatgacctgagcgccaccgtgaacatcaagcacaaggagggcatctacagcaagagggtggtgaccaaggccagcctgcctgtgggggagaagcccctgcagaatgaaaatgctgatgcctctgtgcaggtgctgatcactggagatgagaacctgagtgacaagaagcagcaggagatccacagcaccagggctgtgacagaagctgcccaggccaaggagaaggagagcctgcagaaggacacagctgacagcagcgctgctgctgctgctgagcacagcgcccaggtgggggaccctgagatgaagaacctgcctgacaccaaggccatcacccagaaggaggagatccacaggaagaagacagtgcctgaggaggcctggcccaacaacaaggagagcctgcagatcaacatcgaggagagcgagtgccacagcgagtttgagaacaccaccaggagcgtcttccgcagcgccaagttctacatccaccaccctgtgcacctgcccagcgaccaggacatctgccacgagagcctgggcaagtctgtgttcatgaggcacagctggaaggacttcttccagcaccacccagacaagcaccgggagcacatgtgcctgcccctgccctaccagaacatggacaagaccaagacagactacacccgcatcaagagcctgagcatcaacgtgaacctgggcaacaaggaggtgatggacaccaccaagagccaggtgcgggactaccccaagcacaacggccagatcagtgacccccagagggaccagaaggtgaccccagagcagaccacccagcacacagtgtccctgaatgagctgtggaacaagtaccgggagcggcagaggcagcagaggcagcctgagctgggggacaggaaggagctgagcctggtggaccggctggaccggctggccaagatcctgcagaaccccatcacccacagcctgcaggtgtctgagagcacccatgatgacagcagaggagagaggtctgtgaaggagtggagcggccggcagcagcagaggaacaagctgcagaagaagaagcgcttcaagagcctggagaagagccacaagaacacaggagagctgaagaagagcaaggtgctgagccaccaccgggccggccgcagcaaccagatcaagattgagcagatcaagtttgacaagtacatcctgagcaagcagcccggcttcaactacatcagcaacaccagcagtgactgccggcccagcgaggagagcgagctgctgacagacaccaccaccaacatcctgagcggcaccaccagcacagtggagagtgacatcctgacccagacagaccgggaggtggccctgcacgagaggagcagctctgtgtccaccatcgacacagcccggctcatccaggcctttggacatgagcgggtgtgcctgagcccccggcgcatcaagctgtacagcagcatcaccaaccagcagaggcgctacctggagaagaggagcaagcacagcaagaaggtgctgaacacaggccaccccctggtgaccagcgagcacacccggcggcggcacatccaggtggccaaccacgtgatcagcagtgacagcatcagcagcagcgccagcagcttcctgagcagcaacagcaccttctgcaacaagcagaatgtgcacatgctgaacaagggcatccaggccggcaacctggagatcgtgaatggagccaagaagcacaccagagatgtgggcatcaccttccccacccccagcagcagcgaggccaagctggaggagaacagtgatgtgacctcctggagcgaggagaagcgggaggagaagatgctgttcaccggctacccagaggacaggaagctgaagaagaacaagaagaacagccatgaaggagtgtcctggtttgtgcctgtggagaatgtggagagccgcagcaagaaggaaaatgtgcccaacacctgtggccctggcatctcctggtttgagcccatcaccaagacccggccctggagggagcccctgcgggagcagaactgccagggccagcacctggatggccggggctacctggccggccctggccgggaggccggccgggacctgctgcggccctttgtgcgggccaccctgcaggagagcctgcagttccacaggccagacttcatcagccgctctggagagcgcatcaagaggctgaagctgattgtgcaggagaggaagctgcagagcatgctgcagacagaaagagatgccctcttcaacatcgaccgggagcggcagggccaccagaacaggatgtgccccctgcccaagagggtcttcctggccatccagaagaacaagcccatcagcaagaaggagatgatccagaggagcaagaggatctatgagcagctgcctgaggtgcagaagaagcgggaggaggagaagaggaagtctgagtacaagagctaccgcctgcgggcccagctgtacaagaagagggtgaccaaccagctgctgggcaggaaggtgccctgggactag

SEQ ID NO: 143368 - DNA, 7686 bp, synthetic construct
  misc_feature 1..7686: note = Description of Artificial Sequence: Synthetic coding sequence
  source 1..7686: mol_type = other DNA
atggagcctgaggacctgccctggccaggagagctggaggaggaggaggaggaggaggaggaggaggaggaggaggaggaggaggccgctgctgctgctgctgccaacgtggatgatgtggtggtggtggaggaggtggaggaggaggccggccgggagctggacagcgacagccactacggcccccagcacctggagagcattgatgatgaggaggatgaggaggccaaggcctggctgcaggcccaccctggccgcatcctgccccccctgagccccccccagcaccgctacagcgagggggagaggaccagcctggagaagatcgtgcccctgacctgccacgtgtggcagcagatcgtgtaccagggcaacagcaggacccagatcagtgacaccaacgtggtgtgcctggagaccacagcccagaggggcagcggagatgaccagaagacagagagctggcactgcctgccccaggagatggacagcagccagaccctggacaccagccagacccgcttcaacgtgaggacagaggacacagaggtgacagacttccccagcctggaggagggcatcctgacccagagcgagaaccaggtgaaggagcccaacagagacctcttctgcagccccctgctggtgatccaggacagctttgccagcccagacctgcccctgctgacctgcctgacccaggaccaggagtttgccccagacagcctcttccaccagagcgagctgagctttgcccccctgcggggcatcccagacaagtctgaggacacagagtggagcagccggcccagcgaggtgtctgaggccctcttccaggccacagctgaggtggccagtgacctggccagcagccgcttctctgtgtcccagcaccccctgattggcagcacagctgtgggcagccagtgccccttcctgcccagcgagcagggcaacaatgaggagaccatcagctctgtggatgagctgaagatccccaaggactgtgacagatatgatgacctgtgcagctacatgtcctggaagaccaggaaggacacccagtggccagagaacaacctggccgacaaggaccaggtgtctgtggccaccagctttgacatcacagatgagaacatcgccaccaagagaagtgaccactttgatgctgcccggagctatggccagtactggacccaggaggacagcagcaagcaggccgagacctacctgaccaagggcctgcagggcaaggtggagagtgatgtgatcaccctggatggcctgaatgaaaatgctgtggtgtgcagcgagcgggtggccgagctgcagaggaagcccacccgggagagcgagtaccacagcagtgacctgaggatgctgaggatgagcccagacacagtgcccaaggcccccaagcacctgaaggccggggacaccagcaagggcggcatcgccaaggtgacccagagcaacctgaagagcggcatcaccaccacccctgtggacagcgacatcggcagccacctgagcctgagcctggaggacctgagccagctggccgtgagcagcctggagaccaccaccggccagcacacagacaccctgaaccagaagaccctggccgacacccacctgacagaggagaccctgaaggtgacagccatccctgagcctgctgaccagaagacagccacccccaccgtgctgagcagcagccacagccaccggggcaagcccagcatcttctaccagcagggcctgcctgacagccacctgacagaggaggccctgaaggtgtctgctgcccctggcctggccgaccagaccaccggcatgagcaccctgaccagcaccagctacagccaccgggagaagccaggcaccttctaccagcaggagctgcctgagagcaacctgacagaggagcccctggaggtgtctgctgcccctggccctgtggagcagaagacaggcatccccaccgtgagcagcaccagccacagccacgtggaggacctgctcttcttctaccggcagaccctgcctgatggccacctgacagaccaggccctgaaggtgtctgctgtgtctggccctgctgaccagaagacaggaacagccaccgtgctgagcaccccccacagccaccgggagaagccaggcatcttctaccagcaggagtttgctgacagccaccagacagaggagaccctgaccaaggtgtctgccaccccaggccctgctgaccagaagacagagatcccagctgtgcagagcagcagctacagccagcgggagaagcccagcatcctgtacccccaggacctggccgacagccacctgcctgaggagggcctgaaggtgtctgctgtggccggccctgctgaccagaagacaggcctgcccaccgtgcccagcagcgcctacagccaccgggagaagctgctggtgttctaccagcaggccctgctggacagccacctgcctgaggaggccctgaaggtgtctgctgtgtctggccctgcagatggcaagacaggcaccccagctgtgaccagcaccagcagcgccagcagcagcctgggggagaagcccagcgccttctaccagcagaccctgcccaacagccacctgacagaggaggccctgaaggtgtccatcgtgcccggccctggggaccagaagacaggcatccccagcgcccccagcagcttctacagccaccgggagaagcccatcatcttcagccagcagaccctgcctgacttcctgtttcctgaggaggccctgaaggtgtctgctgtgtctgtgctggccgcccagaagacaggcacccccaccgtgagcagcaacagccacagccacagcgagaagagctctgtgttctaccagcaggagctgcctgacagcgacctgccccgggagagcctgaagatgtctgccatccctggcctgacagaccagaagacagtgcccacccccaccgtgcccagcggcagcttcagccaccgggagaagcccagcatcttctaccagcaggagtggccagacagctatgccacagagaaggccctgaaggtgtccacaggccctggccctgctgaccagaagacagagatcccagctgtgcagagcagcagctacccccagcgggagaagcccagcgtgctgtacccccaggtgctgagtgacagccacctgcctgaggagagcctgaaggtgtctgccttccctggccctgctgaccagatgacagacaccccagctgtgcccagcaccttctacagccagcgggagaagccaggcatcttctaccagcagaccctgcctgagagccacctgcccaaggaggccctgaagatctctgtggcccctggcctggccgaccagaagacaggcacccccaccgtgaccagcaccagctacagccagcaccgggagaagcccagcatcttccaccagcaggccctgcccggcacccacatccctgaggaggcccagaaggtgtctgctgtgacaggccctggcaaccagaagacctggatcccccgggtgctgagcaccttctacagccagcgggagaagccaggcatcttctaccagcagaccctgcccggcagccacatccctgaggaggcccagaaggtgtcccctgtgctgggccctgctgaccagaagacaggcacccccacccccaccagcgccagctacagccacacagagaagccaggcatcttctaccagcaggtgctgcctgacaaccaccccacagaggaggccctgaagatctctgtggccagcgagcctgtggaccagaccaccggcaccccagctgtgaccagcaccagctacagccagtaccgggagaagcccagcatcttctaccagcagagcctgcccagcagccacctgacagaggaggccaagaatgtgtctgctgtgcccggccctgctgaccagaagacagtcatccccatcctgcccagcaccttctacagccacacagagaagccaggagtcttctaccagcaggtgctgccccacagccaccccacagaggaggccctgaagatctctgtggccagcgagcctgtggaccagaccaccggcacccccaccgtgaccagcaccagctacagccagcacacagagaagcccagcatcttctaccagcagagcctgcccggcagccacctgacagaggaggccaagaatgtgtctgctgtgcccggccctggggacaggaagacaggcatccccaccctgcccagcaccttctacagccacacagagaagccaggcagcttctaccagcaggtgctgccccacagccacctgcctgaggaggccctggaggtgtctgtggcccctggccctgtggaccagaccatcggcacccccaccgtgaccagccccagcagcagctttggagagaagcccatcgtcatctacaagcaggccttccctgagggccacctgcctgaggagagcctgaaggtgtctgtggcccctggccctgtgggccagaccaccggggcccccaccatcaccagccccagctacagccagcaccgggccaagagcggcagcttctaccagctggccctgctgggcagccagatccctgaggaggccctgcgggtgtcctctgcccctggccctgctgaccagaccaccggcatccccaccatcaccagcaccagctacagctttggagagaagcccatcgtgaactacaagcaggccttcccagatggccacctgcctgaggaggccctgaaggtgtccatcgtgtctggccccacagagaagaagacagacatcccagctggccccctgggcagcagcgccctgggggagaagcccatcaccttctaccggcaggccctgctggacagccccctgaacaaggaggtggtgaaggtgtctgctgcccctggccctgctgaccagaagacagagaccctgcctgtgcacagcaccagctacagcaacagaggcaagcctgtgatcttctaccagcagaccctgagtgacagccacctgcctgaggaggccctgaaggtgccccctgtgcccggcccagatgcccagaagacagagaccccatctgtgagcagcagcctgtacagctaccgggagaagcccatcgtgttctaccagcaggccctgcctgacagcgagctgacccaggaggccctgaaggtgtctgctgtgccccagcctgctgaccagaagacaggcctgagcacagtgaccagcagcttctacagccacacagagaagcccaacatctcctaccagcaggagctgcctgacagccacctgacagaggaggccctgaaggtgtccaatgtgcccggccctgctgaccagaagacaggagtgtccacagtgaccagcaccagctacagccaccgggagaagcccatcgtgtcctaccagcgggagctgccccacttcacagaagctggcctgaagatcctgcgggtgcccggccctgctgaccagaagacaggcatcaacatcctgcccagcaacagctacccccagcgggagcacagcgtcatctcctatgagcaggagctgcctgacctgacagaggtgaccctgaaggccatcggcgtgcccggccctgctgaccagaagacaggcatccagatcgccagcagcagcagctacagcaaccgggagaaggccagcatcttccaccagcaggagctgcctgatgtgacagaggaggccctgaatgtgtttgtggtgcccggccagggcgacaggaagacagagatccccaccgtgcccctgagctactacagccggcgggagaagcccagcgtcatcagccagcaggagctgcctgacagccacctgacagaggaggccctgaaggtgtcccctgtgtccatcccagctgagcagaagacaggcatccccatcggcctgagcagcagctacagccacagccacaaggagaagctgaagatcagcacagtgcacatcccagatgaccagaagacagagttccctgctgccaccctgagcagctacagccagatcgagaagcccaagatcagcaccgtcatcggccccaatgaccagaagacccccagccagacagccttccacagcagctacagccagacagtgaagcccaacatcctcttccagcagcagctgcctgaccgggaccagagcaagggcatcctgaagatctctgctgtgcctgagctgacagatgtgaacacaggcaagcctgtgtccctgagcagcagctacttccaccgggagaagagcaacatcttcagcccccaggagctgcccggcagccacgtgacagaagatgtgctgaaggtgtccaccatccctggccctgctggccagaagacagtgctgcccacagccctgcccagcagcttcagccaccgggagaagccagacatcttctaccagaaggacctgcctgacagacacctgacagaagatgccctgaagatcagcagcgccctgggccaggccgaccagatcaccggcctgcagacagtgcccagcggcacctacagccacggggagaaccacaagctggtgtctgagcacgtgcagaggctgattgacaacctgaacagcagtgacagctctgtgagcagcaacaacgtgctgctgaacagccaggctgatgacagagtggtgatcaacaagccagagagcgctggcttcagagatgtgggcagcgaggagatccaggatgctgagaacagcgccaagaccctgaaggagatccgcaccctgctgatggaggccgagaacatggccctgaagcgctgcaacttccctgcccccctggcccgcttccgggacatcagtgacatctccttcatccagagcaagaaggtggtgtgcttcaaggagcccagcagcactggagtgtccaatggagacctgctgcaccggcagcccttcacagaggagagccccagcagccgctgcatccagaaggacatcggcacccagaccaacctgaagtgccggcggggcatcgagaactgggagttcatcagcagcaccaccgtgcgcagccccctgcaggaggccgagagcaaggtgtccatggccctggaggagaccctgcggcagtaccaggccgccaagtctgtgatgaggtctgagcctgagggctgcagcggcaccatcggcaacaagatcatcatccccatgatgaccgtcatcaagagtgacagcagcagtgatgccagtgatggaaatggcagctgctcctgggacagcaacctgcctgagagcctggagagcgtgtctgatgtgctgctgaacttcttcccctacgtgagccccaagaccagcatcacagacagccgggaggaggagggcgtgtctgagagtgaagatggcggcggcagctctgtggacagcctggccgcccacgtgaagaacctgctgcagtgtgagagcagcctgaaccacgccaaggagatcctgagaaatgctgaggaggaggagagccgggtgcgggcccacgcctggaacatgaagttcaacctggcccatgactgtggctacagcatcagcgagctgaatgaagatgacaggaggaaggtggaggagatcaaggccgagctgtttggacatggccgcaccacagacctgagcaagggcctgcagagctag

SEQ ID NO: 143369 - DNA, 1944 bp, synthetic construct
  misc_feature 1..1944: note = Description of Artificial Sequence: Synthetic coding sequence
  source 1..1944: mol_type = other DNA
atggccgccccagctgggggcggcggcagcgctgtgtctgtgctggcccccaacggccgccgccacacagtgaaggtgacccccagcacagtgctgctgcaggtgctggaggacacctgccggcggcaggacttcaacccctgtgaatatgacctgaagttccagaggtctgtgctggacctgagcctgcagtggaggtttgccaacctgcccaacaatgccaagctggagatggtgcctgccagccgcagccgggagggccctgagaacatggtgcgcatcgccctgcagctggatgatggcagccggctgcaggacagcttctgcagcggccagaccctgtgggagctgctgagccacttcccccagatccgggagtgcctgcagcaccctggaggagccacccctgtgtgtgtgtacaccagagatgaggtgactggagaggccgccctgcggggcaccaccctgcagagcctgggcctgaccggcggcagcgccaccatccgctttgtgatgaagtgctatgaccctgtgggcaagaccccaggcagcctgggcagcagcgccagcgctggccaggccgccgccagcgcccccctgcccctggagagcggggagctgagcagaggagacctgagcaggccagaagatgctgacaccagcggcccctgctgtgagcacacccaggagaagcagagcacccgggccccagctgctgccccctttgtgcccttcagcggcggcggccagaggctgggcggccccccaggccccacccggcccctgaccagcagcagcgccaagctgcccaagagcctgagcagccctgggggccccagcaagcccaagaagagcaagagcggccaggacccccagcaggagcaggagcaggagcgggagcgggacccccagcaggagcaggagcgggagaggcctgtggaccgggagcctgtggaccgggagcctgtggtgtgccacccagacctggaggagcggctgcaggcctggccagctgagctgcctgatgagttctttgagctgactgtggatgatgtgagaagaaggctggcccagctgaagtctgagaggaagaggctggaggaggcccccctggtgaccaaggccttccgggaggcccagatcaaggagaagctggagcgctaccccaaggtggccctgcgggtgctcttcccagacagatatgtgctgcagggcttcttccggcccagcgagaccgtgggggacctgcgggactttgtgcgcagccacctgggcaaccctgagctgtccttctacctgttcatcaccccacccaagacagtgctggatgaccacacccagaccctcttccagccccagctgggggacagagtggcccccttcaccctgggccccagcctgaagcgctgcctgggccctgagcagaggacccggctgcctgtggtgggagatggaggagatgtggacagcggccgcctgctcttctggggccccagccggggccgggccagccccagcacaggccagcccccctgccaccctgtgtgccggcccagcagcccccccagcccccggcccagcagcggggaccccagccgggtgaaggccggccacaagcacgtgggcaccggccgggccaacctcttccctgctgccctggtgcacctgggcgctgaggagcctgctggggtgtacctggagcccggcctgctggagcacgccatcagccccagcgctgctgatgtgctggtggcccgctacatgagcagagctgctggcagccccagccccctgcctgccccagaccctgcccccaagtctgagcctgctgctgaggagggcgccctggtgcccccagagcccatccctggaacagcccagcctgtgaagaggagcctgggcaaggtgcccaagtggctgaagctgcctgccagcaagaggtag

SEQ ID NO: 143370 - DNA, 1662 bp, synthetic construct
  misc_feature 1..1662: note = Description of Artificial Sequence: Synthetic coding sequence
  source 1..1662: mol_type = other DNA
atggccgccccagctgggggcggcggcagcgctgtgtctgtgctggcccccaacggccgccgccacacagtgaaggtgacccccagcacagtgctgctgcaggtgctggaggacacctgccggcggcaggacttcaacccctgtgaatatgacctgaagttccagaggtctgtgctggacctgagcctgcagtggaggtttgccaacctgcccaacaatgccaagctggagatggtgcctgccagccgcagccgggagggccctgagaacatggtgcgcatcgccctgcagctggatgatggcagccggctgcaggacagcttctgcagcggccagaccctgtgggagctgctgagccacttcccccagatccgggagtgcctgcagcaccctggaggagccacccctgtgtgtgtgtacaccagagatgaggtgactggagaggccgccctgcggggcaccaccctgcagagcctgggcctgaccggcggcagcgccaccatccgctttgtgatgaagtgctatgaccctgtgggcaagaccccaggcagcctgggcagcagcgccagcgctggccaggccgccgccagcgcccccctgcccctggagagcggggagctgagcagaggagacctgagcaggccagaagatgctgacaccagcggcccctgctgtgagcacacccaggagaagcagagcacccgggccccagctgctgccccctttgtgcccttcagcggcggcggccagaggctgggcggccccccaggccccacccggcccctgaccagcagcagcgccaagctgcccaagagcctgagcagccctgggggccccagcaagcccaagaagagcaagagcggccaggacccccagcaggagcaggagcaggagcgggagcgggacccccagcaggagcaggagcgggagaggcctgtggaccgggagcctgtggaccgggagcctgtggtgtgccacccagacctggaggagcggctgcaggcctggccagctgagctgcctgatgagttctttgagctgactgtggatgatgtgagaagaaggctggcccagctgaagtctgagaggaagaggctggaggaggcccccctggtgaccaaggccttccgggaggcccagatcaaggagaagctggagcgctaccccaaggtggccctgcgggtgctcttcccagacagatatgtgctgcagggcttcttccggcccagcgagaccgtgggggacctgcgggactttgtgcgcagccacctgggcaaccctgagctgtccttctacctgttcatcaccccacccaagacagtgctggatgaccacacccagaccctcttccaggccaacctcttccctgctgccctggtgcacctgggcgctgaggagcctgctggggtgtacctggagcccggcctgctggagcacgccatcagccccagcgctgctgatgtgctggtggcccgctacatgagcagagctgctggcagccccagccccctgcctgccccagaccctgcccccaagtctgagcctgctgctgaggagggcgccctggtgcccccagagcccatccctggaacagcccagcctgtgaagaggagcctgggcaaggtgcccaagtggctgaagctgcctgccagcaagaggtag

SEQ ID NO: 143371 - DNA, 1050 bp, synthetic construct
  misc_feature 1..1050: note = Description of Artificial Sequence: Synthetic coding sequence
  source 1..1050: mol_type = other DNA
atggtgcctgccagccgcagccgggagggccctgagaacatggtgagaattgccctgcagctggatgatggcagccggctgcaggacagcttctgcagcggccagaccctgtgggagctgctgagccacttcccccagatcagagaatgtctgcagcaccctgggggcgccacccctgtgtgtgtgtacaccagagatgaggtgactggagaggccgccctgcggggcaccaccctgcagagcctgggcctgactggaggcagcgccaccatccgctttgtgatgaagtgctatgaccctgtgggcaagaccccaggcagcctgggcagcagcgccagcgctggccaggccgccgccagcgcccccctgcccctggagagcggggagctgagcagaggagacctgagcaggccagaagatgctgacaccagcggcccctgctgtgagcacacccaggagaagcagagcacccgggccccagctgctgccccctttgtgcccttcagcggcggcggccagaggctgggcggccccccaggccccacccggcccctgaccagcagcagcgccaagctgcccaagagcctgagcagccctgggggccccagcaagcccaagaagagcaagagcggccaggacccccagcaggagcaggagcaggagcgggagcgggacccccagcaggagcaggagcgggagaggcctgtggaccgggagcctgtggaccgggagcctgtggtgtgccacccagacctggaggagcggctgcaggcctggccagctgagctgcctgatgagttctttgagctgactgtggatgatgtgagaagaaggctggcccagctgaagtctgagaggaagaggctggaggaggcccccctggtgaccaaggccttccgggaggcccagatcaaggagaagctggagcgctaccccaagaggaggagcctgagcctgagcccccggctggagagcgtggtgcccagccagctgacagccagcagcgccagccgggtgcaggtggtgctgctgccccagccccccaagtag

SEQ ID NO: 143372 - DNA, 981 bp, synthetic construct
  misc_feature 1..981: note = Description of Artificial Sequence: Synthetic coding sequence
  source 1..981: mol_type = other DNA
atggagttcctgtctgagaagtttgccctgaagagcccccccagcaagaacagcgacttctacatgggcgctgggggccccctggagcacgtgatggagaccctggacaatgaaagcttctacagcaaggccagcgctggaaaatgtgtgcaggccttcggccccctgcccagggctgagcaccacgtgcggctggagaggaccagcccctgccaggacagctctgtgaactacggcatcaccaaggtggagggccagcccctgcacacagagctgaacagagccatggacaactgcaacagcctgaggatgagccctgtgaagggcatgcaggagaagggggagctggatgagctgggggacaagtgtgacagcaatgtgagcagcagcaagaagagaagacacaggaccaccttcaccagcctgcagctggaggagctggagaaggtgttccagaagacccactacccagatgtgtatgtgcgggagcagctggccctgaggacagagctgacagaggcccgggtgcaggtgtggttccagaacagaagagccaagtggaggaagcgggagagatatggccagatccagcaggccaagagccactttgctgccacctatgacatctctgtgctgcccaggacagacagctacccccagatccagaacaacctgtgggccggaaatgccagcggcggctctgtggtgaccagctgcatgctgccccgggacaccagcagctgcatgaccccctacagccacagccccaggacagacagcagctacacaggcttcagcaaccaccagaaccagttcagccacgtgcccctgaacaacttcttcacagacagcctgctgactggagccaccaatggacatgcctttgagaccaagccagagtttgaaagaagaagcagcagcattgctgtgctgaggatgaaggccaaggagcacacagccaacatctcctgggccatgtag

SEQ ID NO: 143373 - DNA, 1032 bp, synthetic construct
  misc_feature 1..1032: note = Description of Artificial Sequence: Synthetic coding sequence
  source 1..1032: mol_type = other DNA
atggaccctgagcactgtgcccccttccgggtgggccctgcccctggcccctacgtggccagcggagatgagcccccaggcccccagggcaccccagctgctgccccccacctgcacccagccccaccccggggcccccggctgacccgcttccctgcctgtggccccctggagccctacctgcctgagcccgccaagcccccagccaagtacctgcaggacctgggccctggccctgccctgaatggaggccacttctatgagggccctgctgaggccgaggagaagaccagcaaggccgccagcttcccccagctgcccctggactgccggggcggccccagagatggccccagcaacctgcagggcagccctggcccctgcctggccagcctgcacctgcccctgagccctggcctgcctgacagcatggagctggccaagaacaagagcaagaagagaagaaacagaaccaccttcagcaccttccagctggaggagctggagaaggtgttccagaagacccactacccagatgtgtatgcccgggagcagctggccctgaggacagacctgacagaggcccgggtgcaggtgtggttccagaacagaagagccaagtggaggaagcgggagagatatggcaagatccaggagggcaggaaccccttcaccgctgcctatgacatctctgtgctgcccaggacagacagccacccccagctgcagaacagcctgtgggccagccctggcagcggcagccctgggggcccctgcctggtgtccccagagggcatccccagcccctgcatgagcccctacagccacccccacggctctgtggccggcttcatgggcgtgcctgcccccagcgctgcccaccctggcatctacagcatccacggcttcccccccaccctgggcggccacagctttgagcccagcagtgatggagactacaagagccccagcctggtgtccctgcgggtgaagcccaaggagcccccaggcctgctgaactggaccacctag

SEQ ID NO: 143374 - DNA, 1236 bp, synthetic construct
  misc_feature 1..1236: note = Description of Artificial Sequence: Synthetic coding sequence
  source 1..1236: mol_type = other DNA
atgaatgctgagacctgtgtgtcctactgtgagagccctgctgctgccatggatgcctactacagccctgtgtcccagagccgggagggcagcagccccttccgggccttccctggaggagacaagtttggcaccaccttcctgtctgctgctgccaaggcccagggctttggagatgccaagagccgggcccgctacggggccggccagcaggacctggccacccccctggagagcggggccggggcccggggcagcttcaacaagttccagccccagcccagcaccccccagccccagcccccaccccagccccagccccagcagcagcagccccagccccagcccccagcccagccccacctgtacctgcagagaggagcctgcaagaccccaccagatggcagcctgaagctgcaggagggcagcagcggccacagcgctgccctgcaggtgccctgctacgccaaggagagcagcctgggggagcctgagctgcccccagacagcgacacagtgggcatggacagcagctacctgtctgtgaaggaggccggcgtgaagggcccccaggaccgggccagcagtgacctgcccagccccctggagaaggctgacagcgagagcaacaagggcaagaagagaagaaacagaaccaccttcaccagctaccagctggaggagctggagaaggtgttccagaagacccactacccagatgtgtatgcccgggagcagctggccatgaggacagacctgacagaggcccgggtgcaggtgtggttccagaacagaagagccaagtggaggaagcgggagagatttggccagatgcagcaggtgaggacccacttcagcacagcctatgagctgcccctgctgaccagggctgagaactatgcccagatccagaaccccagctggctgggcaacaacggggccgccagccctgtgcctgcctgtgtggtgccctgtgaccctgtgcctgcctgcatgagcccccacgcccaccccccaggcagcggggccagctctgtgacagacttcctgtctgtgtctggagctggcagccacgtgggccagacccacatgggcagcctgtttggagctgccagcctgagccctggcctgaatggctatgagctgaatggagagccagacaggaagaccagcagcattgctgccctgaggatgaaggccaaggagcacagcgctgccatctcctgggccacctag

SEQ ID NO: 143375 - DNA, 630 bp, synthetic construct
  misc_feature 1..630: note = Description of Artificial Sequence: Synthetic coding sequence
  source 1..630: mol_type = other DNA
atgaggagcaccatcctgctcttctgcctgctgggcagcaccaggagcctgccccagctgaagccagccctgggcctgccccccaccaagctggccccagaccagggcaccctgcccaaccagcagcagagcaaccaggtgttccccagcctgagcctcatccccctgacccagatgctgaccctgggccctgacctgcacctgctgaacccagctgctggcatgaccccaggcacccagacccaccccctgaccctgggcggcctgaatgtgcagcagcagctgcacccccacgtgctgcccatctttgtgacccagctgggcgcccagggcaccatcctgagcagcgaggagctgccccagatcttcaccagcctcatcatccacagcctcttccctgggggcatcctgcccaccagccaggccggggccaacccagatgtgcaggacggcagcctgcctgctggaggagctggggtgaacccagccacccagggcaccccagctggccgcctgcccacccccagcggcacagatgatgactttgctgtgaccaccccagctggcatccagaggagcacccacgccatcgaggaggccaccacagagagcgccaacggcatccagtag

SEQ ID NO: 143376 - DNA, 627 bp, synthetic construct
  misc_feature 1..627: note = Description of Artificial Sequence: Synthetic coding sequence
  source 1..627: mol_type = other DNA
atgaggagcaccatcctgctcttctgcctgctgggcagcaccaggagcctgcccctgaagccagccctgggcctgccccccaccaagctggccccagaccagggcaccctgcccaaccagcagcagagcaaccaggtgttccccagcctgagcctcatccccctgacccagatgctgaccctgggccctgacctgcacctgctgaacccagctgctggcatgaccccaggcacccagacccaccccctgaccctgggcggcctgaatgtgcagcagcagctgcacccccacgtgctgcccatctttgtgacccagctgggcgcccagggcaccatcctgagcagcgaggagctgccccagatcttcaccagcctcatcatccacagcctcttccctgggggcatcctgcccaccagccaggccggggccaacccagatgtgcaggacggcagcctgcctgctgggggcgccggcgtgaacccagccacccagggcaccccagctggccgcctgcccaccccatctggaacagatgatgactttgctgtgaccaccccagctggcatccagaggagcacccacgccatcgaggaggccaccacagaaagtgccaacggcatccagtag

SEQ ID NO: 143377 - DNA, 2256 bp, synthetic construct
  misc_feature 1..2256: note = Description of Artificial Sequence: Synthetic coding sequence
  source 1..2256: mol_type = other DNA
atgcctgccctgggctgggccgtggccgccatcctgatgctgcagacagccatggccgagcccagccctggcaccctgcccaggaaggccggggtcttcagtgacctgagcaaccaggagctgaaggctgtgcacagcttcctgtggagcaagaaggagctgcggctgcagcccagcagcaccaccaccatggccaagaacacagtgttcctgattgagatgctgctgcccaagaagtaccacgtgctgcgcttcctggacaagggggagcggcaccctgtgcgggaggcccgggctgtgatcttctttggagaccaggagcaccccaacgtgacagaatttgctgtgggccccctgcccggcccctgctacatgagggccctgagcccccggcccggctaccagagctcctgggccagccggcccatcagcacagcagaatatgccctgctgtaccacaccctgcaggaggccaccaagcccctgcaccagttcttcctgaacaccaccggcttctccttccaggactgccacgaccgctgcctggccttcacagatgtggccccccggggcgtggccagcggccagaggaggtcctggctgatcatccagcgctacgtggagggctacttcctgcaccccaccggcctggagctgctggtggaccacggcagcacagatgctggccactgggccgtggagcaggtgtggtacaacgggaagttctacggcagccctgaggagctggccaggaaatatgcagatggagaggtggatgtggtggtgctggaggaccccctgcccggcggcaaaggacatgacagcacagaggagcccccactcttcagcagccacaagcccaggggggacttccccagccccatccacgtgtctggcccccggctggtgcagccccacggcccccgcttccggctggagggcaatgctgtgctgtatggaggctggagctttgccttccggctgcggagcagcagcggcctgcaggtgctgaatgtgcactttggaggagagcgcatcgcctatgaggtgtctgtgcaggaggccgtggccctgtatggaggccacaccccagctggcatgcagaccaagtacctggatgtgggctggggcctgggctctgtgacccatgagctggcccctggcatcgactgcccagagacagccaccttcctggacaccttccactactatgatgctgatgatcctgtgcactacccccgggccctgtgcctgtttgagatgcccactggagtgcccctgcggcggcacttcaacagcaacttcaagggcggcttcaacttctacgccggcctgaagggccaggtgctggtgctgcggaccaccagcacagtgtacaactatgactacatctgggacttcatcttctaccccaacggggtgatggaggccaagatgcacgccaccggctacgtgcacgccaccttctacaccccagagggcctgcggcacggcacccggctgcacacccacctgattggcaacatccacacccacctggtgcactacagagtggacctggatgtggccggcaccaagaacagcttccagaccctgcagatgaagctggagaacatcaccaacccctggagccccaggcaccgggtggtgcagcccaccctggagcagacccagtacagctgggagcggcaggccgccttccgcttcaagaggaagctgcccaagtacctgctcttcaccagcccccaggagaacccctggggccacaagaggacctaccgcctgcagatccacagcatggctgaccaggtgctgcccccaggctggcaggaggagcaggccatcacctgggcccgctaccccctggccgtgaccaagtaccgggagagcgagctgtgcagcagcagcatctaccaccagaatgacccctggcacccccctgtggtgtttgagcagttcctgcacaacaatgaaaatattgaaaatgaagacctggtggcctgggtgacagtgggcttcctgcacatcccccacagcgaggacatccccaacacagccaccccaggcaacagcgtgggcttcctgctgcggcccttcaacttcttccctgaggaccccagcctggccagccgggacacagtgattgtgtggccccgggacaatggccccaactacgtgcagcgctggatccctgaggaccgggactgcagcatgcccccacccttctcctacaacggcacctacagacctgtgtag

SEQ ID NO: 143378 - DNA, 2313 bp, synthetic construct
  misc_feature 1..2313: note = Description of Artificial Sequence: Synthetic coding sequence
  source 1..2313: mol_type = other DNA
atgcctgccctgggctgggccgtggccgccatcctgatgctgcagacagccatggccgagcccagccctggcaccctgcccaggaaggccggggtcttcagtgacctgagcaaccaggagctgaaggctgtgcacagcttcctgtggagcaagaaggagctgcggctgcagcccagcagcaccaccaccatggccaagaacacagtgttcctgattgagatgctgctgcccaagaagtaccacgtgctgcgcttcctggacaagggggagcggcaccctgtgcgggaggcccgggctgtgatcttctttggagaccaggagcaccccaacgtgacagaatttgctgtgggccccctgcccggcccctgctacatgagggccctgagcccccggcccggctaccagagctcctgggccagccggcccatcagcacagcagaatatgccctgctgtaccacaccctgcaggaggccaccaagcccctgcaccagttcttcctgaacaccaccggcttctccttccaggactgccacgaccgctgcctggccttcacagatgtggccccccggggcgtggccagcggccagaggaggtcctggctgatcatccagcgctacgtggagggctacttcctgcaccccaccggcctggagctgctggtggaccacggcagcacagatgctggccactgggccgtggagcaggtgtggtacaacgggaagttctacggcagccctgaggagctggccaggaaatatgcagatggagaggtggatgtggtggtgctggaggaccccctgcccggcggcaaaggacatgacagcacagaggagcccccactcttcagcagccacaagcccaggggggacttccccagccccatccacgtgtctggcccccggctggtgcagccccacggcccccgcttccggctggagggcaatgctgtgctgtatggaggctggagctttgccttccggctgcggagcagcagcggcctgcaggtgctgaatgtgcactttggaggagagcgcatcgcctatgaggtgtctgtgcaggaggccgtggccctgtatggaggccacaccccagctggcatgcagaccaagtacctggatgtgggctggggcctgggctctgtgacccatgagctggcccctggcatcgactgcccagagacagccaccttcctggacaccttccactactatgatgctgatgatcctgtgcactacccccgggccctgtgcctgtttgagatgcccactggagtgcccctgcggcggcacttcaacagcaacttcaagggcggcttcaacttctacgccggcctgaagggccaggtgctggtgctgcggaccaccagcacagtgtacaactatgactacatctgggacttcatcttctaccccaacggggtgatggaggccaagatgcacgccaccggctacgtgcacgccaccttctacaccccagagggcctgcggcacggcacccggctgcacacccacctgattggcaacatccacacccacctggtgcactacagagtggacctggatgtggccggcaccaagaacagcttccagaccctgcagatgaagctggagaacatcaccaacccctggagccccaggcaccgggtggtgcagcccaccctggagcagacccagtacagctgggagcggcaggccgccttccgcttcaagaggaagctgcccaagtacctgctcttcaccagcccccaggagaacccctggggccacaagaggacctaccgcctgcagatccacagcatggctgaccaggtgctgcccccaggctggcaggaggagcaggccatcacctgggccaggacagagggcggccagccccgggccctgagccaggccgccagccctgtgcccggccgctaccccctggccgtgaccaagtaccgggagagcgagctgtgcagcagcagcatctaccaccagaatgacccctggcacccccctgtggtgtttgagcagttcctgcacaacaatgaaaatattgaaaatgaagacctggtggcctgggtgacagtgggcttcctgcacatcccccacagcgaggacatccccaacacagccaccccaggcaacagcgtgggcttcctgctgcggcccttcaacttcttccctgaggaccccagcctggccagccgggacaccgtcatcgtgtggccccgggacaatggccccaactacgtgcagcgctggatcccagaagatcgggactgcagcatgcccccacccttctcctacaacggcacctacagacctgtgtag

SEQ ID NO: 143379 - DNA, 1884 bp, synthetic construct
  misc_feature 1..1884: note = Description of Artificial Sequence: Synthetic coding sequence
  source 1..1884: mol_type = other DNA
atgagggccctgagcccccggcccggctaccagagctcctgggccagccggcccatcagcacagcagaatatgccctgctgtaccacaccctgcaggaggccaccaagcccctgcaccagttcttcctgaacaccaccggcttctccttccaggactgccacgaccgctgcctggccttcacagatgtggccccccggggcgtggccagcggccagaggaggtcctggctgatcatccagcgctacgtggagggctacttcctgcaccccaccggcctggagctgctggtggaccacggcagcacagatgctggccactgggccgtggagcaggtgtggtacaacgggaagttctacggcagccctgaggagctggccaggaaatatgcagatggagaggtggatgtggtggtgctggaggaccccctgcccggcggcaaaggacatgacagcacagaggagcccccactcttcagcagccacaagcccaggggggacttccccagccccatccacgtgtctggcccccggctggtgcagccccacggcccccgcttccggctggagggcaatgctgtgctgtatggaggctggagctttgccttccggctgcggagcagcagcggcctgcaggtgctgaatgtgcactttggaggagagcgcatcgcctatgaggtgtctgtgcaggaggccgtggccctgtatggaggccacaccccagctggcatgcagaccaagtacctggatgtgggctggggcctgggctctgtgacccatgagctggcccctggcatcgactgcccagagacagccaccttcctggacaccttccactactatgatgctgatgatcctgtgcactacccccgggccctgtgcctgtttgagatgcccactggagtgcccctgcggcggcacttcaacagcaacttcaagggcggcttcaacttctacgccggcctgaagggccaggtgctggtgctgcggaccaccagcacagtgtacaactatgactacatctgggacttcatcttctaccccaacggggtgatggaggccaagatgcacgccaccggctacgtgcacgccaccttctacaccccagagggcctgcggcacggcacccggctgcacacccacctgattggcaacatccacacccacctggtgcactacagagtggacctggatgtggccggcaccaagaacagcttccagaccctgcagatgaagctggagaacatcaccaacccctggagccccaggcaccgggtggtgcagcccaccctggagcagacccagtacagctgggagcggcaggccgccttccgcttcaagaggaagctgcccaagtacctgctcttcaccagcccccaggagaacccctggggccacaagaggacctaccgcctgcagatccacagcatggctgaccaggtgctgcccccaggctggcaggaggagcaggccatcacctgggcccgctaccccctggccgtgaccaagtaccgggagagcgagctgtgcagcagcagcatctaccaccagaatgacccctggcacccccctgtggtgtttgagcagttcctgcacaacaatgaaaatattgaaaatgaagacctggtggcctgggtgacagtgggcttcctgcacatcccccacagcgaggacatccccaacacagccaccccaggcaacagcgtgggcttcctgctgcggcccttcaacttcttccctgaggaccccagcctggccagccgggacacagtgattgtgtggccccgggacaatggccccaactacgtgcagcgctggatccctgaggaccgggactgcagcatgcccccacccttctcctacaacggcacctacagacctgtgtag

SEQ ID NO: 143380 - DNA, 750 bp, synthetic construct
  misc_feature 1..750: note = Description of Artificial Sequence: Synthetic coding sequence
  source 1..750: mol_type = other DNA
atgcctgccctgggctgggccgtggccgccatcctgatgctgcagacagccatggccgagcccagccctggcaccctgcccaggaaggccggggtcttcagtgacctgagcaaccaggagctgaaggctgtgcacagcttcctgtggagcaagaaggagctgcggctgcagcccagcagcaccaccaccatggccaagaacacagtgttcctgattgagatgctgctgcccaagaagtaccacgtgctgcgcttcctggacaagggggagcggcaccctgtgcgggaggcccgggctgtgatcttctttggagaccaggagcaccccaacgtgacagaatttgctgtgggccccctgcccggcccctgctacatgagggccctgagcccccggcccggctaccagagctcctgggccagccggcccatcagcacagcagaatatgccctgctgtaccacaccctgcaggaggccaccaagcccctgcaccagttcttcctgaacaccaccggcttctccttccaggactgccacgaccgctgcctggccttcacagatgtggccccccggggcgtggccagcggccagaggaggtcctggctgatcatccagcgctacgtggagggctacttcctgcaccccaccggcctggagctgctggtggaccacggcagcacagatgctggccactgggccgtggagcaggtgtggtacaacgggaagttctacggcagccctgaggagctgtag

SEQ ID NO: 143381 - DNA, 2256 bp, synthetic construct; identical to SEQ ID NO: 143377
  misc_feature 1..2256: note = Description of Artificial Sequence: Synthetic coding sequence
  source 1..2256: mol_type = other DNA

SEQ ID NO: 143382 - DNA, 1014 bp, synthetic construct
  misc_feature 1..1014: note = Description of Artificial Sequence: Synthetic coding sequence
  source 1..1014: mol_type = other DNA
atgcctgccctgggctgggccgtggccgccatcctgatgctgcagacagccatggccgagcccagccctggcaccctgcccaggaaggccggggtcttcagtgacctgagcaaccaggagctgaaggctgtgcacagcttcctgtggagcaagaaggagctgcggctgcagcccagcagcaccaccaccatggccaagaacacagtgttcctgattgagatgctgctgcccaagaagtaccacgtgctgcgcttcctggacaagggggagcggcaccctgtgcgggaggcccgggctgtgatcttctttggagaccaggagcaccccaacgtgacagaatttgctgtgggccccctgcccggcccctgctacatgagggccctgagcccccggcccggctaccagagctcctgggccagccggcccatcagcacagcagaatatgccctgctgtaccacaccctgcaggaggccaccaagcccctgcaccagttcttcctgaacaccaccggcttctccttccaggactgccacgaccgctgcctggccttcacagatgtggccccccggggcgtggccagcggccagaggaggtcctggctgatcatccagcgctacgtggagggctacttcctgcaccccaccggcctggagctgctggtggaccacggcagcacagatgctggccactgggccgtggagcaggtgtggtacaacgggaagttctacggcagccctgaggagctggccaggaaatatgcagatggagaggtggatgtggtggtgctggaggaccccctgcccggcggcaaaggacatgacagcacagaggagcccccactcttcagcagccacaagcccaggggggacttccccagccccatccacgtgtctggcccccggctggtgcagccccacggcccccgcttccggctggagggcaatgctgtgctgtatggaggctggagctttgccttccggctgcggagcagcagcggcctgcaggtgctgtag

SEQ ID NO: 143383 - DNA, 582 bp, synthetic construct
  misc_feature 1..582: note = Description of Artificial Sequence: Synthetic coding sequence
  source 1..582: mol_type = other DNA
atggaggccaagatgcacgccaccggctacgtgcacgccaccttctacaccccagagggcctgcggcacggcacccggctgcacacccacctgattggcaacatccacacccacctggtgcactacagagtggacctggatgtggccggcaccaagaacagcttccagaccctgcagatgaagctggagaacatcaccaacccctggagccccaggcaccgggtggtgcagcccaccctggagcagacccagtacagctgggagcggcaggccgccttccgcttcaagaggaagctgcccaagtacctgctcttcaccagcccccaggagaacccctggggccacaagaggacctaccgcctgcagatccacagcatggctgaccaggtgctgcccccaggctggcaggaggagcaggccatcacctgggcccgctaccccctggccgtgaccaagtaccgggagagcgagctgtgcagcagcagcatctaccaccagaatgacccctggcacccctggagcctgagcagcttcttcaccaccaccaggaccctgaagatgaggacctggtggccaggatag

SEQ ID NO: 143384 - DNA, 2256 bp, synthetic construct; identical to SEQ ID NO: 143377
  misc_feature 1..2256: note = Description of Artificial Sequence: Synthetic coding sequence
  source 1..2256: mol_type = other DNA

SEQ ID NO: 143385 - DNA, 1191 bp, synthetic construct
  misc_feature 1..1191: note = Description of Artificial Sequence: Synthetic coding sequence
  source 1..1191: mol_type = other DNA
atgctgcccagcctgcaggagagcatggatggagatgagaaggagctggagagcagcgaggagggcggcagcgctgaggagcggcggctggagccccccagcagcagccactactgcctgtacagctaccggggcagccggctggcccagcagagaggagacagtgaagatggcagccccagcggcaccaatgctgagaccccatctggagatgacttcagcctgagcctggccgacaccaacctgcccagcgaggtggagcctgagctgcggagcttcatcgccaagaggctgagcagaggagctgtgtttgagggcctgggcaatgtggcctctgtggagctgaagatccctggctacagagtgggctgctactactgcctcttccagaatgagaagctgctgcctgagaccgtgaccattgattctgaaagaaaccccagtgaatatgtggtgtgcttcctgggcggcagcgagaagggcctggagaccttccggctggagctggacaagtacatccagggcctgaagaacaacatgaactgtgaggcccggggcctggagagccacatcaagagctacctgagctcctggtttgaagatgtggtgtgccccatccagagggtggtgctgctcttccaggagaagctgaccttcctgctgcatgctgccctgagctacacccctgtggaggtgaaggagagtgatgagaagaccaagagggacatcaaccgcttcctgtctgtggccagcctgcagggcctcatccacgagggcaccatgaccagcctgtgcatggccatgacagaggagcagcacaagtctgtggtgattgactgcagcagcagccagccccagttctgcaatgccggcagcaaccgcttctgtgaggactggatgcaggccttcctgaatggagccaagggcggcaaccccttcctgttccggcaggtgctggagaacttcaagctgaaggccatccaggacaccaacaacctgaagcgcttcatccggcaggccgagatgaaccactacgccctcttcaagtgctacatgttcctgaagaactgtggcagcggggacatcctgctgaagatcgtgaaggtggagcacgaggagatgcctgaggccaagaatgtgattgctgtgctggaggagttcatgaaggaggccctggaccagagcttctag

SEQ ID NO: 143386 - DNA, 1539 bp, synthetic construct
  misc_feature 1..1539: note = Description of Artificial Sequence: Synthetic coding sequence
  source 1..1539: mol_type = other DNA
atggacctgaaggagagccccagcgagggcagcctgcagcccagcagcatccagatctttgccaacaccagcaccctgcacggcatccgccacatctttgtgtatggccccctgaccatcagaagagtgctgtgggccgtggcctttgtgggcagcctgggcctgctgctggtggagagcagcgagcgggtgtcctactacttctcctaccagcacgtgaccaaggtggatgaggtggtggcccagagcctggtgtttcctgctgtgaccctgtgcaacctgaatggcttccgcttcagccggctgaccaccaatgacctgtaccacgccggggagctgctggccctgctggatgtgaacctgcagatcccagacccccacctggccgaccccagcgtgctggaggccctgcggcagaaggccaacttcaagcactacaagcccaagcagttctccatgctggagttcctgcaccgggtgggccatgacctgaaggacatgatgctgtactgcaagttcaagggccaggagtgtggccaccaggacttcaccaccgtcttcaccaagtatggcaagtgctacatgttcaacagcggggaggatggcaagcccctgctgaccaccgtgaagggcggcactggaaatggcctggagatcatgctggacatccagcaggatgagtacctgcccatctggggcgagacagaggagaccacctttgaggccggcgtgaaggtgcagatccacagccagagcgagccccccttcatccaggagctgggcttcggcgtggcccctggcttccagacctttgtggccacccaggagcagaggctgacctacctgcccccaccctggggcgagtgccgcagcagcgagatgggcctggacttcttccctgtgtacagcatcacagcctgcagaattgactgtgagacccgctacatcgtggagaactgcaactgcaggatggtgcacatgcctggagatgcccccttctgcaccccagagcagcacaaggaatgtgccgagcccgccctgggcctgctggccgagaaggacagcaactactgcctgtgcaggaccccctgcaacctgacccgctacaacaaggagctgtccatggtgaagatccccagcaagaccagcgccaagtacctggagaagaagttcaacaagtctgagaagtacatcagcgagaacatcctggtgctggacatcttctttgaggccctgaactatgagaccatcgagcagaagaaggcctatgaggtggccgccctgctgggggacatcggcggccagatgggcctcttcatcggggccagcatcctgaccatcctggagctgtttgactacatctatgagctgatcaaggagaagctgctggacctgctgggcaaggaggaggatgagggcagccatgatgaaaatgtgtccacctgtgacaccatgcccaaccacagcgagaccatcagccacacagtgaatgtgcccctgcagaccaccctgggcaccctggaggagatcgcctgctag

SEQ ID NO: 143387 - DNA, 612 bp, synthetic construct
  misc_feature 1..612: note = Description of Artificial Sequence: Synthetic coding sequence
  source 1..612: mol_type = other DNA
atgttcaacagcggggaggatggcaagcccctgctgaccaccgtgaagggcggcactggaaatggcctggagatcatgctggacatccagcaggatgagtacctgcccatctggggcgagacagaggagaccacctttgaggccggcgtgaaggtgcagatccacagccagagcgagccccccttcatccaggagctgggcttcggcgtggcccctggcttccagacctttgtggccacccaggagcagaggctgacctacctgcccccaccctggggcgagtgccgcagcagcgagatgggcctggacttcttccctgtgtacagcatcacagcctgcagaattgactgtgagacccgctacatcgtggagaactgcaactgcaggatggtgcacatgcctggagatgcccccttctgcaccccagagcagcacaaggaatgtgccgagcccgccctgggcctgctggccgagaaggacagcaactactgcctgtgcaggaccccctgcaacctgacccgctacaacaaggagctgtccatggtgaagatccccagcaagaccagcgccaagtacctggagaagaagttcaacaagtctgagaagtactag

SEQ ID NO: 143388 - DNA, 1287 bp, synthetic construct
  misc_feature 1..1287: note = Description of Artificial Sequence: Synthetic coding sequence
  source 1..1287: mol_type = other DNA
atggctgtgggcgccagcggcctggagggggacaagatggccggggccatgcccctgcagctgctgctgctgctgatcctgctgggccctggcaacagcctgcagctgtgggacacctgggcagatgaggccgagaaggccctgggccccctgctggcccgggaccggcggcaggccacagaatatgagtacctggactatgacttcctgcctgagacagagcccccagagatgctgaggaacagcacagacaccacccccctgactggacctggcaccccagagagcaccaccgtggagcctgctgcccggcgcagcacaggcctggatgctggaggagctgtgacagagctgaccacagagctggccaacatgggcaacctgagcacagacagcgctgccatggagatccagaccacccagcctgctgccacagaggcccagaccacccagcctgtgcccacagaggcccagaccacccccctggccgccacagaggcccagaccacccggctgacagccacagaggcccagaccacccccctggccgccacagaggcccagaccaccccacctgctgccacagaggcccagaccacccagcccaccggcctggaggcccagaccacagccccagctgccatggaggcccagaccacagccccagctgccatggaggcccagaccaccccacctgctgccatggaggcccagaccacccagaccacagccatggaggcccagaccacagcccctgaggccacagaggcccagaccacccagcccacagccacagaggcccagaccacccccctggccgccatggaggccctgagcacagagcccagcgccacagaggccctgtccatggagcccaccaccaagaggggcctcttcatccccttctctgtgtcctctgtgacccacaagggcatccccatggccgccagcaacctgtctgtgaactaccctgtgggcgccccagaccacatctctgtgaagcagtgcctgctggccatcctgatcctggccctggtggccaccatcttctttgtgtgcaccgtggtgctggccgtgcggctgagcaggaagggccacatgtaccctgtgaggaactacagccccacagagatggtgtgcatcagcagcctgctgcctgatggaggagagggccccagcgccacagccaatggaggcctgagcaaggccaagagccctggcctgaccccagagccccgggaggaccgggagggagatgacctgaccctgcacagcttcctgccctag

SEQ ID NO: 143389 - DNA, 1587 bp, synthetic construct
  misc_feature 1..1587: note = Description of Artificial Sequence: Synthetic coding sequence
  source 1..1587: mol_type = other DNA
atggagctgaaggccgaggaggaggaggtgggcggcgtgcagcctgtgtccatccaggcctttgccagcagcagcaccctgcacggcctggcccacatcttctcctatgaaaggctgagcctgaagagggccctgtgggccctgtgcttcctgggcagcctggccgtgctgctgtgtgtgtgcacagagcgggtgcagtactacttccactaccaccacgtgaccaagctggatgaggtggccgccagccagctgaccttccctgctgtgaccctgtgcaacctgaatgagttccgcttcagccaggtgtccaagaatgacctgtaccacgccggggagctgctggccctgctgaacaacagatatgagatcccagacacccagatggctgatgagaagcagctggagatcctgcaggacaaggccaacttccgctccttcaagcccaagcccttcaacatgagggagttctatgacagagctggccatgacatccgggacatgctgctgagctgccacttccggggggaggtgtgcagcgctgaggacttcaaggtggtgttcaccaggtatggcaagtgctacaccttcaacagcggcagagatggccggccccggctgaagaccatgaagggcggcactggaaatggcctggagatcatgctggacatccagcaggatgagtacctgcctgtgtggggcgagacagatgagaccagctttgaagctggcatcaaggtgcagatccacagccaggatgagccccccttcatcgaccagctgggctttggagtggcccctggcttccagacctttgtggcctgccaggagcagaggctcatctacctgcccccaccctggggcacctgcaaggctgtgaccatggacagcgacctggacttctttgacagctacagcatcacagcctgcagaattgactgtgagacccgctacctggtggagaactgcaactgcaggatggtgcacatgcctggagatgccccctactgcaccccagagcagtacaaggaatgtgccgaccctgccctggacttcctggtggagaaggaccaggagtactgtgtgtgtgagatgccctgcaacctgaccaggtatggcaaggagctgtccatggtgaagatccccagcaaggccagcgccaagtacctggccaagaagttcaacaagtctgagcagtacatcggggagaacatcctggtgctggacatcttctttgaggtgctgaactatgagaccatcgagcagaagaaggcctatgaaattgctggcctgctgggggacattggaggccagatgggcctcttcatcggggccagcatcctgactgtgctggagctgtttgattatgcctatgaggtgatcaagcacaagctgtgcagaagaggcaagtgccagaaggaggccaagaggagcagcgctgacaagggcgtggccctgagcctggatgatgtgaagaggcacaacccctgtgagagcctgcggggccaccctgctggcatgacctacgccgccaacatcctgccccaccacccagcccggggcacctttgaggacttcacctgctag

SEQ ID NO: 143390 - DNA, 1689 bp, synthetic construct
  misc_feature 1..1689: note = Description of Artificial Sequence: Synthetic coding sequence
  source 1..1689: mol_type = other DNA
atgcccatccagatcttctgcagcatgtccttcagcagtggagaggaggcccctggccccctgggggacatctggggcccccaccaccaccagcagcagcaggacatcagcgagagcgaggaggaggaggaggagaaggagaaggaggccgtgaggaaggaggccagcgagggccacagccccatggacctggtggcctttgccaacagctgcaccctgcacggcaccaaccacatctttgtggagggcggccctggcccccggcaggtgctgtgggccgtggcctttgtgctggccctgggcgccttcctgtgccaggtgggggacagagtggcctactacctgagctacccccacgtgaccctgctgaatgaggtggccaccacagagctggccttccctgctgtgaccctgtgcaacaccaatgctgtgcggctgagccagctgagctacccagacctgctgtacctggcccccatgctgggcctggatgaaagtgatgatcctggggtgcccctggcccctcctggccctgaggccttcagcggggagcccttcaacctgcaccgcttctacaacagaagctgccaccggctggaggacatgctgctgtactgcagctaccagggcggcccctgtggcccccacaacttctctgtggtgttcaccaggtatggcaagtgctacaccttcaacagcggcagagatggccggccccggctgaagaccatgaagggcggcactggaaatggcctggagatcatgctggacatccagcaggatgagtacctgcctgtgtggggcgagacagatgagaccagctttgaagctggcatcaaggtgcagatccacagccaggatgagccccccttcatcgaccagctgggctttggagtggcccctggcttccagacctttgtggcctgccaggagcagaggctcatctacctgcccccaccctggggcacctgcaaggctgtgaccatggacagcgacctggacttctttgacagctacagcatcacagcctgcagaattgactgtgagacccgctacctggtggagaactgcaactgcaggatggtgcacatgcctggagatgccccctactgcaccccagagcagtacaaggaatgtgccgaccctgccctggacttcctggtggagaaggaccaggagtactgtgtgtgtgagatgccctgcaacctgaccaggtatggcaaggagctgtccatggtgaagatccccagcaaggccagcgccaagtacctggccaagaagttcaacaagtctgagcagtacatcggggagaacatcctggtgctggacatcttctttgaggtgctgaactatgagaccatcgagcagaagaaggcctatgaaattgctggcctgctgggggacattggaggccagatgggcctcttcatcggggccagcatcctgactgtgctggagctgtttgattatgcctatgaggtgatcaagcacaagctgtgcagaagaggcaagtgccagaaggaggccaagaggagcagcgctgacaagggcgtggccctgagcctggatgatgtgaagaggcacaacccctgtgagagcctgcggggccaccctgctggcatgacctacgccgccaacatcctgccccaccacccagcccggggcacctttgaggacttcacctgctag

SEQ ID NO: 143391 - DNA, 1650 bp, synthetic construct
  misc_feature 1..1650: note = Description of Artificial Sequence: Synthetic coding sequence
  source 1..1650: mol_type = other DNA
atgaagcccaccagcggccctgaggaggcccggcggcctgccagtgacatccgggtgtttgccagcaactgcagcatgcacggcctgggccacgtgtttggacctggcagcctgagcctgcggcggggcatgtgggccgctgctgtggtgctgtctgtggccaccttcctgtaccaggtggccgagcgggtgcgctactaccgggagttccaccaccagacagccctggatgagcgggagagccacaggctcatcttccctgctgtgaccctgtgcaacatcaaccccctgcggcgcagccggctgaccccaaatgacctgcactgggccggcagcgccctgctgggcctggaccctgctgagcacgccgccttcctgcgggccctgggccggcccccagcccctcctggcttcatgcccagccccacctttgacatggcccagctgtatgcccgggccggccacagcctggatgacatgctgctggactgccgcttccggggccagccctgtggccctgagaacttcaccaccatcttcaccaggatgggcaagtgctacaccttcaacagcggggctgatggagctgagctgctgaccaccacccggggcggcatgggaaatggcctggacatcatgctggatgtgcagcaggaggagtacctgcctgtgtggagggacaatgaggagaccccatttgaggtgggcatccgggtgcagatccacagccaggaggagccccccatcatcgaccagctgggcctgggcgtgtccccaggctaccagacctttgtgtcctgccagcagcagcagctgtccttcctgcccccaccctggggagactgcagcagcgccagcctgaaccccaactatgagcctgagcccagcgaccccctgggcagccccagccccagccccagccccccctacaccctgatgggctgccgcctggcctgtgagaccaggtatgtggccaggaaatgtggctgcaggatggtgtacatgcctggagatgtgcctgtgtgcagcccccagcagtacaagaactgtgcccacccagccattgatgccatgctgaggaaggacagctgtgcctgccccaacccctgtgccagcaccaggtatgccaaggagctgtccatggtgcgcatccccagcagagctgctgcccgcttcctggccaggaagctgaacagaagtgaggcctacatcgccgagaatgtgctggccctggacatcttctttgaggccctgaactatgagaccgtggagcagaagaaggcctatgagatgtctgagctgctgggggacatcggcggccagatgggcctcttcatcggggccagcctgctgaccatcctggagatcctggactacctgtgtgaggtgttccgggacaaggtgctgggctacttctggaaccggcagcacagccagaggcacagcagcaccaacctgctgcaggagggcctgggcagccacaggacccaggtgccccacctgagcctgggccccagcaccctgctgtgcagcgaggacctgccccccctgcctgtgcccagcccccggctgagccccccacccacagccccagccaccctgagccacagcagcaggcctgctgtgtgtgtgctgggcgccccaccctag

SEQ ID NO: 143392 - DNA, 1596 bp, synthetic construct
  misc_feature 1..1596: note = Description of Artificial Sequence: Synthetic coding sequence
  source 1..1596: mol_type = other DNA
atgaagcccaccagcggccctgaggaggcccggcggcctgccagtgacatccgggtgtttgccagcaactgcagcatgcacggcctgggccacgtgtttggacctggcagcctgagcctgcggcggggcatgtgggccgctgctgtggtgctgtctgtggccaccttcctgtaccaggtggccgagcgggtgcgctactaccgggagttccaccaccagacagccctggatgagcgggagagccacaggctcatcttccctgctgtgaccctgtgcaacatcaaccccctgcggcgcagccggctgaccccaaatgacctgcactgggccggcagcgccctgctgggcctggaccctgctgagcacgccgccttcctgcgggccctgggccggcccccagcccctcctggcttcatgcccagccccacctttgacatggcccagctgtatgcccgggccggccacagcctggatgacatgctgctggactgccgcttccggggccagccctgtggccctgagaacttcaccaccatcttcaccaggatgggcaagtgctacaccttcaacagcggggctgatggagctgagctgctgaccaccacccggggcggcatgggaaatggcctggacatcatgctggatgtgcagcaggaggagtacctgcctgtgtggagggacaatgaggagaccccatttgaggtgggcatccgggtgcagatccacagccaggaggagccccccatcatcgaccagctgggcctgggcgtgtccccaggctaccagacctttgtgtcctgccagcagcagcagctgtccttcctgcccccaccctggggagactgcagcagcgccagcctgaaccccaactatgagcctgagcccagcgaccccctgggcagccccagccccagccccagccccccctacaccctgatgggctgccgcctggcctgtgagaccaggtatgtggccaggaaatgtggctgcaggatggtgtacatgcctggagatgtgcctgtgtgcagcccccagcagtacaagaactgtgcccacccagccattgatgccatgctgaggaaggacagctgtgcctgccccaacccctgtgccagcaccaggtatgccaaggagctgtccatggtgcgcatccccagcagagctgctgcccgcttcctggccaggaagctgaacagaagtgaggcctacatcgccgagaatgtgctggccctggacatcttctttgaggccctgaactatgagaccgtggagcagaagaaggcctatgagatgtctgagctgctgggggacatcggcggccagatgggcctcttcatcggggccagcctgctgaccatcctggagatcctggactacctgtgtgaggtgttccgggacaaggtgctgggctacttctggaaccggcagcacagccagaggcacagcagcaccaacctgctgcaggagggcctgggcagccacaggacccaggtgccccacctgagcctgggccccaggcctcccaccccaccctgtgctgtgaccaagaccctgagcgccagccacaggacctgctacctggtgacccagctgtag

SEQ ID NO: 143393 - DNA, 1632 bp, synthetic construct
  misc_feature 1..1632: note = Description of Artificial Sequence: Synthetic coding sequence
  source 1..1632: mol_type = other DNA
atgaagcccaccagcggccctgaggaggcccggcggcctgccagtgacatccgggtgtttgccagcaactgcagcatgcacggcctgggccacgtgtttggacctggcagcctgagcctgcggcggggcatgtgggccgctgctgtggtgctgtctgtggccaccttcctgtaccaggtggccgagcgggtgcgctactaccgggagttccaccaccagacagccctggatgagcgggagagccacaggctcatcttccctgctgtgaccctgtgcaacatcaaccccctgcggcgcagccggctgaccccaaatgacctgcactgggccggcagcgccctgctgggcctggaccctgctgagcacgccgccttcctgcgggccctgggccggcccccagcccctcctggcttcatgcccagccccacctttgacatggcccagctgtatgcccgggccggccacagcctggatgacatgctgctggactgccgcttccggggccagccctgtggccctgagaacttcaccaccatcttcaccaggatgggcaagtgctacaccttcaacagcggggctgatggagctgagctgctgaccaccacccggggcggcatgggaaatggcctggacatcatgctggatgtgcagcaggaggagtacctgcctgtgtggagggacaatgaggagaccccatttgaggtgggcatccgggtgcagatccacagccaggaggagccccccatcatcgaccagctgggcctgggcgtgtccccaggctaccagacctttgtgtcctgccagcagcagcagctgtccttcctgcccccaccctggggagactgcagcagcgccagcctgaaccccaactatgagcctgagcccagcgaccccctgggcagccccagccccagccccagccccccctacaccctgatgggctgccgcctggcctgtgagaccaggtatgtggccaggaaatgtggctgcaggatggtgtacatgcctggagatgtgcctgtgtgcagcccccagcagtacaagaactgtgcccacccagccattgatgccatgctgaggaaggacagctgtgcctgccccaacccctgtgccagcaccaggtatgccaaggagctgtccatggtgcgcatccccagcagagctgctgcccgcttcctggccaggaagctgaacagaagtgaggcctacatcgccgagaatgtgctggccctggacatcttctttgaggccctgaactatgagaccgtggagcagaagaaggcctatgagatgtctgagctgctgggggacatcggcggccagatgggcctcttcatcggggccagcctgctgaccatcctggagatcctggactacctgtgtgaggtgttccgggacaaggtgctgggctacttctggaaccggcagcacagccagaggcacagcagcaccaacctgaccagccaccccagcctgtgccgccaccaggacagcctgcggctgcccccccacctgctgccctgccacacagccctggacctgctgtctgtgtcctctgagcccaggccagacatcctggacatgcccagcctgcacgtggccttccccagcagcccccagatcaagagctag

SEQ ID NO: 143394 - DNA, 1944 bp, synthetic construct
  misc_feature 1..1944: note = Description of Artificial Sequence: Synthetic coding sequence
  source 1..1944: mol_type = other DNA
atgctgtctggagctgctggggccgcccggcggggcggggccgccctggcccccagcctgaccaggagcctggccggcacccatgctggagctgacagctgtgccggggctgacaagggcagccacaaggagaccatcgaggagcgggacaagaggcagcagaggcagcagaggcagaggcagcaccagggctgtggggccgccggcagcggcagtgacagccccaccagcggcccccaccctgtgcctgtgctcttccccctggccctgagcctggaggagcagcccctgccccccctgcccctgggccgggcccctggcctgctggcccgggagggccagggccgggaggccctggccagccccagcagccggggccagatgcccatcgagatcgtgtgcaagatcaagtttgctgaagaagatgccaagcccaaggagaaggaggccggagatgagcagagcctgctgggcgctgtggcccctggggccgccccccgggacctggccacctttgccagcaccagcaccctgcacggcctgggccgggcctgtggccctggcccccacggcctgcggaggaccctgtgggccctggccctgctgaccagcctggccgccttcctgtaccaggccgccggcctggcccggggctacctgacccggccccacctggtggccatggaccctgctgccccagcccctgtggccggcttccctgctgtgaccctgtgcaacatcaaccgcttccgccacagcgccctgagtgatgctgacatcttccacctggccaacctgaccggcctgccccccaaggacagagatggccacagagctgctggcctgcgctacccagagccagacatggtggacatcctgaacagaacaggccaccagctggccgacatgctgaagagctgcaacttcagcggccaccactgcagcgccagcaacttctctgtggtgtacaccaggtatggcaagtgctacaccttcaatgctgaccccaggagcagcctgcccagccgggccggcggcatgggcagcggcctggagatcatgctggacatccagcaggaggagtacctgcccatctggagggagaccaatgagaccagctttgaggccggcatccgggtgcagatccacagccaggaggagcccccctacatccaccagctgggcttcggcgtgtccccaggcttccagacctttgtgtcctgccaggagcagaggctgacctacctgccccagccctggggcaactgcagagctgagagcgagctgcgggagcctgagctgcagggctacagcgcctacagcgtgtctgcctgccgcctgcgctgtgagaaggaggccgtgctgcagcgctgccactgcaggatggtgcacatgccagacagcctgggcggcggccctgagggcccctgcttctgccccaccccctgcaacctgaccaggtatggcaaggagatctccatggtgcgcatccccaacagaggcagcgcccgctacctggccaggaagtacaacagaaatgagacctacatccgggagaacttcctggtgctggatgtgttctttgaggccctgaccagcgaggccatggagcagagagctgcctacggcctgagcgccctgctgggggacctgggcggccagatgggcctcttcatcggggccagcatcctgaccctgctggagatcctggactacatctatgaggtgtcctgggaccggctgaagagggtgtggaggcggcccaagacccccctgcggaccagcactggaggcatcagcaccctgggcctgcaggagctgaaggagcagagcccctgccccagccggggccgggtggagggcggcggcgtgagcagcctgctgcccaaccaccaccacccccacggccccccaggcggcctgtttgaagattttgcctgctag

SEQ ID NO: 143395 - DNA, 2001 bp, synthetic construct
  misc_feature 1..2001: note = Description of Artificial Sequence: Synthetic coding sequence
  source 1..2001: mol_type = other DNA
atgctgtctggagctgctggggccgcccggcggggcggggccgccctggcccccagcctgaccaggagcctggccggcacccatgctggagctgacagctgtgccggggctgacaagggcagccacaaggagaccatcgaggagcgggacaagaggcagcagaggcagcagaggcagaggcagcaccagggctgtggggccgccggcagcggcagtgacagccccaccagcggcccccaccctgtgcctgtgctcttccccctggccctgagcctggaggagcagcccctgccccccctgcccctgggccgggcccctggcctgctggcccgggagggccagggccgggaggccctggccagccccagcagccggggccagatgcccatcgagatcgtgtgcaagatcaagtttgctgaagaagatgccaagcccaaggagaaggaggccggagatgagcagagcctgctgggcgctgtggcccctggggccgccccccgggacctggccacctttgccagcaccagcaccctgcacggcctgggccgggcctgtggccctggcccccacggcctgcggaggaccctgtgggccctggccctgctgaccagcctggccgccttcctgtaccaggccgccggcctggcccggggctacctgacccggccccacctggtggccatggaccctgctgccccagcccctgtggccggcttccctgctgtgaccctgtgcaacatcaaccgcttccgccacagcgccctgagtgatgctgacatcttccacctggccaacctgaccggcctgccccccaaggacagagatggccacagagctgctggcctgcgctacccagagccagacatggtggacatcctgaacagaacaggccaccagctggccgacatgctgaagagctgcaacttcagcggccaccactgcagcgccagcaacttctctgtggtgtacaccaggtatggcaagtgctacaccttcaatgctgaccccaggagcagcctgcccagccgggccggcggcatgggcagcggcctggagatcatgctggacatccagcaggaggagtacctgcccatctggagggagaccaatgagaccagctttgaggccggcatccgggtgcagatccacagccaggaggagcccccctacatccaccagctgggcttcggcgtgtccccaggcttccagacctttgtgtcctgccaggagcagaggctgacctacctgccccagccctggggcaactgcagagctgagagcgagctgcgggagcctgagctgcagggctacagcgcctacagcgtgtctgcctgccgcctgcgctgtgagaaggaggccgtgctgcagcgctgccactgcaggatggtgcacatgcctggaaatgagaccatctgcccccccaacatctacattgaatgtgccgaccacaccctggacagcctgggcggcggccctgagggcccctgcttctgccccaccccctgcaacctgaccaggtatggcaaggagatctccatggtgcgcatccccaacagaggcagcgcccgctacctggccaggaagtacaacagaaatgagacctacatccgggagaacttcctggtgctggatgtgttctttgaggccctgaccagcgaggccatggagcagagagctgcctacggcctgagcgccctgctgggggacctgggcggccagatgggcctcttcatcggggccagcatcctgaccctgctggagatcctggactacatctatgaggtgtcctgggaccggctgaagagggtgtggaggcggcccaagacccccctgcggaccagcactggaggcatcagcaccctgggcctgcaggagctgaaggagcagagcccctgccccagccggggccgggtggagggcggcggcgtgagcagcctgctgcccaaccaccaccacccccacggccccccaggcggcctgtttgaggactttgcctgctag

SEQ ID NO: 143396 - DNA, 2271 bp, synthetic construct
  misc_feature 1..2271: note = Description of Artificial Sequence: Synthetic coding sequence
  source 1..2271: mol_type = other DNA
atgcacctgaagatcgtgctggccttcctggccctgagcctcatcaccatctttgccctggcctacgtgctgctgaccagccctgggggcagcagccagcccccccactgccccagcgtgagccaccgggcccagccctggccccaccctggccagagccagctgtttgctgacctgagccgggaggagctgacagctgtgatgaggttcctgacccagaggctgggccctggcctggtggatgctgcccaggcccagcccagcgacaactgcatcttctctgtggagctgcagctgccccccaaggccgccgccctggcccacctggaccggggcagccccccaccagcccgggaggccctggccatcgtgctgtttggaggccagccccagcccaacgtgtctgagctggtggtgggccccctgccccaccccagctacatgagagatgtgacagtggagcggcacggcggccccctgccctaccaccggcggcctgtgctgcgggcagagttcacccagatgtggaggcacctgaaggaggtggagctgcccaaggcccccatcttcctgagcagcaccttcaactacaacggcagcaccctggccgctgtgcacgccaccccccggggcctgcggagcggggaccgggccacctggatggccctgtaccacaacatcagcggcgtgggcctcttcctgcaccctgtgggcctggagctgctgctggaccaccgggccctggaccctgcccactggacagtgcagcaggtgttctacctgggccactactatgctgacctgggccagctggagcgggagttcaagagcggccgcctggaggtggtgcgggtgcccctgcccccaccaaatggagccagcagcctgcggagcaggaacagccctggccccctgccccccctgcagttcagcccccagggcagccagtacagcgtgcagggcaacctggtggtgagcagcctgtggagcttcacctttggacatggagtcttcagcggcctgcgcatctttgatgtgcgcttccagggcgagagaattgcctatgaggtgtctgtgcaggagtgtgtgtccatctacggggctgacagccccaagaccatgctgacccgctacctggacagcagctttggcctgggcaggaacagccggggcctggtgcggggcgtggactgcccctaccaggccaccatggtggacatccacatcctggtgggcaaaggagctgtgcagctgctgcccggggctgtgtgtgtgtttgaggaggcccagggcctgcccctgcggcggcaccacaactacctgcagaaccacttctacggcggcctggccagcagcgccctggtggtgcgctctgtgtcctctgtgggcaactatgactacatctgggactttgtgctgtaccccaacggggccctggagggccgggtgcacgccaccggctacatcaacacagccttcctgaagggcggggaggagggcctgctgtttggaaacagagtgggggagcgggtgctgggcaccgtgcacacccacgccttccacttcaagctggacctggatgtggccggcctgaagaactgggtggtggccgaggatgtggtgttcaagcctgtggccgccccctggaaccctgagcactggctgcagaggccccagctgacccggcaggtgctgggcaaggaggacctgacagccttcagcctgggcagccccctgccccgctacctgtacctggccagcaaccagaccaatgcctggggccaccagaggggctaccgcatccagatccacagccccctgggcatccacatccccctggagagtgacatggagcgggccctgtcctggggccgctaccagctggtggtgacccagaggaaggaggaggagagccagagcagcagcatctaccaccagaatgacatctggacccccaccgtgacctttgctgacttcatcaacaatgagaccctgctgggggaggacctggtggcctgggtgacagccagcttcctgcacatcccccatgctgaggacatccccaacacagtgaccctgggcaacagagtgggcttcctgctgcggccctacaacttctttgatgaggaccccagcatcttcagccctggctctgtgtactttgagaagggccaggatgctggcctgtgcagcatcaaccctgtggcctgcctgcctgacctggccgcctgtgtgcctgacctgccccccttctcctaccacggcttctag

SEQ ID NO: 143397 - DNA, 2190 bp, synthetic construct
  misc_feature 1..2190: note = Description of Artificial Sequence: Synthetic coding sequence
  source 1..2190: mol_type = other DNA
atgcacctgaagatcgtgctggccttcctggccctgagcctcatcaccatctttgccctggcctacgtgctgctgaccagccctgggggcagcagccagcccccccactgccccagcgtgagccaccgggcccagccctggccccaccctggccagagccagctgtttgctgacctgagccgggaggagctgacagctgtgatgaggttcctgacccagaggctgggccctggcctggtggatgctgcccaggcccagcccagcgacaactgcatcttctctgtggagctgcagctgccccccaaggccgccgccctggcccacctggaccggggcagccccccaccagcccgggaggccctggccatcgtgctgtttggaggccagccccagcccaacgtgtctgagctggtggtgggccccctgccccaccccagctacatgagagatgtgacagtggagcggcacggcggccccctgccctaccaccggcggcctgtgctgcgggcagagttcacccagatgtggaggcacctgaaggaggtggagctgcccaaggcccccatcttcctgagcagcaccttcaactacaacggcagcaccctggccgctgtgcacgccaccccccggggcctgcggagcggggaccgggccacctggatggccctgtaccacaacatcagcggcgtgggcctcttcctgcaccctgtgggcctggagctgctgctggaccaccgggccctggaccctgcccactggacagtgcagcaggtgttctacctgggccactactatgctgacctgggccagctggagcgggagttcaagagcggccgcctggaggtggtgcgggtgcccctgcccccaccaaatggagccagcagcctgcggagcaggaacagccctggccccctgccccccctgcagttcagcccccagggcagccagtacagcgtgcagggcaacctggtggtgagcagcctgtggagcttcacctttggacatggagtcttcagcggcctgcgcatctttgatgtgcgcttccagggcgagagaattgcctatgaggtgtctgtgcaggagtgtgtgtccatctacggggctgacagccccaagaccatgctgacccgctacctggacagcagctttggcctgggcaggaacagccggggcctggtgcggggcgtggactgcccctaccaggccaccatggtggacatccacatcctggtgggcaaaggagctgtgcagctgctgcccggggctgtgtgtgtgtttgaggaggcccagggcctgcccctgcggcggcaccacaactacctgcagaaccacttctacggcggcctggccagcagcgccctggtggtgcgctctgtgtcctctgtgggcaactatgactacatctgggactttgtgctgtaccccaacggggccctggagggccgggtgcacgccaccggctacatcaacacagccttcctgaagggcggggaggagggcctgctgtttggaaacagagtgggggagcgggtgctgggcaccgtgcacacccacgccttccacttcaagctggacctggatgtggccggcctgaagaactgggtggtggccgaggatgtggtgttcaagcctgtggccgccccctggaaccctgagcactggctgcagaggccccagctgacccggcaggtgctgggcaaggaggacctgacagccttcagcctgggcagccccctgccccgctacctgtacctggccagcaaccagaccaatgcctggggccaccagaggggctaccagctggtggtgacccagaggaaggaggaggagagccagagcagcagcatctaccaccagaatgacatctggacccccaccgtgacctttgctgacttcatcaacaatgagaccctgctgggggaggacctggtggcctgggtgacagccagcttcctgcacatcccccatgctgaggacatccccaacacagtgaccctgggcaacagagtgggcttcctgctgcggccctacaacttctttgatgaggaccccagcatcttcagccctggctctgtgtactttgagaagggccaggatgctggcctgtgcagcatcaaccctgtggcctgcctgcctgacctggccgcctgtgtgcctgacctgccccccttctcctaccacggcttctag

SEQ ID NO: 143398 - DNA, 2292 bp, synthetic construct
  misc_feature 1..2292: note = Description of Artificial Sequence: Synthetic coding sequence
  source 1..2292: mol_type = other DNA
atgaaccagaagaccatcctggtgctgctgatcctggccgtcatcaccatctttgccctggtgtgtgtgctgctggtgggcagaggaggagatggaggagagcccagccagctgccccactgccccagcgtgagccccagcgcccagccctggacccaccctggccagagccagctgtttgctgacctgagccgggaggagctgacagctgtgatgaggttcctgacccagaggctgggccctggcctggtggatgctgcccaggcccggcccagcgacaactgtgtgttttctgtggagctgcagctgccccccaaggccgccgccctggcccacctggaccggggcagccccccaccagcccgggaggccctggccatcgtgttcttcggccggcagccccagcccaacgtgtctgagctggtggtgggccccctgccccaccccagctacatgagagatgtgacagtggagcggcacggcggccccctgccctaccaccggcggcctgtgctcttccaggagtacctggacatcgaccagatgatcttcaaccgggagctgccccaggccagcggcctgctgcaccactgctgcttctacaagcaccggggcaggaacctggtgaccatgaccacagccccccggggcctgcagagcggggaccgggccacctggtttggcctgtactacaacatcagcggggccggcttcttcctgcaccacgtgggcctggagctgctggtgaaccacaaggccctggaccctgcccgctggaccatccagaaggtgttctaccagggccgctactatgacagcctggcccagctggaggcccagtttgaagctggcctggtgaatgtggtgctgatcccagacaatggcaccggcggctcctggagcctgaagagccctgtgcccccaggccctgccccacccctgcagttctacccccagggcccccgcttctctgtgcagggcagccgggtggccagcagcctgtggaccttctcctttggcctgggcgccttcagcggcccccgcatctttgatgtgcgcttccagggcgagcggctggtgtatgagatcagcctgcaggaggccctggccatctacggcggcaacagccctgctgccatgaccacccgctacgtggatggcggcttcggcatgggcaagtacaccacccccctgacccggggcgtggactgcccctacctggccacctacgtggactggcacttcctgctggagagccaggcccccaagaccatcagagatgccttctgtgtgtttgagcagaaccagggcctgcccctgcggcggcaccacagcgacctgtacagccactactttggaggcctggccgagaccgtgctggtggtgcgctccatgagcaccctgctgaactatgactatgtgtgggacacagtgttccaccccagcggggccatcgagatccgcttctacgccaccggctacatcagcagcgccttcctgtttggagccaccgggaagtatggcaaccaggtgtctgagcacaccctgggcaccgtgcacacccacagcgcccacttcaaggtggacctggatgtggccggcctggagaactgggtgtgggccgaggacatggtgtttgtgcccatggctgtgccctggagccctgagcaccagctgcagaggctgcaggtgaccaggaagctgctggagatggaggagcaggccgccttcctggtgggcagcgccaccccccgctacctgtacctggccagcaaccacagcaacaagtggggccacccccggggctaccgcatccagatgctgagctttgctggggagcccctgccccagaacagctccatggcccggggcttctcctgggagcgctaccagctggccgtgacccagaggaaggaggaggagcccagcagcagcagcgtcttcaaccagaatgacccctgggcccccaccgtggacttcagtgacttcatcaacaatgagaccatcgccggcaaggacctggtggcctgggtgacagctggcttcctgcacatcccccatgctgaggacatccccaacacagtgacagtgggcaatggagtgggcttcttcctgcggccctacaacttctttgatgaggaccccagcttctacagcgctgacagcatctacttccggggggaccaggatgctggggcctgtgaggtgaaccccctggcctgcctgccccaggccgccgcctgtgccccagacctgcctgccttcagccatggaggcttcagccacaactag

SEQ ID NO: 143399 - DNA, 939 bp, synthetic construct
  misc_feature 1..939: note = Description of Artificial Sequence: Synthetic coding sequence
  source 1..939: mol_type = other DNA
atggccaacaatgatgctgtgctgaagaggctggagcagaagggagctgaggccgaccagatcatcgagtacctgaagcagcaggtgtccctgctgaaggagaaggccatcctgcaggccaccctgcgggaggagaagaagctgcgggtggagaatgccaagctgaagaaggagattgaggagctgaagcaggagctgatccaggccgagatccagaatggagtgaagcagatccccttccccagcggcacccccctgcacgccaacagcatggtgtctgaaaatgtcatccagagcacagctgtgaccaccgtgagcagcggcaccaaggagcagatcaagggcggcactggagatgagaagaaggccaaggagaagattgagaagaagggggagaagaaggagaagaagcagcagagcattgctggcagcgctgacagcaagcccattgatgtgtcccggctggacctgagaattggctgcatcatcacagccaggaagcacccagatgctgacagcctgtatgtggaggaggtggatgtgggggagatcgcccccaggacagtggtgtctggcctggtgaaccacgtgcccctggagcagatgcagaacaggatggtgatcctgctgtgcaacctgaagccagccaagatgaggggcgtgctgagccaggccatggtgatgtgtgccagcagccctgagaagattgagatcctggcccccccaaatggatctgtgcctggggaccgcatcacctttgatgccttccctggagagccagacaaggagctgaaccccaagaagaagatctgggagcagatccagcctgacctgcacaccaatgatgaatgtgtggccacctacaagggcgtgccctttgaggtgaagggcaagggcgtgtgccgggcccagaccatgagcaacagcggcatcaagtag

SEQ ID NO: 143400 - DNA, 1011 bp, synthetic construct
  misc_feature 1..1011: note = Description of Artificial Sequence: Synthetic coding sequence
  source 1..1011: mol_type = other DNA
atgctgcctgctgtggccgtgtctgagcctgtggtgctgcgcttcatgatcttctgccgcctgctggccaagatggccaacaatgatgctgtgctgaagaggctggagcagaagggagctgaggccgaccagatcatcgagtacctgaagcagcaggtgtccctgctgaaggagaaggccatcctgcaggccaccctgcgggaggagaagaagctgcgggtggagaatgccaagctgaagaaggagattgaggagctgaagcaggagctgatccaggccgagatccagaatggagtgaagcagatccccttccccagcggcacccccctgcacgccaacagcatggtgtctgaaaatgtcatccagagcacagctgtgaccaccgtgagcagcggcaccaaggagcagatcaagggcggcactggagatgagaagaaggccaaggagaagattgagaagaagggggagaagaaggagaagaagcagcagagcattgctggcagcgctgacagcaagcccattgatgtgtcccggctggacctgagaattggctgcatcatcacagccaggaagcacccagatgctgacagcctgtatgtggaggaggtggatgtgggggagatcgcccccaggacagtggtgtctggcctggtgaaccacgtgcccctggagcagatgcagaacaggatggtgatcctgctgtgcaacctgaagccagccaagatgaggggcgtgctgagccaggccatggtgatgtgtgccagcagccctgagaagattgagatcctggcccccccaaatggatctgtgcctggggaccgcatcacctttgatgccttccctggagagccagacaaggagctgaaccccaagaagaagatctgggagcagatccagcctgacctgcacaccaatgatgaatgtgtggccacctacaagggcgtgccctttgaggtgaagggcaagggcgtgtgccgggcccagaccatgagcaacagcggcatcaagtag

SEQ ID NO: 143401 - DNA, 810 bp, synthetic construct
  misc_feature 1..810: note = Description of Artificial Sequence: Synthetic coding sequence
  source 1..810: mol_type = other DNA
atggccaacaatgatgctgtgctgaagaggctggagcagaagggagctgaggccgaccagatcatcgagtacctgaagcagcaggtgtccctgctgaaggagaaggccatcctgcaggccaccctgcgggaggagaagaagctgcgggtggagaatgccaagctgaagaaggagattgaggagctgaagcaggagctgatccaggccgagatccagaatggagtgaagcagatccccttccccagcggcacccccctgcacgccaacagcatggtgtctgaaaatgtcatccagagcacagctgtgaccaccgtgagcagcggcaccaaggagcagatcaagggcggcactggagatgagaagaaggccaaggagaagattgagaagaagggggagaagaaggagaagaagcagcagagcatcgcccccaggacagtggtgtctggcctggtgaaccacgtgcccctggagcagatgcagaacaggatggtgatcctgctgtgcaacctgaagccagccaagatgagaggagtgctgagccaggccatggtgatgtgtgccagcagccctgagaagattgagatcctggccccacccaacggctctgtgcctggggaccgcatcacctttgatgccttccctggagagccagacaaggagctgaaccccaagaagaagatctgggagcagatccagcctgacctgcacaccaatgatgaatgtgtggccacctacaagggcgtgccctttgaggtgaagggcaaaggagtgtgccgggcccagaccatgagcaacagcggcatcaagtag

SEQ ID NO: 143402 - DNA, 939 bp, synthetic construct; identical to SEQ ID NO: 143399
  misc_feature 1..939: note = Description of Artificial Sequence: Synthetic coding sequence
  source 1..939: mol_type = other DNA

SEQ ID NO: 143403 - DNA, 453 bp, synthetic construct
  misc_feature 1..453: note = Description of Artificial Sequence: Synthetic coding sequence
  source 1..453: mol_type = other DNA
atggccaacaatgatgctgtgctgaagaggctggagcagaagggagctgaggccgaccagatcatcgagtacctgaagcagcaggtgtccctgctgaaggagaaggccatcctgcaggccaccctgcgggaggagaagaagctgcgggtggagaatgccaagctgaagaaggagattgaggagctgaagcaggagctgatccaggccgagatccagaatggagtgaagcagatccccttccccagcggcacccccctgcacgccaacagcatggtgtctgaaaatgtcatccagagcacagctgtgaccaccgtgagcagcggcaccaaggagcagatcaagggcggcactggagatgagaagaaggccaaggagaagattgagaagaagggggagaagaaggagaagaagcagcagagcattgctggcagcgctgacagcaagcccatctag

SEQ ID NO: 143404 - DNA, 1227 bp, synthetic construct
  misc_feature 1..1227: note = Description of Artificial Sequence: Synthetic coding sequence
  source 1..1227: mol_type = other DNA
atgaccagcaagggccctgaggaggagcaccccagcgtgaccctcttccggcagtacctgcgcatcagaacagtgcagcccaagccagactatggagctgctgtggccttctttgaggagacagcccggcagctgggcctgggctgccagaaggtggaggtggcccctggctacgtggtgacagtgctgacctggccaggcaccaaccccaccctgagcagcatcctgctgaacagccacacagatgtggtgcctgtgttcaaggagcactggagccatgacccctttgaggccttcaaggacagcgagggctacatctatgcccggggggcccaggacatgaagtgtgtgtccatccagtacctggaggccgtgcggcggctgaaggtggagggccaccgcttccccaggaccatccacatgacctttgtgcctgatgaggaggtgggcggccaccagggcatggagctgtttgtgcagaggcctgagttccacgccctgcgggccggctttgccctggatgagggcatcgccaaccccacagatgccttcaccgtcttctacagcgagaggagcccctggtgggtgcgggtgaccagcacaggccggcccggccacgccagccgcttcatggaggacacagctgctgagaagctgcacaaggtggtgaacagcatcctggccttccgggagaaggagtggcagaggctgcagagcaacccccacctgaaggagggctctgtgacctctgtgaacctgaccaagctggagggcggcgtggcctacaacgtcatcccagccaccatgtctgccagctttgacttccgggtggccccagatgtggacttcaaggcctttgaggagcagctgcagagctggtgccaggccgccggggagggcgtgaccctggagtttgcccagaagtggatgcacccccaggtgacccccacagatgacagcaacccctggtgggccgccttcagccgggtgtgcaaggacatgaacctgaccctggagcctgagatcatgcctgctgccacagacaaccgctacatccgggctgtgggcgtgcctgccctgggcttcagccccatgaacagaacacctgtgctgctgcatgaccatgatgagcggctgcacgaggccgtgttcctgcggggcgtggacatctacacccggctgctgcctgccctggcctctgtgcctgccctgcccagcgacagctag

SEQ ID NO: 143405 - DNA, 1497 bp, synthetic construct
  misc_feature 1..1497: note = Description of Artificial Sequence: Synthetic coding sequence
  source 1..1497: mol_type = other DNA
atgtggggctgccaggcccccctgagccggctgcctgccagcggggagacccccatgagccagagctggctggtgagccccctggccacccggcccagcttcaccgcccgctgcagccacagcaccaggcacacaggctggcgctggtgctgcttcatggagcggcccctgaccctgacccggggcagctcctgggcccactgcagctactgccacagaggagccaccggcccctggcccctgaccttccagctgaccaccaggtctgccatgaccagcaagggccctgaggaggagcaccccagcgtgaccctcttccggcagtacctgcgcatcagaacagtgcagcccaagccagactatggagctgctgtggccttctttgaggagacagcccggcagctgggcctgggctgccagaaggtggaggtggcccctggctacgtggtgacagtgctgacctggccaggcaccaaccccaccctgagcagcatcctgctgaacagccacacagatgtggtgcctgtgttcaaggagcactggagccatgacccctttgaggccttcaaggacagcgagggctacatctatgcccggggggcccaggacatgaagtgtgtgtccatccagtacctggaggccgtgcggcggctgaaggtggagggccaccgcttccccaggaccatccacatgacctttgtgcctgatgaggaggtgggcggccaccagggcatggagctgtttgtgcagaggcctgagttccacgccctgcgggccggctttgccctggatgagggcatcgccaaccccacagatgccttcaccgtcttctacagcgagaggagcccctggtgggtgcgggtgaccagcacaggccggcccggccacgccagccgcttcatggaggacacagctgctgagaagctgcacaaggtggtgaacagcatcctggccttccgggagaaggagtggcagaggctgcagagcaacccccacctgaaggagggctctgtgacctctgtgaacctgaccaagctggagggcggcgtggcctacaacgtcatcccagccaccatgtctgccagctttgacttccgggtggccccagatgtggacttcaaggcctttgaggagcagctgcagagctggtgccaggccgccggggagggcgtgaccctggagtttgcccagaagtggatgcacccccaggtgacccccacagatgacagcaacccctggtgggccgccttcagccgggtgtgcaaggacatgaacctgaccctggagcctgagatcatgcctgctgccacagacaaccgctacatccgggctgtgggcgtgcctgccctgggcttcagccccatgaacagaacacctgtgctgctgcatgaccatgatgagcggctgcacgaggccgtgttcctgcggggcgtggacatctacacccggctgctgcctgccctggcctctgtgcctgccctgcccagcgacagctag

SEQ ID NO: 143406 - DNA, 1122 bp, synthetic construct
  misc_feature 1..1122: note = Description of Artificial Sequence: Synthetic coding sequence
  source 1..1122: mol_type = other DNA
atgaccagcaagggccctgaggaggagcaccccagcgtgaccctcttccggcagtacctgcgcatcagaacagtgcagcccaagccagactatggcaccaaccccaccctgagcagcatcctgctgaacagccacacagatgtggtgcctgtgttcaaggagcactggagccatgacccctttgaggccttcaaggacagcgagggctacatctatgcccggggggcccaggacatgaagtgtgtgtccatccagtacctggaggccgtgcggcggctgaaggtggagggccaccgcttccccaggaccatccacatgacctttgtgcctgatgaggaggtgggcggccaccagggcatggagctgtttgtgcagaggcctgagttccacgccctgcgggccggctttgccctggatgagggcatcgccaaccccacagatgccttcaccgtcttctacagcgagaggagcccctggtgggtgcgggtgaccagcacaggccggcccggccacgccagccgcttcatggaggacacagctgctgagaagctgcacaaggtggtgaacagcatcctggccttccgggagaaggagtggcagaggctgcagagcaacccccacctgaaggagggctctgtgacctctgtgaacctgaccaagctggagggcggcgtggcctacaacgtcatcccagccaccatgtctgccagctttgacttccgggtggccccagatgtggacttcaaggcctttgaggagcagctgcagagctggtgccaggccgccggggagggcgtgaccctggagtttgcccagaagtggatgcacccccaggtgacccccacagatgacagcaacccctggtgggccgccttcagccgggtgtgcaaggacatgaacctgaccctggagcctgagatcatgcctgctgccacagacaaccgctacatccgggctgtgggcgtgcctgccctgggcttcagccccatgaacagaacacctgtgctgctgcatgaccatgatgagcggctgcatgaagctgtgttcctgcggggcgtggacatctacacccggctgctgcctgccctggcctctgtgcctgccctgcccagcgacagctag

SEQ ID NO: 143407 - DNA, 1032 bp, synthetic construct
  misc_feature 1..1032: note = Description of Artificial Sequence: Synthetic coding sequence
  source 1..1032: mol_type = other DNA
atgaccagcaagggccctgaggaggagcaccccagcgtgaccctcttccggcagtacctgcgcatcagaacagtgcagcccaagccagactatggagctgctgtggccttctttgaggagacagcccggcagctgggcctgggctgccagaaggtggaggtggcccctggctacgtggtgacagtgctgacctggccaggcaccaaccccaccctgagcagcatcctgctgaacagccacacagatgtggtgcctgtgttcaaggagcactggagccatgacccctttgaggccttcaaggacagcgagggctacatctatgcccggggggcccaggacatgaagtgtgtgtccatccagtacctggaggccgtgcggcggctgaaggtggagggccaccgcttccccaggaccatccacatgacctttgtgcctgatgaggaggtgggcggccaccagggcatggagctgtttgtgcagaggcctgagttccacgccctgcgggccggctttgccctggatgagggcatcgccaaccccacagatgccttcaccgtcttctacagcgagaggagcccctggtgggtgcgggtgaccagcacaggccggcccggccacgccagccgcttcatggaggacacagctgctgagaagctggcctttgaggagcagctgcagagctggtgccaggccgccggggagggcgtgaccctggagtttgcccagaagtggatgcacccccaggtgacccccacagatgacagcaacccctggtgggccgccttcagccgggtgtgcaaggacatgaacctgaccctggagcctgagatcatgcctgctgccacagacaaccgctacatccgggctgtgggcgtgcctgccctgggcttcagccccatgaacagaacacctgtgctgctgcatgaccatgatgagcggctgcatgaagctgtgttcctgcggggcgtggacatctacacccggctgctgcctgccctggcctctgtgcctgccctgcccagcgacagctag

SEQ ID NO: 143408 - DNA, 1011 bp, synthetic construct
  misc_feature 1..1011: note = Description of Artificial Sequence: Synthetic coding sequence
  source 1..1011: mol_type = other DNA
atgaccagcaagggccctgaggaggagcaccccagcgtgaccctcttccggcagtacctgcgcatcagaacagtgcagcccaagccagactatggagctgctgtggccttctttgaggagacagcccggcagctgggcctgggctgccagaaggtggaggtggcccctggctacgtggtgacagtgctgacctggccaggcaccaaccccaccctgagcagcatcctgctgaacagccacacagatgtggtgcctgtgttcaaggagcactggagccatgacccctttgaggccttcaaggacagcgagggcatcgccaaccccacagatgccttcaccgtcttctacagcgagaggagcccctggtgggtgcgggtgaccagcacaggccggcccggccacgccagccgcttcatggaggacacagctgctgagaagctgcacaaggtggtgaacagcatcctggccttccgggagaaggagtggcagaggctgcagagcaacccccacctgaaggagggctctgtgacctctgtgaacctgaccaagctggagggcggcgtggcctacaacgtcatcccagccaccatgtctgccagctttgacttccgggtggccccagatgtggacttcaaggcctttgaggagcagctgcagagctggtgccaggccgccggggagggcgtgaccctggagtttgcccagaagtggatgcacccccaggtgacccccacagatgacagcaacccctggtgggccgccttcagccgggtgtgcaaggacatgaacctgaccctggagcctgagatcatgcctgctgccacagacaaccgctacatccgggctgtgggcgtgcctgccctgggcttcagccccatgaacagaacacctgtgctgctgcatgaccatgatgagcggctgcacgaggccgtgttcctgcggggcgtggacatctacacccggctgctgcctgccctggcctctgtgcctgccctgcccagcgacagctag

SEQ ID NO: 143409 - DNA, 1278 bp, synthetic construct
  misc_feature 1..1278: note = Description of Artificial Sequence: Synthetic coding sequence
  source 1..1278: mol_type = other DNA
atgaactatgcccgcttcatcacagctgccagcgctgccaggaaccccagccccatccgcaccatgacagacatcctgagccggggccccaagtccatgatcagcctggccggcggcctgcccaaccccaacatgttccccttcaagacagctgtgatcaccgtggagaatggcaagaccatccagtttggagaggagatgatgaagagggccctgcagtacagccccagcgctggcatccctgagctgctgtcctggctgaagcagctgcagatcaagctgcacaacccccccaccatccactacccacccagccagggccagatggacctgtgtgtgaccagcggcagccagcagggcctgtgcaaggtgtttgagatgatcatcaaccctggggacaacgtgctgctggatgagcccgcctacagcggcaccctgcagagcctgcaccccctgggctgcaacatcatcaacgtggccagtgatgagagcggcatcgtgcctgacagcctgcgggacatcctgagccgctggaagccagaagatgccaagaacccccagaagaacacccccaagttcctgtacacagtgcccaatggaaacaaccccaccggcaacagcctgaccagcgagaggaagaaggagatctatgagctggccaggaaatatgacttcctgatcattgaagatgacccctactacttcctgcagttcaacaagttccgggtgcccaccttcctgtccatggatgtggatggccgggtcatccgggctgacagcttcagcaagatcatcagcagcggcctgagaattggcttcctgaccggccccaagcccctgattgaaagagtcatcctgcacatccaggtgtccaccctgcaccccagcaccttcaaccagctgatgatcagccagctgctgcacgagtggggcgaggagggcttcatggcccacgtggacagagtgattgacttctacagcaaccagaaggatgccatcctggccgctgctgacaagtggctgaccggcctggccgagtggcacgtgcctgctgctggcatgttcctgtggatcaaggtgaagggcatcaatgatgtgaaggagctgattgaggagaaggctgtgaagatgggcgtgctgatgctgcctggaaatgccttctacgtggacagcagcgcccccagcccctacctgcgggccagcttcagcagcgccagccctgagcagatggatgtggccttccaggtgctggcccagctgatcaaggagagcctgtag

SEQ ID NO: 143410 - DNA, 1278 bp, synthetic construct; identical to SEQ ID NO: 143409
  misc_feature 1..1278: note = Description of Artificial Sequence: Synthetic coding sequence
  source 1..1278: mol_type = other DNA

SEQ ID NO: 143411 - DNA, 543 bp, synthetic construct
  misc_feature 1..543: note = Description of Artificial Sequence: Synthetic coding sequence
  source 1..543: mol_type = other DNA
atgaactatgcccgcttcatcacagctgccagcgctgccaggaaccccagccccatccgcaccatgacagacatcctgagccggggccccaagtccatgatcagcctggccggcggcctgcccaaccccaacatgttccccttcaagacagctgtgatcaccgtggagaatggcaagaccatccagtttggagaggagatgatgaagagggccctgcagtacagccccagcgctggcatccctgagctgctgtcctggctgaagcagctgcagatcaagctgcacaacccccccaccatccactacccacccagccagggccagatggacctgtgtgtgaccagcggcagccagcagggcctgtgcaaggtgtttgagatgatcatcaaccctggggacaacgtgctgctggatgagcccgcctacagcggcaccctgcagagcctgcaccccctgggctgcaacatcatcaacgtggccagtgatgagagcggcatcgtgcctgacagcctgcgggacatcctgagccgctggaagccctag

SEQ ID NO: 143412 - DNA, 630 bp, synthetic construct
  misc_feature 1..630: note = Description of Artificial Sequence: Synthetic coding sequence
  source 1..630: mol_type = other DNA
atgaactatgcccgcttcatcacagctgccagcgctgccaggaaccccagccccatccgcaccatgacagacatcctgagccggggccccaagtccatgatcagcctggccggcggcctgcccaaccccaacatgttccccttcaagacagctgtgatcaccgtggagaatggcaagaccatccagtttggagaggagatgatgaagagggccctgcagtacagccccagcgctggcatccctgagctgctgtcctggctgaagcagctgcagatcaagctgcacaacccccccaccatccactacccacccagccagggccagatggacctgtgtgtgaccagcggcagccagcagggcctgtgcaaggtgtttgagatgatcatcaaccctggggacaacgtgctgctggatgagcccgcctacagcggcaccctgcagagcctgcaccccctgggctgcaacatcatcaacgtggccagtgatgagagcggcatcgtgcctgacagcctgcgggacatcctgagccgctggaagccagaagatgccaagaacccccagaagaacacccccaagttcctgtacacagtgcccaatggaaacaaccccaccggcaacagcctgacctag

SEQ ID NO: 143413 - DNA, 1290 bp, synthetic construct
  misc_feature 1..1290: note = Description of Artificial Sequence: Synthetic coding sequence
  source 1..1290: mol_type = other DNA
atgaactatgcccgcttcatcacagctgccagcgctgccaggaaccccagccccatccgcaccatgtctgagaagagagctgacatcctgagccggggccccaagtccatgatcagcctggccggcggcctgcccaaccccaacatgttccccttcaagacagctgtgatcaccgtggagaatggcaagaccatccagtttggagaggagatgatgaagagggccctgcagtacagccccagcgctggcatccctgagctgctgtcctggctgaagcagctgcagatcaagctgcacaacccccccaccatccactacccacccagccagggccagatggacctgtgtgtgaccagcggcagccagcagggcctgtgcaaggtgtttgagatgatcatcaaccctggggacaacgtgctgctggatgagcccgcctacagcggcaccctgcagagcctgcaccccctgggctgcaacatcatcaacgtggccagtgatgagagcggcatcgtgcctgacagcctgcgggacatcctgagccgctggaagccagaagatgccaagaacccccagaagaacacccccaagttcctgtacacagtgcccaatggaaacaaccccaccggcaacagcctgaccagcgagaggaagaaggagatctatgagctggccaggaaatatgacttcctgatcattgaagatgacccctactacttcctgcagttcaacaagttccgggtgcccaccttcctgtccatggatgtggatggccgggtcatccgggctgacagcttcagcaagatcatcagcagcggcctgagaattggcttcctgaccggccccaagcccctgattgaaagagtcatcctgcacatccaggtgtccaccctgcaccccagcaccttcaaccagctgatgatcagccagctgctgcacgagtggggcgaggagggcttcatggcccacgtggacagagtgattgacttctacagcaaccagaaggatgccatcctggccgctgctgacaagtggctgaccggcctggccgagtggcacgtgcctgctgctggcatgttcctgtggatcaaggtgaagggcatcaatgatgtgaaggagctgattgaggagaaggctgtgaagatgggcgtgctgatgctgcctggaaatgccttctacgtggacagcagcgcccccagcccctacctgcgggccagcttcagcagcgccagccctgagcagatggatgtggccttccaggtgctggcccagctgatcaaggagagcctgtag

SEQ ID NO: 143414 - DNA, 1278 bp, synthetic construct; identical to SEQ ID NO: 143409
  misc_feature 1..1278: note = Description of Artificial Sequence: Synthetic coding sequence
  source 1..1278: mol_type = other DNA

SEQ ID NO: 143415 - DNA, 621 bp, synthetic construct
  misc_feature 1..621: note = Description of Artificial Sequence: Synthetic coding sequence
  source 1..621: mol_type = other DNA
atggcccccagccacctgtctgtgcgggagatgagagaagatgagaagcccctggtgctggagatgctgaaggccggcgtgaaggacacagaaaatagagtggccctgcacgccctgacccggcccccagccctgctgctgctggccgccgccagcagcggcctgcgctttgtgctggccagctttgccctggccctgctgctgcctgtgttcctggccgtggccgctgtgaagctgggcctgcgggcccgctggggcagcctgcccccacctgggggcctgggcggcccctgggtggccgtgcggggcagcggagatgtgtgtggggtgctggccctggcccctggcaccaatgctggagatggagcccgggtgacccggctgtctgtgagccgctggcacagaagaagaggagtgggccgccgcctgctggcctttgctgaggcccgggcccgggcctgggccggcggcatgggagagccccgggcccggctggtggtgcctgtggccgtggccgcctggggcgtgggcggcatgctggagggctgcggctaccaggccgagggcggctggggctgcctgggctacaccctggtgcgggagttcagcaaggacctgtag

SEQ ID NO: 143416 - DNA, 1842 bp, synthetic construct
  misc_feature 1..1842: note = Description of Artificial Sequence: Synthetic coding sequence
  source 1..1842: mol_type = other DNA
atggtgtccaaggatgcctctgtgaaggagtacatcttcaaggagctgcagaagtacctgcccagccatgctgtgcctgatgagctggtgctgattgacagcctgcccttcaccagccacggcaagattgatgtgtctgagctgaacaagatctacctgaactacatcaacctgaagtctgagaacaagctgagcggcaaggaggacctgtgggagaagctgcagtacctgtggaagagcaccctgaacctgcctgaggacctgctgcgggtgcctgatgagagcctcttcctgaacagcggcggggacagcctgaagagcatccggctgctgtctgaaattgagaagctggtgggcacctctgtgcccggcctgctggagatcatcctgagcagcagcatcctggagatctacaaccacatcctgcagacagtggtgcctgatgaagatgtgaccttcaggaagagctgtgccaccaagaggaagctgagtgacatcaaccaggaggaggccagcggcaccagcctgcaccagaaggccatcatgaccttcacctgccacaatgagatcaatgcctttgtggtgctgagccggggcagccagatcctgagcctgaacagcacccgcttcctgaccaagctgggccactgcagcagcgcctgccccagcgacagcgtgtcccagaccaacatccagaacctgaagggcctgaacagccctgtgctgattggcaagagcaaggaccccagctgtgtggccaaggtgtctgaggagggcaagccagccatcggcacccagaagatggagctgcacgtgcgctggaggagtgacacaggaaaatgtgtggatgccagccccctggtggtgatccccacctttgacaagagcagcaccaccgtgtacatcggcagccacagccacaggatgaaggctgtggacttctacagcggcaaggtgaagtgggagcagatcctgggggacagaattgagagcagcgcctgtgtgtccaaatgtggcaacttcatcgtggtgggctgctacaacggcctggtgtatgtgctgaagagcaacagcggggagaagtactggatgttcaccacagaagatgctgtgaagagcagcgccaccatggaccccaccaccggcctcatctacatcggcagccatgaccagcacgcctatgccctggacatctacaggaagaagtgtgtgtggaagagcaaatgtggcggcaccgtcttcagcagcccctgcctgaacctgatcccccaccacctgtactttgccaccctgggcggcctgctgctggccgtgaacccagccactggaaatgtcatctggaagcacagctgtgggaagcccctcttcagcagcccccagtgctgcagccagtacatctgcatcggctgtgtggatggcaacctgctgtgcttcacccactttggagagcaggtgtggcagttcagcaccagcggccccatcttcagcagcccctgcaccagccccagcgagcagaagatcttcttcggcagccatgactgcttcatctactgctgcaacatgaagggccacctgcagtggaagtttgagaccaccagccgggtgtatgccaccccatttgccttccacaactacaacggcagcaatgagatgctgctggccgccgccagcacagatggcaaggtgtggatcctggagagccagagcggccagctgcagagcgtgtatgagctgcctggagaggtgttcagcagccctgtggtgctggagagcatgctgatcatcggctgccgggacaactacgtgtactgcctggacctgctgggcggcaaccagaagtag

SEQ ID NO: 143417 - DNA, 2574 bp, synthetic construct
  misc_feature 1..2574: note = Description of Artificial Sequence: Synthetic coding sequence
  source 1..2574: mol_type = other DNA
atgaccctgcaggagctggtgcacaaggccgccagctgctacatggacagagtggccgtgtgctttgatgagtgcaacaaccagctgcctgtgtactacacctacaagacagtggtgaatgctgccagcgagctgagcaacttcctgctgctgcactgtgacttccagggcatccgggagatcggcctgtactgccagcccggcatcgacctgcccagctggatcctgggcatcctgcaggtgcctgctgcctacgtgcccatcgagccagacagcccccccagcctgagcacccacttcatgaagaagtgcaacctgaagtacatcctggtggagaagaagcagatcaacaagttcaagagcttccacgagaccctgctgaactatgacaccttcaccgtggagcacaatgacctggtgctcttccggctgcactggaagaacacagaggtgaacctgatgctgaatgatggcaaggagaagtatgagaaggagaagatcaagagcatcagcagcgagcacgtgaatgaggagaaggccgaggagcacatggacctgcggctgaagcactgcctggcctacgtgctgcacaccagcggcaccaccggcatccccaagatcgtgcgggtgccccacaagtgcatcgtgcccaacatccagcacttccgggtgctgtttgacatcacccaggaggatgtgctcttcctggccagccccctgacctttgaccccagcgtggtggagatcttcctggccctgagcagcggggccagcctgctgattgtgcccacctctgtgaagctgctgcccagcaagctggcctctgtgctcttcagccaccaccgggtgacagtgctgcaggccacccccaccctgctgcggcgcttcggcagccagctgatcaagagcacagtgctgagcgccaccaccagcctgcgggtgctggccctgggcggggaggccttccccagcctgactgtgctgcgctcctggagaggagagggcaacaagacccagatcttcaacgtgtatggcatcacagaggtgtcctcctgggccaccatctaccgcatccctgagaagaccctgaacagcaccctgaagtgtgagctgcctgtgcagctgggcttccccctgctgggcaccgtggtggaggtgcgggacaccaacggcttcaccatccaggagggcagcggccaggtgttcctgggcggcaggaacagagtgtgcttcctggatgatgaggtgacagtgcccctgggcaccatgagggccaccggggactttgtgacagtgaaggatggagagatcttcttcctgggcaggaaggacagccagatcaagagacatggcaagaggctgaacatcgagctggtgcagcaggtggccgaggagctgcagcaggtggagagctgtgctgtgacctggtacaaccaggagaagctgatcctcttcatggtgtccaaggatgcctctgtgaaggagtacatcttcaaggagctgcagaagtacctgcccagccatgctgtgcctgatgagctggtgctgattgacagcctgcccttcaccagccacggcaagattgatgtgtctgagctgaacaagatctacctgaactacatcaacctgaagtctgagaacaagctgagcggcaaggaggacctgtgggagaagctgcagtacctgtggaagagcaccctgaacctgcctgaggacctgctgcgggtgcctgatgagagcctcttcctgaacagcggcggggacagcctgaagagcatccggctgctgtctgaaattgagaagctggtgggcacctctgtgcccggcctgctggagatcatcctgagcagcagcatcctggagatctacaaccacatcctgcagacagtggtgcctgatgaagatgtgaccttcaggaagagctgtgccaccaagaggaagctgagtgacatcaaccaggaggaggccagcggcaccagcctgcaccagaaggccatcatgaccttcacctgccacaatgagatcaatgcctttgtggtgctgagccggggcagccagatcctgagcctgaacagcacccgcttcctgaccaagctgggccactgcagcagcgcctgccccagcgacagcgtgtcccagaccaacatccagaacctgaagggcctgaacagccctgtgctgattggcaagagcaaggaccccagctgtgtggccaaggtgtctgaggagggcaagccagccatcggcacccagaagatggagctgcacgtgcgctggaggagtgacacaggaaaatgtgtggatgccagccccctggtggtgatccccacctttgacaagagcagcaccaccgtgtacatcggcagccacagccacaggatgaaggctgtggacttctacagcggcaaggtgaagtgggagcagatcctgggggaccgcatcgagagcagcgcctgtgtgtccaaatgtggcaacttcatcgtggtgggcctggccgtgctgtaccagtggaccaacctcttcatccctgtgtacctgaccatccgggccaagaacatcttctggttcccctag

SEQ ID NO: 143418 - DNA, 2526 bp, synthetic construct
  misc_feature 1..2526: note = Description of Artificial Sequence: Synthetic coding sequence
  source 1..2526: mol_type = other DNA
atgaccctgcaggagctggtgcacaaggccgccagctgctacatggacagagtggccgtgtgctttgatgagtgcaacaaccagctgcctgtgtactacacctacaagacagtggtgaatgctgccagcgagctgagcaacttcctgctgctgcactgtgacttccagggcatccgggagatcggcctgtactgccagcccggcatcgacctgcccagctggatcctgggcatcctgcaggtgcctgctgcctacgtgcccatcgagccagacagcccccccagcctgagcacccacttcatgaagaagtgcaacctgaagtacatcctggtggagaagaagcagatcaacaagttcaagagcttccacgagaccctgctgaactatgacaccttcaccgtggagcacaatgacctggtgctcttccggctgcactggaagaacacagaggtgaacctgatgctgaatgatggcaaggagaagtatgagaaggagaagatcaagagcatcagcagcgagcacgtgaatgaggagaaggccgaggagcacatggacctgcggctgaagcactgcctggcctacgtgctgcacaccagcggcaccaccggcatccccaagatcgtgcgggtgccccacaagtgcatcgtgcccaacatccagcacttccgggtgctgtttgacatcacccaggaggatgtgctcttcctggccagccccctgacctttgaccccagcgtggtggagatcttcctggccctgagcagcggggccagcctgctgattgtgcccacctctgtgaagctgctgcccagcaagctggcctctgtgctcttcagccaccaccgggtgacagtgctgcaggccacccccaccctgctgcggcgcttcggcagccagctgatcaagagcacagtgctgagcgccaccaccagcctgcgggtgctggccctgggcggggaggccttccccagcctgactgtgctgcgctcctggagaggagagggcaacaagacccagatcttcaacgtgtatggcatcacagaggtgtcctcctgggccaccatctaccgcatccctgagaagaccctgaacagcaccctgaagtgtgagctgcctgtgcagctgggcttccccctgctgggcaccgtggtggaggtgcgggacaccaacggcttcaccatccaggagggcagcggccaggtgttcctgggcggcaggaacagagtgtgcttcctggatgatgaggtgacagtgcccctgggcaccatgagggccaccggggactttgtgacagtgaaggatggagagatcttcttcctgggcaggaaggacagccagatcaagagacatggcaagaggctgaacatcgagctggtgcagcaggtggccgaggagctgcagcaggtggagagctgtgctgtgacctggtacaaccaggagaagctgatcctcttcatggtgtccaaggatgcctctgtgaaggagtacatcttcaaggagctgcagaagtacctgcccagccatgctgtgcctgatgagctggtgctgattgacagcctgcccttcaccagccacggcaagattgatgtgtctgagctgaacaagatctacctgaactacatcaacctgaagtctgagaacaagctgagcggcaaggaggacctgtgggagaagctgcagtacctgtggaagagcaccctgaacctgcctgaggacctgctgcgggtgcctgatgagagcctcttcctgaacagcggcggggacagcctgaagagcatccggctgctgtctgaaattgagaagctggtgggcacctctgtgcccggcctgctggagatcatcctgagcagcagcatcctggagatctacaaccacatcctgcagacagtggtgcctgatgaagatgtgaccttcaggaagagctgtgccaccaagaggaagctgagtgacatcaaccaggaggaggccagcggcaccagcctgcaccagaaggccatcatgaccttcacctgccacaatgagatcaatgcctttgtggtgctgagccggggcagccagatcctgagcctgaacagcacccgcttcctgaccaagctgggccactgcagcagcgcctgccccagcgacagcgtgtcccagaccaacatccagaacctgaagggcctgaacagccctgtgctgattggcaagagcaaggaccccagctgtgtggccaaggtgtctgaggagggcaagccagccatcggcacccagaagatggagctgcacgtgcgctggaggagtgacacaggaaaatgtgtggatgccagccccctggtggtgatccccacctttgacaagagcagcaccaccgtgtacatcggcagccacagccacaggatgaaggctgtggacttctacagcggcaaggtgaagtgggagcagatcctgggggaccgcatcgagagcagcgcctgtgtgtccaaatgtggcaacttcatcgtggtgggcaagttcctgaacctgcgctttgtggagctgaactag

SEQ ID NO: 143419 - DNA, 2997 bp, synthetic construct
  misc_feature 1..2997: note = Description of Artificial Sequence: Synthetic coding sequence
  source 1..2997: mol_type = other DNA
atgaagaagtgcaacctgaagtacatcctggtggagaagaagcagatcaacaagttcaagagcttccacgagaccctgctgaactatgacaccttcaccgtggagcacaatgacctggtgctcttccggctgcactggaagaacacagaggtgaacctgatgctgaatgatggcaaggagaagtatgagaaggagaagatcaagagcatcagcagcgagcacgtgaatgaggagaaggccgaggagcacatggacctgcggctgaagcactgcctggcctacgtgctgcacaccagcggcaccaccggcatccccaagatcgtgcgggtgccccacaagtgcatcgtgcccaacatccagcacttccgggtgctgtttgacatcacccaggaggatgtgctcttcctggccagccccctgacctttgaccccagcgtggtggagatcttcctggccctgagcagcggggccagcctgctgattgtgcccacctctgtgaagctgctgcccagcaagctggcctctgtgctcttcagccaccaccgggtgacagtgctgcaggccacccccaccctgctgcggcgcttcggcagccagctgatcaagagcacagtgctgagcgccaccaccagcctgcgggtgctggccctgggcggggaggccttccccagcctgactgtgctgcgctcctggagaggagagggcaacaagacccagatcttcaacgtgtatggcatcacagaggtgtcctcctgggccaccatctaccgcatccctgagaagaccctgaacagcaccctgaagtgtgagctgcctgtgcagctgggcttccccctgctgggcaccgtggtggaggtgcgggacaccaacggcttcaccatccaggagggcagcggccaggtgttcctgggcggcaggaacagagtgtgcttcctggatgatgaggtgacagtgcccctgggcaccatgagggccaccggggactttgtgacagtgaaggatggagagatcttcttcctgggcaggaaggacagccagatcaagagacatggcaagaggctgaacatcgagctggtgcagcaggtggccgaggagctgcagcaggtggagagctgtgctgtgacctggtacaaccaggagaagctgatcctcttcatggtgtccaaggatgcctctgtgaaggagtacatcttcaaggagctgcagaagtacctgcccagccatgctgtgcctgatgagctggtgctgattgacagcctgcccttcaccagccacggcaagattgatgtgtctgagctgaacaagatctacctgaactacatcaacctgaagtctgagaacaagctgagcggcaaggaggacctgtgggagaagctgcagtacctgtggaagagcaccctgaacctgcctgaggacctgctgcgggtgcctgatgagagcctcttcctgaacagcggcggggacagcctgaagagcatccggctgctgtctgaaattgagaagctggtgggcacctctgtgcccggcctgctggagatcatcctgagcagcagcatcctggagatctacaaccacatcctgcagacagtggtgcctgatgaagatgtgaccttcaggaagagctgtgccaccaagaggaagctgagtgacatcaaccaggaggaggccagcggcaccagcctgcaccagaaggccatcatgaccttcacctgccacaatgagatcaatgcctttgtggtgctgagccggggcagccagatcctgagcctgaacagcacccgcttcctgaccaagctgggccactgcagcagcgcctgccccagcgacagcgtgtcccagaccaacatccagaacctgaagggcctgaacagccctgtgctgattggcaagagcaaggaccccagctgtgtggccaaggtgtctgaggagggcaagccagccatcggcacccagaagatggagctgcacgtgcgctggaggagtgacacaggaaaatgtgtggatgccagccccctggtggtgatccccacctttgacaagagcagcaccaccgtgtacatcggcagccacagccacaggatgaaggctgtggacttctacagcggcaaggtgaagtgggagcagatcctgggggaccgcatcgagagcagcgcctgtgtgtccaaatgtggcaacttcatcgtggtgggctgctacaacggcctggtgtatgtgctgaagagcaacagcggggagaagtactggatgttcaccacagaagatgctgtgaagagcagcgccaccatggaccccaccaccggcctcatctacatcggcagccatgaccagcacgcctatgccctggacatctacaggaagaagtgtgtgtggaagagcaaatgtggcggcaccgtcttcagcagcccctgcctgaacctgatcccccaccacctgtactttgccaccctgggcggcctgctgctggccgtgaacccagccactggaaatgtcatctggaagcacagctgtgggaagcccctcttcagcagcccccagtgctgcagccagtacatctgcatcggctgtgtggatggcaacctgctgtgcttcacccactttggagagcaggtgtggcagttcagcaccagcggccccatcttcagcagcccctgcaccagccccagcgagcagaagatcttcttcggcagccatgactgcttcatctactgctgcaacatgaagggccacctgcagtggaagtttgagaccaccagccgggtgtatgccaccccatttgccttccacaactacaacggcagcaatgagatgctgctggccgccgccagcacagatggcaaggtgtggatcctggagagccagagcggccagctgcagagcgtgtatgagctgcccggggaggtgttcagcagccctgtggtgctggagagcatgctgatcatcggctgccgggacaactacgtgtactgcctggacctgctgggcggcaaccagaagtag

SEQ ID NO: 143420 - DNA, 2781 bp, synthetic construct
  misc_feature 1..2781: note = Description of Artificial Sequence: Synthetic coding sequence
  source 1..2781: mol_type = other DNA
atgctgcaggtgcacaggacaggcctgggccgcctgggcgtgtccctgagcaagggcctgcaccacaaggctgtgctggccgtgagaagagaagatgtgaatgcctgggagcggcgggcccccctggcccccaagcacatcaagggcatcaccaacctgggctacaaggtgctgatccagcccagcaacagaagagccatccatgacaaggactatgtgaaggccggcggcatcctgcaggaggacatcagcgaggcctgcctgatcctgggcgtgaagaggcctcctgaggagaagctgatgagcaggaagacctacgccttcttcagccacaccatcaaggcccaggaggccaacatgggcctgctggatgagatcctgaagcaggagatccggctgattgattatgagaagatggtggaccaccggggcgtgcgggtggtggccttcggccagtgggccggcgtggccggcatgatcaacatcctgcacggcatgggcctgcggctgctggccctgggccaccacacccccttcatgcacatcggcatggcccacaactacagaaacagcagccaggccgtgcaggccgtgagagatgctggctatgagatcagcctgggcctgatgcccaagagcatcggccccctgacctttgtgttcaccggcactggaaatgtgtccaaaggagcccaggccatcttcaatgagctgccctgtgaatatgtggagccccatgagctgaaggaggtgtcccagacaggagacctgaggaaggtgtatggaacagtgctgagccgccaccaccacctggtgaggaagacagatgctgtgtatgaccctgcagaatatgacaagcaccctgagcgctacatcagccgcttcaacacagacatcgccccctacaccacctgcctgatcaatggcatctactgggagcagaacaccccccggctgctgacccggcaggatgcccagagcctgctggcccctgggaagttcagccctgctggggtggagggctgcccagccctgccccacaagctggtggccatctgtgacatctctgctgacacaggaggcagcattgagttcatgacagagtgcaccaccatcgagcaccccttctgcatgtatgatgctgaccagcacatcatccatgattctgtggagggcagcggcatcctgatgtgcagcattgacaacctgcctgcccagctgcccatcgaggccacagaatgttttggagacatgctgtacccctacgtggaggagatgatcctgagtgatgccacccagcccctggagagccagaacttcagccctgtggtgagagatgctgtgatcaccagcaatggcaccctgcctgacaagtacaagtacatccagaccctgcgggagagccgggagcgggcccagagcctgtccatgggcaccaggaggaaggtgctggtgctgggcagcggctacatcagcgagcctgtgctggagtacctgagcagagatggcaacatcgagatcaccgtgggcagtgacatgaagaaccagatcgagcagctgggcaagaagtacaacatcaaccctgtgtccatggacatctgcaagcaggaggagaagctgggcttcctggtggccaagcaggacctggtgatcagcctgctgccctacgtgctgcaccccctggtggccaaggcctgcatcaccaacaaggtgaacatggtgacagccagctacatcaccccagccctgaaggagctggagaagtctgtggaggatgctggcatcaccatcatcggggagctgggcctggaccccggcctggaccacatgctggccatggagaccatcgacaaggccaaggaggtgggcgccaccatcgagagctacatctcctactgcggcggcctgcctgcccctgagcacagcaacaaccccctgcgctacaagttctcctggagccctgtgggcgtgctgatgaatgtgatgcagagcgccacctacctgctggatggcaaggtggtgaatgtggccggcggcatctccttcctggatgctgtgacctccatggacttcttccctggcctgaacctggagggctaccccaacagagacagcaccaagtatgcagagatctacggcatcagcagcgcccacaccctgctgcggggcaccctgcgctacaagggctacatgaaggccctgaatggatttgtgaagctgggcctcatcaaccgggaggccctgcctgccttccggcctgaggccaaccccctgacctggaagcagctgctgtgtgacctggtgggcatcagccccagcagcgagcatgatgtgctgaaggaggccgtgctgaagaagctgggcggggacaacacccagctggaggccgctgagtggctgggcctgctgggagatgagcaggtgccccaggccgagagcatcctggatgccctgagcaagcacctggtgatgaagctgtcctatggccctgaggagaaggacatgattgtgatgagggacagctttggcatccgccaccccagcggccacctggagcacaagaccatcgacctggtggcctatggagacatcaatggcttcagcgccatggccaagacagtgggcctgcccacagccatggccgccaagatgctgctggatggagagatcggggccaagggcctgatgggccccttcagcaaggagatctacggccccatcctggagcgcatcaaggccgagggcatcatctacaccacccagagcaccatcaagccctag

SEQ ID NO: 143421 - DNA, 2781 bp, synthetic construct; identical to SEQ ID NO: 143420
  misc_feature 1..2781: note = Description of Artificial Sequence: Synthetic coding sequence
  source 1..2781: mol_type = other DNA

SEQ ID NO: 143422 - DNA, 942 bp, synthetic construct
  misc_feature 1..942: note = Description of Artificial Sequence: Synthetic coding sequence
  source 1..942: mol_type = other DNA
atgcagccccagagcgtgctgcacagcggctacttccaccccctgctgcgggcctggcagacagccaccaccaccctgaatgccagcaacctgatctaccccatctttgtgacctatggagtgaagaggctggaggagatgctgcggcccctggtggaggagggcctgcgctgtgtgctgatcttcggcgtgcccagccgggtgcccaaggatgagcggggcagcgctgctgacagcgaggagagccctgccatcgaggccatccacctgctgaggaagaccttccccaacctgctggtggcctgtgatgtgtgcctgtgcccctacaccagccacggccactgcggcctgctgtctgaaaatggagccttccgggcagaggagagccggcagaggctggccgaggtggccctggcctatgccaaggccggctgccaggtggtggcccccagcgacatgatggatggccgggtggaggccatcaaggaggccctgatggcccacggcctgggcaacagagtgtctgtgatgagctacagcgccaagtttgccagctgcttctacggccccttcagagatgctgccaagagcagccctgcctttggagaccggcgctgctaccagctgcccccaggggcccggggcctggccctgcgggctgtggacagagatgtgcgggagggcgctgacatgctgatggtgaagccaggcatgccctacctggacatcgtgcgggaggtgaaggacaagcacccagacctgcccctggccgtgtaccacgtgtctggagaatttgccatgctgtggcacggggcccaggccggggcctttgacctgaaggctgctgtgctggaggccatgacagccttcagaagagctggagctgacatcatcatcacctactacaccccccagctgctgcagtggctgaaggaggagtag

SEQ ID NO: 143423 - DNA, 993 bp, synthetic construct
  misc_feature 1..993: note = Description of Artificial Sequence: Synthetic coding sequence
  source 1..993: mol_type = other DNA
atgcagccccagagcgtgctgcacagcggctacttccaccccctgctgcgggcctggcagacagccaccaccaccctgaatgccagcaacctgatctaccccatctttgtgacagatgtgcctgatgacatccagcccatcaccagcctgcccggggtggcccgctatggagtgaagaggctggaggagatgctgcggcccctggtggaggagggcctgcgctgtgtgctgatctttggagtgcccagccgggtgcccaaggatgagcggggcagcgctgctgacagcgaggagagccctgccatcgaggccatccacctgctgaggaagaccttccccaacctgctggtggcctgtgatgtgtgcctgtgcccctacaccagccacggccactgcggcctgctgtctgaaaatggagccttccgggcagaggagagccggcagaggctggccgaggtggccctggcctatgccaaggccggctgccaggtggtggcccccagcgacatgatggatggccgggtggaggccatcaaggaggccctgatggcccacggcctgggcaacagagtgtctgtgatgagctacagcgccaagtttgccagctgcttctacggccccttcagagatgctgccaagagcagccctgccttcggggaccggcgctgctaccagctgcccccaggggcccggggcctggccctgcgggctgtggacagagatgtgcgggagggcgctgacatgctgatggtgaagccaggcatgccctacctggacatcgtgcgggaggtgaaggacaagcacccagacctgcccctggccgtgtaccacgtgtctggagaatttgccatgctgtggcatggagcccaggccggggcctttgacctgaaggctgctgtgctggaggccatgacagccttccggcgggccggggctgacatcatcatcacctactacaccccccagctgctgcagtggctgaaggaggagtag

SEQ ID NO: 143424 - DNA, 45 bp, synthetic construct; identical to SEQ ID NO: 72628
  misc_feature 1..45: note = Description of Artificial Sequence: Synthetic coding sequence
  source 1..45: mol_type = other DNA

SEQ ID NO: 143425 - DNA, 363 bp, synthetic construct
  misc_feature 1..363: note = Description of Artificial Sequence: Synthetic coding sequence
  source 1..363: mol_type = other DNA
atgcccctgtgccccctggcccacgccatgcagccccagagcgtgctgcacagcggctacttccaccccctgctgcgggcctggcagacagccaccaccaccctgaatgccagcaacctgatctaccccatctttgtgacagatgtgcctgatgacatccagcccatcaccagcctgcccggggtggcccgctatggagtgaagaggctggaggagatgctgcggcccctggtggaggagggcctgcgctgtgtgctgatcttcggcgtgcccagccgggtgcccaaggatgagcggggcagcgctgctgacagcgaggagagccctgccatcgaggccatccacctgctgaggaagacctag

SEQ ID NO: 143426 - DNA, 180 bp, synthetic construct
  misc_feature 1..180: note = Description of Artificial Sequence: Synthetic coding sequence
  source 1..180: mol_type = other DNA
atgcccctgtgccccctggcccacgccatgcagccccagagcgtgctgcacagcggctacttccaccccctgctgcgggcctggcagacagccaccaccaccctgaatgccagcaacctgatctaccccatctttgtgacagatgtgcctgatgacatccagcccatcaccagcctgtag

SEQ ID NO: 143427 - DNA, 1923 bp, synthetic construct
  misc_feature 1..1923: note = Description of Artificial Sequence: Synthetic coding sequence
  source 1..1923: mol_type = other DNA
atggagagcgtggtgcggcgctgccccttcctgagccgggtgccccaggccttcctgcagaaggccggcaagagcctgctcttctacgcccagaactgccccaagatgatggaggtgggcgccaagccagccccccgggccctgagcacagctgctgtgcactaccagcagatcaaggagaccccaccagccagcgagaaggacaagacagccaaggccaaggtgcagcagaccccagatggcagccagcagagcccagatggcacccagctgcccagcggccaccccctgcctgccaccagccagggcacagccagcaaatgtcccttcctggccgcccagatgaaccagaggggcagctctgtgttctgcaaggccagcctggagctgcaggaggatgtgcaggagatgaatgctgtgaggaaggaggtggccgagaccagcgctggccccagcgtggtgtctgtgaagacagatggaggagaccccagcggcctgctgaagaacttccaggacatcatgcagaagcagaggcctgagcgggtgagccacctgctgcaggacaacctgcccaagtctgtgtccaccttccagtatgaccgcttctttgagaagaagattgatgagaagaagaatgaccacacctacagagtcttcaagacagtgaacagaagagcccacatcttccccatggctgatgactacagcgacagcctcatcaccaagaagcaggtgtctgtgtggtgcagcaatgactacctgggcatgagccgccacccccgggtgtgtggggctgtgatggacaccctgaagcagcacggggccggggccggcggcaccaggaacatcagcggcaccagcaagttccacgtggacctggagcgggagctggccgacctgcacggcaaggatgctgccctgctcttcagcagctgctttgtggccaatgacagcaccctcttcaccctggccaagatgatgcctggctgtgagatctacagcgacagcggcaaccacgcctccatgatccagggcatccggaacagccgggtgcccaagtacatcttccgccacaatgatgtgagccacctgcgggagctgctgcagaggagtgaccccagcgtgcccaagatcgtggcctttgaaacagtgcacagcatggatggagctgtgtgccccctggaggagctgtgtgatgtggcccacgagtttggagccatcacctttgtggatgaggtgcatgctgtgggcctgtatggagcccggggcggcggcatcggggacagagatggagtgatgcccaagatggacatcatcagcggcaccctgggcaaggccttcggctgtgtgggcggctacatcgccagcaccagcagcctgattgacacagtgcgctcctatgctgctggcttcatcttcaccaccagcctgccccccatgctgctggccggggccctggagagcgtgcgcatcctgaagtctgctgagggccgggtgctgcggcggcagcaccagagaaatgtgaagctgatgaggcagatgctgatggatgctggcctgcctgtggtgcactgccccagccacatcatccctgtgcgggtggctgatgctgccaagaacacagaggtgtgtgatgagctgatgagccgccacaacatctacgtgcaggccatcaactaccccaccgtgcccagaggagaggagctgctgcgcatcgcccccaccccccaccacaccccccagatgatgaactacttcctggagaacctgctggtgacctggaagcaggtgggcctggagctgaagccccacagcagcgctgagtgcaacttctgcagaagacccctgcactttgaggtgatgtctgagcgggagaagagctacttcagcggcctgagcaagctggtgtctgcccaggcctag

SEQ ID NO: 143428 - DNA, 1923 bp, synthetic construct; identical to SEQ ID NO: 143427
  misc_feature 1..1923: note = Description of Artificial Sequence: Synthetic coding sequence
  source 1..1923: mol_type = other DNA

SEQ ID NO: 143429 - DNA, 345 bp, synthetic construct
  misc_feature 1..345: note = Description of Artificial Sequence: Synthetic coding sequence
  source 1..345: mol_type = other DNA
atggagagcgtggtgcggcgctgccccttcctgagccgggtgccccaggccttcctgcagaaggccggcaagagcctgctcttctacgcccagaactgccccaagatgatggaggtgggcgccaagccagccccccgggccctgagcacagctgctgtgcactaccagcagatcaaggagaccccaccagccagcgagaaggacaagacagccaaggccaaggtgcagcagaccccagatggcagccagcagagcccagatggcacccagttccggctggacaccccctgcctgccccaggcccgggccctgcaggccaatgccctgtcctggcagcacaggtag

SEQ ID NO: 143430 - DNA, 1923 bp, synthetic construct; identical to SEQ ID NO: 143427
  misc_feature 1..1923: note = Description of Artificial Sequence: Synthetic coding sequence
  source 1..1923: mol_type = other DNA

SEQ ID NO: 143431 - DNA, 1923 bp, synthetic construct; identical to SEQ ID NO: 143427
  misc_feature 1..1923: note = Description of Artificial Sequence: Synthetic coding sequence
  source 1..1923: mol_type = other DNA

SEQ ID NO: 143432 - DNA, 1764 bp, synthetic construct
  misc_feature 1..1764: note = Description of Artificial Sequence: Synthetic coding sequence
  source 1..1764: mol_type = other DNA
atggtgacagctgccatgctgctgcagtgctgccctgtgctggcccggggccccaccagcctgctgggcaaggtggtgaagacccaccagttcctgtttggaattggccgctgccccatcctggccacccagggccccaactgcagccagatccacctgaaggccaccaaggccggcggggacagccccagctgggccaagggccactgccccttcatgctgtctgagctgcaggacggcaagagcaagatcgtgcagaaggccgcccctgaggtgcaggaggatgtgaaggccttcaagacagacctgcccagcagcctggtgtctgtgtccctgaggaagcccttcagcggcccccaggagcaggagcagatcagcggcaaggtgacccacctgatccagaacaacatgcctggcaactacgtgttctcctatgaccagttcttccgggacaagatcatggagaagaagcaggaccacacctacagagtcttcaagacagtgaaccgctgggcagatgcctacccctttgcccagcacttcagcgaggcctctgtggccagcaaggatgtgtctgtgtggtgcagcaatgactacctgggcatgagccgccacccccaggtgctgcaggccacccaggagaccctgcagagacatggagctggagctgggggcaccaggaacatcagcggcaccagcaagttccacgtggagctggagcaggagctggccgagctgcaccagaaggacagcgccctgctcttcagcagctgctttgtggccaatgacagcaccctcttcaccctggccaagatcctgcccggctgtgagatctacagtgatgctggcaaccacgcctccatgatccagggcatcagaaattctggagctgccaagtttgtgttccgccacaatgaccctgaccacctgaagaagctgctggagaagagcaaccccaagatccccaagatcgtggcctttgaaacagtgcacagcatggatggagccatctgccccctggaggagctgtgtgatgtgagccaccagtacggggccctgacctttgtggatgaggtgcatgctgtgggcctgtatggcagcagaggagctggcatcggggagagagatggcatcatgcacaagattgacatcatcagcggcaccctgggcaaggccttcggctgtgtgggcggctacatcgccagcacccgggacctggtggacatggtgcgctcctatgctgctggcttcatcttcaccaccagcctgccccccatggtgctgagcggggccctggagagcgtgcggctgctgaagggggaggagggccaggccctgcggcgggcccaccagagaaatgtgaagcacatgaggcagctgctgatggaccggggcctgcctgtgatcccctgccccagccacatcatccccatccgggtgggcaatgctgccctgaacagcaagctgtgtgacctgctgctgagcaagcacggcatctacgtgcaggccatcaactaccccaccgtgcccagaggagaggagctgctgcggctggcccccagcccccaccacagcccccagatgatggaggactttgtggagaagctgctgctggcctggacagctgtgggcctgcccctgcaggatgtgtctgtggccgcctgcaacttctgcagaagacctgtgcactttgagctgatgtctgagtgggagaggagctactttggaaacatgggcccccagtatgtgaccacctacgcctag

SEQ ID NO: 143433 - DNA, 1653 bp, synthetic construct
  misc_feature 1..1653: note = Description of Artificial Sequence: Synthetic coding sequence
  source 1..1653: mol_type = other DNA
atggtgacagctgccatgctgctgcagtgctgccctgtgctggcccggggccccaccagcctgctgggcaaggtggtgaagacccaccagttcctgtttggaattggccgctgccccatcctggccacccagggccccaactgcagccagatccacctgaaggccaccaaggccggcggggacagccccagctgggccaagggccactgccccttcatgctgtctgagctgcaggacggcaagagcaagatcgtgcagaaggccgcccctgaggtgcaggaggatgtgaaggccttcaagacaggcaactacgtgttctcctatgaccagttcttccgggacaagatcatggagaagaagcaggaccacacctacagagtcttcaagacagtgaaccgctgggcagatgcctacccctttgcccagcacttcagcgaggcctctgtggccagcaaggatgtgtctgtgtggtgcagcaatgactacctgggcatgagccgccacccccaggtgctgcaggccacccaggagaccctgcagagacatggagctggggccggcggcaccaggaacatcagcggcaccagcaagttccacgtggagctggagcaggagctggccgagctgcaccagaaggacagcgccctgctcttcagcagctgctttgtggccaatgacagcaccctcttcaccctggccaagatcctgcccggctgtgagatctacagtgatgctggcaaccacgcctccatgatccagggcatccggaacagcggggccgccaagtttgtgttccgccacaatgaccctgaccacctgaagaagctgctggagaagagcaaccccaagatccccaagatcgtggcctttgagaccgtgcacagcatggatggagccatctgccccctggaggagctgtgtgatgtgagccaccagtatggagccctgacctttgtggatgaggtgcatgctgtgggcctgtatggcagcagaggagctggcattggagagagagatggcatcatgcacaagattgacatcatcagcggcaccctgggcaaggccttcggctgtgtgggcggctacatcgccagcacccgggacctggtggacatggtgcgctcctatgctgctggcttcatcttcaccaccagcctgccccccatggtgctgagcggggccctggagagcgtgcggctgctgaagggggaggagggccaggccctgcggcgggcccaccagagaaatgtgaagcacatgaggcagctgctgatggaccggggcctgcccgtcatcccctgccccagccacatcatccccatccgggtgggcaatgctgccctgaacagcaagctgtgtgacctgctgctgagcaagcacggcatctacgtgcaggccatcaactaccccaccgtgcccagaggagaggagctgctgcggctggcccccagcccccaccacagcccccagatgatggaggactttgtggagaagctgctgctggcctggacagctgtgggcctgcccctgcaggatgtgtctgtggccgcctgcaacttctgccggcggcctgtgcactttgagctgatgtctgagtgggagaggagctacttcggcaacatgggcccccagtatgtgaccacctacgcctag

SEQ ID NO: 143434 - DNA, 1725 bp, synthetic construct
  misc_feature 1..1725: note = Description of Artificial Sequence: Synthetic coding sequence
  source 1..1725: mol_type = other DNA
atgagaggaggagaggtggccctgggctggaacaagaagaagaggctcttctgtgaggacttccgcttcaagatggtgacagctgccatgctgctgcagtgctgccctgtgctggcccggggccccaccagcctgctgggcaaggtggtgaagacccaccagttcctgtttggaattggccgctgccccatcctggccacccagggccccaactgcagccagatccacctgaaggccaccaaggccggcggggacagccccagctgggccaagggccactgccccttcatgctgtctgagctgcaggacggcaagagcaagatcgtgcagaaggccgcccctgaggtgcaggaggatgtgaaggccttcaagacaggcaactacgtgttctcctatgaccagttcttccgggacaagatcatggagaagaagcaggaccacacctacagagtcttcaagacagtgaaccgctgggcagatgcctacccctttgcccagcacttcagcgaggcctctgtggccagcaaggatgtgtctgtgtggtgcagcaatgactacctgggcatgagccgccacccccaggtgctgcaggccacccaggagaccctgcagagacatggagctggggccggcggcaccaggaacatcagcggcaccagcaagttccacgtggagctggagcaggagctggccgagctgcaccagaaggacagcgccctgctcttcagcagctgctttgtggccaatgacagcaccctcttcaccctggccaagatcctgcccggctgtgagatctacagtgatgctggcaaccacgcctccatgatccagggcatccggaacagcggggccgccaagtttgtgttccgccacaatgaccctgaccacctgaagaagctgctggagaagagcaaccccaagatccccaagatcgtggcctttgagaccgtgcacagcatggatggagccatctgccccctggaggagctgtgtgatgtgagccaccagtatggagccctgacctttgtggatgaggtgcatgctgtgggcctgtatggcagcagaggagctggcattggagagagagatggcatcatgcacaagattgacatcatcagcggcaccctgggcaaggccttcggctgtgtgggcggctacatcgccagcacccgggacctggtggacatggtgcgctcctatgctgctggcttcatcttcaccaccagcctgccccccatggtgctgagcggggccctggagagcgtgcggctgctgaagggggaggagggccaggccctgcggcgggcccaccagagaaatgtgaagcacatgaggcagctgctgatggaccggggcctgcccgtcatcccctgccccagccacatcatccccatccgggtgggcaatgctgccctgaacagcaagctgtgtgacctgctgctgagcaagcacggcatctacgtgcaggccatcaactaccccaccgtgcccagaggagaggagctgctgcggctggcccccagcccccaccacagcccccagatgatggaggactttgtggagaagctgctgctggcctggacagctgtgggcctgcccctgcaggatgtgtctgtggccgcctgcaacttctgccggcggcctgtgcactttgagctgatgtctgagtgggagaggagctacttcggcaacatgggcccccagtatgtgaccacctacgcctag

SEQ ID NO: 143435 - DNA, 669 bp, synthetic construct
  misc_feature 1..669: note = Description of Artificial Sequence: Synthetic coding sequence
  source 1..669: mol_type = other DNA
tgactgagctttgtgcggccccagtgccgggccacagacagccccagctgggccaagggccactgccccttcatgctgtctgagctgcaggacggcaagagcaagatcgtgcagaaggccgcccctgaggtgcaggaggatgtgaaggccttcaagacagacctgcccagcagcctggtgtctgtgtccctgaggaagcccttcagcggcccccaggagcaggagcagatcagcggcaaggtgacccacctgatccagaacaacatgcctggcaactacgtgttctcctatgaccagttcttccgggacaagatcatggagaagaagcaggaccacacctacagagtcttcaagacagtgaaccgctgggcagatgcctacccctttgcccagcacttcagcgaggcctctgtggccagcaaggatgtgtctgtgtggtgcagcaatgactacctgggcatgagccgccacccccaggtgctgcaggccacccaggagaccctgcagagacatggagctggagctgggggcaccaggaacatcagcggcaccagcaagttccacgtggagctggagcaggagctggccgagctgcaccagaaggacagcgccctgctcttcagcagctgctttgtggccaatgacagcaccctcttcaccctggcctag

SEQ ID NO: 143436 - DNA, 1212 bp, synthetic construct
  misc_feature 1..1212: note = Description of Artificial Sequence: Synthetic coding sequence
  source 1..1212: mol_type = other DNA
atgcagagagctgtgtctgtggtggcccggctgggcttccggctgcaggccttccccccagccctgtgccggcccctgagctgtgcccaggaggtgctgcggaggacccccctgtatgacttccacctggcccatggaggcaagatggtggcctttgctggctggagcctgcctgtgcagtacagagacagccacacagacagccacctgcacacccggcagcactgcagcctgtttgatgtgagccacatgctgcagaccaagatcctgggcagtgacagagtgaagctgatggagagcctggtggtgggggacattgctgagctgcggcccaaccagggcaccctgagcctcttcaccaatgaagctgggggcatcctggatgacctgattgtgaccaacaccagcgagggccacctgtatgtggtgtccaatgccggctgctgggagaaggacctggccctgatgcaggacaaggtgcgggagctgcagaaccagggcagagatgtgggcctggaggtgctggacaatgccctgctggccctgcagggccccacagctgcccaggtgctgcaggccggcgtggctgatgacctgaggaagctgcccttcatgaccagcgctgtgatggaggtgtttggagtgtctggctgccgggtgacccgctgtggctacaccggggaggatggagtggagatctctgtgcctgtggccggggctgtgcacctggccacagccatcctgaagaaccctgaggtgaagctggccggcctggccgcccgggacagcctgcggctggaggccggcctgtgcctgtatggaaatgacattgatgagcacaccacccctgtggagggcagcctgtcctggaccctgggcaagagaagaagagctgccatggacttccctggggccaaggtgattgtgccccagctgaagggccgggtgcagaggagaagagtgggcctgatgtgtgagggcgcccccatgagggcccacagccccatcctgaacatggagggcaccaagattggcaccgtgaccagcggctgccccagccccagcctgaagaagaatgtggccatgggctacgtgccctgtgagtacagccggcccggcaccatgctgctggtggaggtgcggaggaagcagcagatggctgtggtgtccaagatgccctttgtgcccaccaactactacaccctgaagtag

SEQ ID NO: 143437 - DNA, 1161 bp, synthetic construct
  misc_feature 1..1161: note = Description of Artificial Sequence: Synthetic coding sequence
  source 1..1161: mol_type = other DNA
atgcagagagctgtgtctgtggtggcccggctgggcttccggctgcaggccttccccccagccctgtgccggcccctgagctgtgcccaggaggtgctgcggaggacccccctgtatgacttccacctggcccatggaggcaagatggtggcctttgctggctggagcctgcctgtgcagtacagagacagccacacagacagccacctgcacacccggcagcactgcagcctgtttgatgtgagccacatgctgcagaccaagatcctgggcagtgacagagtgaagctgatggagagcctggtggtgggggacattgctgagctgcggcccaaccagggcaccctgagcctcttcaccaatgaagctgggggcatcctggatgacctgattgtgaccaacaccagcgagggccacctgtatgtggtgtccaatgccggctgctgggagaaggacctggccctgatgcaggacaaggtgcgggagctgcagaaccagggcagagatgtgggcctggaggtgctggacaatgccctgctggccctgcagggccccacagctgcccaggtgctgcaggccggcgtggctgatgacctgaggaagctgcccttcatgaccagcgctgtgatggaggtgtttggagtgtctggctgccgggtgacccgctgtggctacaccggggaggatggagtggagatctctgtgcctgtggccggggctgtgcacctggccacagccatcctgaagaaccctgaggtgaagctggccggcctggccgcccgggacagcctgcggctggaggccggcctgtgcctgtatggaaatgacattgatgagcacaccacccctgtggagggcagcctgtcctggaccctgggcaagagaagaagagctgccatggacttccctggggccaaggtgattgtgccccagctgaagggccgggtgcagaggagaagagtgggcctgatgtgtgagggcgcccccatgagggcccacagccccatcctgaacatggagggcaccaagattggcaccgtgaccagcggctgccccagccccagcctgaagaagaatgtggccatgggctacgtgccctgtgagtacagccggcccggcaccatgctgctggtggagctgcccagcggcccctgcttctag

SEQ ID NO: 143438 - DNA, 1155 bp, synthetic construct
  misc_feature 1..1155: note = Description of Artificial Sequence: Synthetic coding sequence
  source 1..1155: mol_type = other DNA
tgagctgtgtctgtggtggcccggctgggcttccggctgcaggccttccccccagccctgtgccggcccctgagctgtgcccaggaggtgctgcggaggacccccctgtatgacttccacctggcccatggaggcaagatggtggcctttgctggctggagcctgcctgtgcagtacagagacagccacacagacagccacctgcacacccggcagcactgcagcctgtttgatgtgagccacatgctgcagaccaagatcctgggcagtgacagagtgaagctgatggagagcctggtggtgggggacattgctgagctgcggcccaaccagggcaccctgagcctcttcaccaatgaagctgggggcatcctggatgacctgattgtgaccaacaccagcgagggccacctgtatgtggtgtccaatgccggctgctgggagaaggacctggccctgatgcaggacaaggtgcgggagctgcagaaccagggcagagatgtgggcctggaggtgctggacaatgccctgctggccctgcagggccccacagctgcccaggtgctgcaggccggcgtggctgatgacctgaggaagctgcccttcatgaccagcgctgtgatggaggtgtttggagtgtctggctgccgggtgacccgctgtggctacaccggggaggatggagtggagatctctgtgcctgtggccggggctgtgcacctggccacagccatcctgaagaaccctgaggtgaagctggccggcctggccgcccgggacagcctgcggctggaggccggcctgtgcctgtatggaaatgacattgatgagcacaccacccctgtggagggcagcctgtcctggaccctgggcaagagaagaagagctgccatggacttccctggggccaaggtgattgtgccccagctgaagggccgggtgcagaggagaagagtgggcctgatgtgtgagggcgcccccatgagggcccacagccccatcctgaacatggagggcaccaagattggcaccgtgaccagcggctgccccagccccagcctgaagaagaatgtggccatgggctacgtgccctgtgagtacagccggcccggcaccatgctgctggtggagctgcccagcggcccctgcttctag

SEQ ID NO: 143439 - DNA, 1080 bp, synthetic construct
  misc_feature 1..1080: note = Description of Artificial Sequence: Synthetic coding sequence
  source 1..1080: mol_type = other DNA
atgcagagagctgtgtctgtggtggcccggctgggcttccggctgcaggccttccccccagccctgtgccggcccctgagctgtgcccaggaggtgctgcggaggacccccctgtatgacttccacctggcccatggaggcaagatggtggcctttgctggctggagcctgcctgtgcagtacagagacagccacacagacagccacctgcacacccggcagcactgcagcctgtttgatgtgagccacatgctgcagaccaagatcctgggcagtgacagagtgaagctgatggagagcctggtggtgggggacattgctgagctgcggcccaaccaggacaaggtgcgggagctgcagaaccagggcagagatgtgggcctggaggtgctggacaatgccctgctggccctgcagggccccacagctgcccaggtgctgcaggccggcgtggctgatgacctgaggaagctgcccttcatgaccagcgctgtgatggaggtgtttggagtgtctggctgccgggtgacccgctgtggctacaccggggaggatggagtggagatctctgtgcctgtggccggggctgtgcacctggccacagccatcctgaagaaccctgaggtgaagctggccggcctggccgcccgggacagcctgcggctggaggccggcctgtgcctgtatggaaatgacattgatgagcacaccacccctgtggagggcagcctgtcctggaccctgggcaagagaagaagagctgccatggacttccctggggccaaggtgattgtgccccagctgaagggccgggtgcagaggagaagagtgggcctgatgtgtgagggcgcccccatgagggcccacagccccatcctgaacatggagggcaccaagattggcaccgtgaccagcggctgccccagccccagcctgaagaagaatgtggccatgggctacgtgccctgtgagtacagccggcccggcaccatgctgctggtggaggtgcggaggaagcagcagatggctgtggtgtccaagatgccctttgtgcccaccaactactacaccctgaagtag

SEQ ID NO: 143440 - DNA, 1044 bp, synthetic construct
  misc_feature 1..1044: note = Description of Artificial Sequence: Synthetic coding sequence
  source 1..1044: mol_type = other DNA
atgcagagagctgtgtctgtggtggcccggctgggcttccggctgcaggccttccccccagccctgtgccggcccctgagctgtgcccagaccaagatcctgggcagtgacagagtgaagctgatggagagcctggtggtgggggacattgctgagctgcggcccaaccagggcaccctgagcctcttcaccaatgaagctgggggcatcctggatgacctgattgtgaccaacaccagcgagggccacctgtatgtggtgtccaatgccggctgctgggagaaggacctggccctgatgcaggacaaggtgcgggagctgcagaaccagggcagagatgtgggcctggaggtgctggacaatgccctgctggccctgcagggccccacagctgcccaggtgctgcaggccggcgtggctgatgacctgaggaagctgcccttcatgaccagcgctgtgatggaggtgtttggagtgtctggctgccgggtgacccgctgtggctacaccggggaggatggagtggagatctctgtgcctgtggccggggctgtgcacctggccacagccatcctgaagaaccctgaggtgaagctggccggcctggccgcccgggacagcctgcggctggaggccggcctgtgcctgtatggaaatgacattgatgagcacaccacccctgtggagggcagcctgtcctggaccctgggcaagagaagaagagctgccatggacttccctggggccaaggtgattgtgccccagctgaagggccgggtgcagaggagaagagtgggcctgatgtgtgagggcgcccccatgagggcccacagccccatcctgaacatggagggcaccaagattggcaccgtgaccagcggctgccccagccccagcctgaagaagaatgtggccatgggctacgtgccctgtgagtacagccggcccggcaccatgctgctggtggaggtgcggaggaagcagcagatggctgtggtgtccaagatgccctttgtgcccaccaactactacaccctgaagtag

SEQ ID NO: 143441 - DNA, 921 bp, synthetic construct
  misc_feature 1..921: note = Description of Artificial Sequence: Synthetic coding sequence
  source 1..921: mol_type = other DNA
atggagagcctggtggtgggggacattgctgagctgcggcccaaccagggcaccctgagcctcttcaccaatgaggccggcggcatcctggatgacctgattgtgaccaacaccagcgagggccacctgtatgtggtgtccaatgccggctgctgggagaaggacctggccctgatgcaggacaaggtgcgggagctgcagaaccagggcagagatgtgggcctggaggtgctggacaatgccctgctggccctgcagggccccacagctgcccaggtgctgcaggccggcgtggctgatgacctgaggaagctgcccttcatgaccagcgctgtgatggaggtgtttggagtgtctggctgccgggtgacccgctgtggctacacaggagaagatggagtggagatctctgtgcctgtggccggggctgtgcacctggccacagccatcctgaagaaccctgaggtgaagctggccggcctggccgcccgggacagcctgcggctggaggccggcctgtgcctgtatggaaatgacattgatgagcacaccacccctgtggagggcagcctgtcctggaccctgggcaagagaagaagagctgccatggacttccctggggccaaggtgattgtgccccagctgaagggccgggtgcagaggcggcgggtgggcctgatgtgtgagggcgcccccatgagggcccacagccccatcctgaacatggagggcaccaagattggaacagtgaccagcggctgccccagccccagcctgaagaagaatgtggccatgggctacgtgccctgtgagtacagcaggcctggcaccatgctgctggtggaggtgcggaggaagcagcagatggctgtggtgtccaagatgccctttgtgcccaccaactactacaccctgaagtag

SEQ ID NO: 143442 - DNA, 2760 bp, synthetic construct
  misc_feature 1..2760: note = Description of Artificial Sequence: Synthetic coding sequence
  source 1..2760: mol_type = other DNA
atgtggctggccgccgccgcccccagcctggcccggcggctgctcttcctgggccccccacctccacccctgctgctgctggtgttcagccgcagcagcagaagaaggctgcacagcctgggcctggccgccatgcctgagaagaggccctttgagcggctgcctgcagatgtgagccccatcaactacagcctgtgcctgaagccagacctgctggacttcacctttgagggcaagctggaggccgccgcccaggtgcggcaggccaccaaccagatcgtgatgaactgtgccgacatcgacatcatcacagccagctatgccccagaaggagatgaggagatccacgccaccggcttcaactaccagaatgaagatgagaaggtgaccctgtccttccccagcaccctgcagacaggaacaggcaccctgaagattgactttgtgggggagctgaatgacaagatgaagggcttctaccgcagcaagtacaccacccccagcggggaggtgcgctatgctgctgtgacccagtttgaggccacagatgcccggcgggccttcccctgctgggatgagcccgccatcaaggccacctttgacatcagcctggtggtgcccaaggacagagtggccctgagcaacatgaatgtgattgacaggaagccctacccagatgatgagaacctggtggaggtgaagtttgcccggacccctgtgatgagcacctacctggtggcctttgtggtgggggagtatgactttgtggagaccaggagcaaggatggagtgtgtgtgcgggtgtacacccctgtgggcaaggccgagcagggcaagtttgccctggaggtggccgccaagaccctgcccttctacaaggactacttcaacgtgccctaccccctgcccaagattgacctgattgccatcgctgactttgctgctggggccatggagaactggggcctggtgacctaccgggagacagccctgctgattgaccccaagaacagctgcagcagcagccggcagtgggtggccctggtggtgggccacgagctggcccaccagtggtttggaaacctggtgaccatggagtggtggacccacctgtggctgaatgaaggatttgcctcctggattgagtacctgtgtgtggaccactgcttcccagaatatgacatctggacccagtttgtgtctgctgactacacccgggcccaggagctggatgccctggacaacagccaccccatcgaggtgtctgtgggccaccccagcgaggtggatgagatctttgatgccatctcctacagcaagggggccagcgtcatccgcatgctgcatgactacatcggggacaaggacttcaagaagggcatgaacatgtacctgaccaagttccagcagaagaatgctgccacagaggacctgtgggagagcctggagaatgccagcggcaagcccatcgctgctgtgatgaacacctggaccaagcagatgggcttccccctcatctacgtggaggccgagcaggtggaggatgaccggctgctgcggctgagccagaagaagttctgtgccggcggcagctatgtgggggaggactgcccccagtggatggtgcccatcaccatcagcaccagcgaggaccccaaccaggccaagctgaagatcctgatggacaagccagagatgaatgtggtgctgaagaatgtgaagccagaccagtgggtgaagctgaacctgggcaccgtgggcttctaccgcacccagtacagcagcgccatgctggagagcctgctgcccggcatccgggacctgagcctgccccctgtggaccggctgggcctgcagaatgacctcttcagcctggcccgggccggcatcatcagcacagtggaggtgctgaaggtgatggaggcctttgtgaatgagcccaactacacagtgtggagcgacctgagctgcaacctgggcatcctgagcaccctgctgagccacacagacttctatgaggagatccaggagtttgtgaaggatgtgttcagccccatcggggagcggctgggctgggaccccaagccaggagagggccacctggatgccctgctgcggggcctggtgctgggcaagctgggcaaggccggccacaaggccaccctggaggaggcccggcggcgcttcaaggaccacgtggagggcaagcagatcctgtctgctgacctgcggagccctgtgtacctgactgtgctgaagcatggagatggcaccaccctggacatcatgctgaagctgcacaagcaggccgacatgcaggaggagaagaacagaattgagcgggtgctgggcgccaccctgctgcctgacctgatccagaaggtgctgacctttgccctgtctgaggaggtgcggccccaggacacagtgtctgtgattggaggagtggccggcggcagcaagcacggcaggaaggccgcctggaagttcatcaaggacaactgggaggagctgtacaaccgctaccagggcggcttcctgatcagccgcctcatcaagctgtctgtggagggctttgctgtggacaagatggccggggaggtgaaggccttctttgagagccacccagcccccagcgctgagaggaccatccagcagtgctgtgagaacatcctgctgaatgctgcctggctgaagagagatgctgagagcatccaccagtacctgctgcagaggaaggccagcccccccaccgtgtag

SEQ ID NO: 143443 - DNA, 1884 bp, synthetic construct
  misc_feature 1..1884: note = Description of Artificial Sequence: Synthetic coding sequence
  source 1..1884: mol_type = other DNA
atgtggctggccgccgccgcccccagcctggcccggcggctgctcttcctgggccccccacctccacccctgctgctgctggtgttcagccgcagcagcagaagaaggctgcacagcctgggcctggctgatgtgagccccatcaactacagcctgtgcctgaagccagacctgctggacttcacctttgagggcaagctggaggccgccgcccaggtgcggcaggccaccaaccagatcgtgatgaactgtgccgacatcgacatcatcacagccagctatgccccagaaggagatgaggagatccacgccaccggcttcaactaccagaatgaagatgagaaggtgaccctgtccttccccagcaccctgcagacaggcaccggcaccctgaagattgactttgtgggggagctgaatgacaagatgaagggcttctaccgcagcaagtacaccaccccatctggagaggtgcgctatgctgctgtgacccagtttgaggccacagatgcccggcgggccttcccctgctgggatgagcccgccatcaaggccacctttgacatcagcctggtggtgcccaaggacagagtggccctgagcaacatgaatgtcatcgacaggaagccctacccagatgatgagaacctggtggaggtgaagtttgcccggacccctgtgatgagcacctacctggtggcctttgtggtgggggagtatgactttgtggagaccaggagcaaggatggagtgtgtgtgcgggtgtacacccctgtgggcaaggccgagcagggcaagtttgccctggaggtggccgccaagaccctgcccttctacaaggactacttcaacgtgccctaccccctgcccaagattgacctgattgccatcgctgactttgctgctggggccatggagaactggggcctggtgacctaccgggagacagccctgctgattgaccccaagaacagctgcagcagcagccggcagtgggtggccctggtggtgggccacgagctggcccaccagtggtttggaaacctggtgaccatggagtggtggacccacctgtggctgaatgaaggatttgcctcctggattgagtacctgtgtgtggaccactgcttcccagaatatgacatctggacccagtttgtgtctgctgactacacccgggcccaggagctggatgccctggacaacagccaccccatcgaggtgtctgtgggccaccccagcgaggtggatgagatctttgatgccatctcctacagcaaaggagccagcgtcatccgcatgctgcatgactacatcggggacaaggacttcaagaagggcatgaacatgtacctgaccaagttccagcagaagaatgctgccacagaggacctgtgggagagcctggagaatgccagcggcaagcccatcgctgctgtgatgaacacctggaccaagcagatgggcttccccctcatctacgtggaggccgagcaggtggaggatgaccggctgctgcggctgagccagaagaagttctgtgccggcggcagctatgtgggggaggactgcccccagtggatggtgcccatcaccatcagcaccagcgaggaccccaaccaggccaagctgaagatcctgatggacaagccagagatgaatgtggtgctgaagaatgtgaagccagaccagtgggtgaagctgaacctgggcaccgtgggcttctaccgcacccagtacagcagcgccatgctggagagcctgctgcccggcatccgggacctgagcctgccccctgtggaccggctgggcctgcagaatgacctcttcagcctcttcatcctgtgtgtgcgggaggtgtctggcaactgctgccgggcctag

SEQ ID NO: 143444 - DNA, 2520 bp, synthetic construct
  misc_feature 1..2520: note = Description of Artificial Sequence: Synthetic coding sequence
  source 1..2520: mol_type = other DNA
atgcctgagaagaggccctttgagcggctgcctgcagatgtgagccccatcaactacagcctgtgcctgaagccagacctgctggacttcacctttgagggcaagctggaggccgccgcccaggtgcggcaggccaccaaccagatcgtgatgaactgtgccgacatcgacatcatcacagccagctatgccccagaaggagatgaggagatccacgccaccggcttcaactaccagaatgaagatgagaaggtgaccctgtccttccccagcaccctgcagacaggaacaggcaccctgaagattgactttgtgggggagctgaatgacaagatgaagggcttctaccgcagcaagtacaccacccccagcggggaggtgcgctatgctgctgtgacccagtttgaaaatgtgattgacaggaagccctacccagatgatgagaacctggtggaggtgaagtttgcccggacccctgtgatgagcacctacctggtggcctttgtggtgggggagtatgactttgtggagaccaggagcaaggatggagtgtgtgtgcgggtgtacacccctgtgggcaaggccgagcagggcaagtttgccctggaggtggccgccaagaccctgcccttctacaaggactacttcaacgtgccctaccccctgcccaagattgacctgattgccatcgctgactttgctgctggggccatggagaactggggcctggtgacctaccgggagacagccctgctgattgaccccaagaacagctgcagcagcagccggcagtgggtggccctggtggtgggccacgagctggcccaccagtggtttggaaacctggtgaccatggagtggtggacccacctgtggctgaatgaaggatttgcctcctggattgagtacctgtgtgtggaccactgcttcccagaatatgacatctggacccagtttgtgtctgctgactacacccgggcccaggagctggatgccctggacaacagccaccccatcgaggtgtctgtgggccaccccagcgaggtggatgagatctttgatgccatctcctacagcaagggggccagcgtcatccgcatgctgcatgactacatcggggacaaggacttcaagaagggcatgaacatgtacctgaccaagttccagcagaagaatgctgccacagaggacctgtgggagagcctggagaatgccagcggcaagcccatcgctgctgtgatgaacacctggaccaagcagatgggcttccccctcatctacgtggaggccgagcaggtggaggatgaccggctgctgcggctgagccagaagaagttctgtgccggcggcagctatgtgggggaggactgcccccagtggatggtgcccatcaccatcagcaccagcgaggaccccaaccaggccaagctgaagatcctgatggacaagccagagatgaatgtggtgctgaagaatgtgaagccagaccagtgggtgaagctgaacctgggcaccgtgggcttctaccgcacccagtacagcagcgccatgctggagagcctgctgcccggcatccgggacctgagcctgccccctgtggaccggctgggcctgcagaatgacctcttcagcctggcccgggccggcatcatcagcacagtggaggtgctgaaggtgatggaggcctttgtgaatgagcccaactacacagtgtggagcgacctgagctgcaacctgggcatcctgagcaccctgctgagccacacagacttctatgaggagatccaggagtttgtgaaggatgtgttcagccccatcggggagcggctgggctgggaccccaagccaggagagggccacctggatgccctgctgcggggcctggtgctgggcaagctgggcaaggccggccacaaggccaccctggaggaggcccggcggcgcttcaaggaccacgtggagggcaagcagatcctgtctgctgacctgcggagccctgtgtacctgactgtgctgaagcatggagatggcaccaccctggacatcatgctgaagctgcacaagcaggccgacatgcaggaggagaagaacagaattgagcgggtgctgggcgccaccctgctgcctgacctgatccagaaggtgctgacctttgccctgtctgaggaggtgcggccccaggacacagtgtctgtgattggaggagtggccggcggcagcaagcacggcaggaaggccgcctggaagttcatcaaggacaactgggaggagctgtacaaccgctaccagggcggcttcctgatcagccgcctcatcaagctgtctgtggagggctttgctgtggacaagatggccggggaggtgaaggccttctttgagagccacccagcccccagcgctgagaggaccatccagcagtgctgtgagaacatcctgctgaatgctgcctggctgaagagagatgctgagagcatccaccagtacctgctgcagaggaaggccagcccccccaccgtgtag

SEQ ID NO: 143445 - DNA, 1125 bp, synthetic construct
  misc_feature 1..1125: note = Description of Artificial Sequence: Synthetic coding sequence
  source 1..1125: mol_type = other DNA
atgaggagccctgctgtgcccaccccagcccggggccagctgggcgtggcctttgtgctgctgcccccccacagcgagggcgcccgggtgtttggagccctgggccccatcggccccagcagccctggcctgaccctgggcggcctggccgtgtctgagcaccggctgagcaacaagctgctggcctggagcggcgtgctggagtggcaggagaagagaagaccctacagcgacagcacagccaagctgaagaggaccctgccctgccaggcctacgtgaaccagggcgagaacctggagacagaccagtggccccagaagctgatcatgcagctgatcccccagcagctgctgaccaccctgggccccctcttcaggaacagccagctggcccagttccacttcaccaacagagactgtgacagcctgaagggcctgtgccgcatcatgggaaatggatttgctggctgcatgctgttcccccacatcagcccctgtgaggtgcgggtgctgatgctgctgtacagcagcaagaagaagatcttcatgggcctcatcccctatgaccagagcggctttgtgtctgccatccggcaggtgatcaccaccaggaagcaggccgtgggccctgggggcgtgaacagcggccctgtgcagatcgtgaacaacaagttcctggcctggagcggcgtgatggagtggcaggagcccaggcctgagcccaacagccgcagcaagcgctggctgcccagccacgtgtatgtgaaccagggcgagatcctgaggacagagcagtggcccaggaagctgtacatgcagctgatcccccagcagctgctgaccaccctggtgcccctcttcaggaacagccggctggtgcagttccacttcaccaaggacctggagaccctgaagagcctgtgccgcatcatggacaatggcttccggaggaagagcagcctggccagcagccccatgacccgggccaccctgagcacagccagcggcgtgtccctgcccaccagcagccgcagctgcagcggcacctggagccgcagcaacagcaatgaaggctggggcggcagcggctacccaggcctgggccccagccgcagccacaggtag

SEQ ID NO: 143446 - DNA, 594 bp, synthetic construct
  misc_feature 1..594: note = Description of Artificial Sequence: Synthetic coding sequence
  source 1..594: mol_type = other DNA
atgatgttcccccagagccgccacagcggcagcagccacctgccccagcagctgaagttcaccaccagtgacagctgtgaccgcatcaaggatgagttccagctgctgcaggcccagtaccacagcctgaagctggagtgtgacaagctggccagcgagaagtctgagatgcagaggcactacgtgatgtactatgagatgtcctatggcctgaacatcgagatgcacaagcaggccgagatcgtgaagaggctgaatggcatctgtgcccaggtgctgccctacctgagccaggagcaccagcagcaggtgctgggcgccatcgagcgggccaagcaggtgacagcccctgagctgaacagcatcatccggcagcagctgcaggcccaccagctgagccagctgcaggccctggccctgcccctgacccccctgcctgtgggcctgcagccccccagcctgcctgctgtgtctgctggcaccggcctgctgagcctgagcgccctgggcagccaggcccacctgagcaaggaggacaagaatggacatgatggagacacccaccaggaggatgatggagagaagagtgactag

SEQ ID NO: 143447 - DNA, 1362 bp, synthetic construct
  misc_feature 1..1362: note = Description of Artificial Sequence: Synthetic coding sequence
  source 1..1362: mol_type = other DNA
atgggcgtgctgggccgggtgctgctgtggctgcagctgtgtgccctgacccaggccgtgtccaagctgtgggtgcccaacacagactttgatgtggccgccaactggagccagaacagaacaccctgtgccggcggcgctgtggagttccctgctgacaagatggtgtctgtgctggtgcaggagggccatgctgtgtctgacatgctgctgcccctggatggagagctggtgctggccagcggggccggctttggagtgtctgatgtgggcagccacctggactgtggggccggggagcctgctgtgttccgggacagcgaccgcttctcctggcatgacccccacctgtggaggtctggagatgaggcccctggcctcttctttgtggatgctgagcgggtgccctgcagacatgatgatgtgttcttccccccatctgccagcttccgggtgggcctgggccctggggccagccctgtgcgggtgcgcagcatcagcgccctgggccgcaccttcaccagagatgaggacctggccgtgttcctggccagcagagctggccgcctgcgcttccacggccctggggccctgtctgtgggccctgaggactgtgccgaccccagcggctgtgtgtgtggaaatgctgaggcccagccctggatctgtgccgccctgctgcagcccctgggcggccgctgcccccaggccgcctgccacagcgccctgcggccccagggccagtgctgtgacctgtgtggggctgtggtgctgctgacccacggccctgcctttgacctggagcgctaccgggcccgcatcctggacaccttcctgggcctgccccagtaccacggcctgcaggtggccgtgtccaaggtgcccaggagcagccggctgcgggaggccgacacagagatccaggtggtgctggtggagaatggacctgagaccggcggggccggccgcctggcccgggccctgctggctgatgtggccgagaatggagaggccctgggcgtgctggaggccaccatgagggagagcggggcccacgtgtggggcagcagcgctgctggcctggccggcggcgtggccgctgctgtgctgctggccctgctggtgctgctggtggccccacccctgctgcggcgggccggccgcctgcgctggaggagacatgaggccgccgccccagctggggcccccctgggcttcagaaatcctgtgtttgatgtgacagccagcgaggagctgcccctgccccggcggctgagcctggtgcccaaggctgctgctgacagcaccagccacagctactttgtgaaccccctgtttgctggagctgaggccgaggcctag

SEQ ID NO: 143448 - DNA, 1962 bp, synthetic construct
  misc_feature 1..1962: note = Description of Artificial Sequence: Synthetic coding sequence
  source 1..1962: mol_type = other DNA
atggctgacatcaagacaggcatctttgccaagaatgtgcagaagaggctgaacagagcccaggagaaggtgctgcagaagctgggcaaggcagatgagaccaaggatgagcagtttgaggagtatgtgcagaacttcaagaggcaggaggccgagggcacccggctgcagcgggagctgcggggctacctggccgccatcaagggcatgcaggaggcctccatgaagctgacagagagcctgcacgaggtgtatgagccagactggtacggcagagaagatgtgaagatggtgggggagaagtgtgatgtgctgtgggaggacttccaccagaagctggtggatggcagcctgctgaccctggacacctacctgggccagttcccagacatcaagaacagaattgccaagaggagcaggaagctggtggactatgattctgcccggcaccacctggaggccctgcagagcagcaagaggaaggatgagagccgcatcagcaaggccgaggaggagttccagaaggcccagaaggtgtttgaggagttcaacgtggacctgcaggaggagctgcccagcctgtggagcagaagagtgggcttctacgtgaacaccttcaagaatgtgagcagcctggaggccaagttccacaaggagattgctgtgctgtgccacaagctgtatgaggtgatgaccaagctgggggaccagcacgccgacaaggccttcaccatccagggcgcccccagcgacagcggccccctgagaattgccaagacccccagccccccagaggagcccagccccctgcccagccccacagccagccccaaccacaccctggccccagccagccctgccccagcccggcccaggagccccagccagaccaggaaaggacctcctgtgccccccctgcccaaggtgacccccaccaaggagctgcagcaggagaacatcatctccttctttgaggacaactttgtgcctgagatctctgtgaccacccccagccagaatgaggtgcctgaggtgaagaaggaggagaccctgctggacctggactttgaccccttcaagccagaggtgaccccagctggcagcgctggggtgacccacagccccatgagccagaccctgccctgggacctgtggaccaccagcacagacctggtgcagcctgccagcggcggcagcttcaacggcttcacccagccccaggacaccagcctcttcaccatgcagacagaccagagcatgatctgcaacctgatcatccctggagcagatgctgatgctgctgtgggcaccctggtgtctgctgctgagggcgcccctggagaggaggccgaggccgagaaggccaccgtgcctgctggggagggcgtgtccctggaggaggccaagattggaacagagaccacagaaggagctgagagcgcccagcctgaggccgaggagctggaggccaccgtgccccaggagaaggtgatccccagcgtggtgattgaaccagccagcaaccacgaggaggagggggagaatgagatcaccatcggggctgagcccaaggagaccacagaagatgctgcccctcctggccccaccagcgagaccccagagctggccacagagcagaagcccatccaggacccccagcccaccccatctgccccagccatgggcgctgctgaccagctggccagcgcccgggaggccagccaggagctgcccccaggcttcctgtacaaggtggagaccctgcatgactttgaagctgccaacagtgatgagctgaccctgcagagaggagatgtggtgctggtggtgcccagcgacagcgaggccgaccaggatgctggctggctggtgggcgtgaaggagagtgactggctgcagtacagagacctggccacctacaagggcctcttccctgagaacttcacccggcggctggactag

SEQ ID NO: 143449 - DNA, 1794 bp, synthetic construct
  misc_feature 1..1794: note = Description of Artificial Sequence: Synthetic coding sequence
  source 1..1794: mol_type = other DNA
atgaccaagctgggggaccagcacgccgacaaggccttcaccatccagggcgcccccagcgacagcggccccctgagaattgccaagacccccagccccccagaggagcccagccccctgcccagccccacagccagccccaaccacaccctggccccagccagccctgccccagcccggcccaggagccccagccagaccaggaaaggacctcctgtgccccccctgcccaaggtgacccccaccaaggagctgcagcaggagaacatcatctccttctttgaggacaactttgtgcctgagatctctgtgaccacccccagccagaatgaggtgcctgaggtgaagaaggaggagaccctgctggacctggactttgaccccttcaagccagaggtgaccccagctggcagcgctggggtgacccacagccccatgagccagaccctgccctgggacctgtggaccacccacaccttcaatgatgacatcacagacagcagcgagagcctgagcctgtgcaacctgatcatggaggagaccccagacagcggcctggccgaggagatccagaggagccagaatgacattggagccttcacctggggcccagatgccagcacagacagagtgtcccaggaggtgaccagcggcggctttggagaggacagcgcctgccccagcgagacagagcaggacatccggctgagcaccagcctgctgagcagcgctgactggcccaccgtggccgaggagagcgagcacgcccctggccctgccttccctggaggaaatgagcagctgccccccaagccagcccctgaggccggcgtggccatcgccgcctgtgtggagatggagcagctgtatgaccccctggacagcgacatgcctgccatggacacagctggcctcttcaaggagagccatgaggacatgaagaagagtgatgaggaggaggagaagcagaagatggaggacagcctgtgggccggcgtggaggcctgccagaaggccagcggcggcagcttcaacggcttcacccagccccaggacaccagcctcttcaccatgcagacagaccagagcatgatctgcaacctgatcatccctggagcagatgctgatgctgctgtgggcaccctggtgtctgctgctgagggcgcccctggagaggaggccgaggccgagaaggccaccgtgcctgctggggagggcgtgtccctggaggaggccaagattggaacagagaccacagaaggagctgagagcgcccagcctgaggccgaggagctggaggccaccgtgccccaggagaaggtgatccccagcgtggtgattgaaccagccagcaaccacgaggaggagggggagaatgagatcaccatcggggctgagcccaaggagaccacagaagatgctgcccctcctggccccaccagcgagaccccagagctggccacagagcagaagcccatccaggacccccagcccaccccatctgccccagccatgggcgctgctgaccagctggccagcgcccgggaggccagccaggagctgcccccaggcttcctgtacaaggtggagaccctgcatgactttgaagctgccaacagtgatgagctgaccctgcagagaggagatgtggtgctggtggtgcccagcgacagcgaggccgaccaggatgctggctggctggtgggcgtgaaggagagtgactggctgcagtacagagacctggccacctacaagggcctcttccctgagaacttcacccggcggctggactag

SEQ ID NO: 143450 - DNA, 2088 bp, synthetic construct
  misc_feature 1..2088: note = Description of Artificial Sequence: Synthetic coding sequence
  source 1..2088: mol_type = other DNA
atggctgacatcaagacaggcatctttgccaagaatgtgcagaagaggctgaacagagcccaggagaaggtgctgcagaagctgggcaaggcagatgagaccaaggatgagcagtttgaggagtatgtgcagaacttcaagaggcaggaggccgagggcacccggctgcagcgggagctgcggggctacctggccgccatcaagggcatgcaggaggcctccatgaagctgacagagagcctgcacgaggtgtatgagccagactggtacggcagagaagatgtgaagatggtgggggagaagtgtgatgtgctgtgggaggacttccaccagaagctggtggatggcagcctgctgaccctggacacctacctgggccagttcccagacatcaagaacagaattgccaagaggagcaggaagctggtggactatgattctgcccggcaccacctggaggccctgcagagcagcaagaggaaggatgagagccgcatcagcaaggccgaggaggagttccagaaggcccagaaggtgtttgaggagttcaacgtggacctgcaggaggagctgcccagcctgtggagcagaagagtgggcttctacgtgaacaccttcaagaatgtgagcagcctggaggccaagttccacaaggagattgctgtgctgtgccacaagctgtatgaggtgatgaccaagctgggggaccagcacgccgacaaggccttcaccatccagggcgcccccagcgacagcggccccctgagaattgccaagacccccagccccccagaggagcccagccccctgcccagccccacagccagccccaaccacaccctggccccagccagccctgccccagcccggcccaggagccccagccagaccaggaaaggacctcctgtgccccccctgcccaaggtgacccccaccaaggagctgcagcaggagaacatcatctccttctttgaggacaactttgtgcctgagatctctgtgaccacccccagccagaatgaggtgcctgaggtgaagaaggaggagaccctgctggacctggactttgaccccttcaagccagaggtgaccccagctggcagcgctggggtgacccacagccccatgagccagaccctgccctgggacctgtggaccaccagcacagacctggtgcagcctgccagcggcggcagcttcaacggcttcacccagccccaggacaccagcctcttcaccatgcagacagaccagagcatgatctgcaacctggccgagagcgagcaggccccacccacagagcccaaggccgaggagcccctggccgctgtgaccccagctgtgggcctggacctgggcatggacaccagggctgaggagcctgtggaggaggccgtcatcatccctggagcagatgctgatgctgctgtgggcaccctggtgtctgctgctgagggcgcccctggagaggaggccgaggccgagaaggccaccgtgcctgctggggagggcgtgtccctggaggaggccaagattggaacagagaccacagaaggagctgagagcgcccagcctgaggccgaggagctggaggccaccgtgccccaggagaaggtgatccccagcgtggtgattgaaccagccagcaaccacgaggaggagggggagaatgagatcaccatcggggctgagcccaaggagaccacagaagatgctgcccctcctggccccaccagcgagaccccagagctggccacagagcagaagcccatccaggacccccagcccaccccatctgccccagccatgggcgctgctgaccagctggccagcgcccgggaggccagccaggagctgcccccaggcttcctgtacaaggtggagaccctgcatgactttgaagctgccaacagtgatgagctgaccctgcagagaggagatgtggtgctggtggtgcccagcgacagcgaggccgaccaggatgctggctggctggtgggcgtgaaggagagtgactggctgcagtacagagacctggccacctacaagggcctcttccctgagaacttcacccggcggctggactag

SEQ ID NO: 143451 - DNA, 591 bp, synthetic construct
  misc_feature 1..591: note = Description of Artificial Sequence: Synthetic coding sequence
  source 1..591: mol_type = other DNA
atggaggagaccccagattctggcctggccgaggagatccagaggagccagaatgacatcggggccttcacctggggcccagatgccagcacagacagagtgtcccaggaggtgaccagcggcggctttggagaagattctgcctgccccagcgagacagagcaggacatccggctgagcaccagcctgctgagcagcgctgactggcccaccgtggccgaggagagcgagcacgcccctggccctgccttccctggaggaaatgagcagctgccccccaagccagcccctgaggccggcgtggccatcgccgcctgtgtggagatggagcagctgtatgaccccctggacagcgacatgcctgccatggacacagctggcctcttcaaggagagccatgaggacatgaagaagagtgatgaggaggaggagaagcagaagatggaggacagcctgtgggccggcgtggaggcctgccagaaggccagcggcggcagcttcaacggcttcacccagccccaggacaccagcctcttcaccatgcagacagaccagagcatgatctgcaacctggagatcaccgtgaactag

SEQ ID NO: 143452 - DNA, 1962 bp, synthetic construct
  misc_feature 1..1962: note = Description of Artificial Sequence: Synthetic coding sequence
  source 1..1962: mol_type = other DNA
atggctgacatcaagacaggcatctttgccaagaatgtgcagaagaggctgaacagagcccaggagaaggtgctgcagaagctgggcaaggcagatgagaccaaggatgagcagtttgaggagtatgtgcagaacttcaagaggcaggaggccgagggcacccggctgcagcgggagctgcggggctacctggccgccatcaagggcatgcaggaggcctccatgaagctgacagagagcctgcacgaggtgtatgagccagactggtacggcagagaagatgtgaagatggtgggggagaagtgtgatgtgctgtgggaggacttccaccagaagctggtggatggcagcctgctgaccctggacacctacctgggccagttcccagacatcaagaacagaattgccaagaggagcaggaagctggtggactatgattctgcccggcaccacctggaggccctgcagagcagcaagaggaaggatgagagccgcatcagcaaggccgaggaggagttccagaaggcccagaaggtgtttgaggagttcaacgtggacctgcaggaggagctgcccagcctgtggagcagaagagtgggcttctacgtgaacaccttcaagaatgtgagcagcctggaggccaagttccacaaggagattgctgtgctgtgccacaagctgtatgaggtgatgaccaagctgggggaccagcacgccgacaaggccttcaccatccagggcgcccccagcgacagcggccccctgagaattgccaagacccccagccccccagaggagcccagccccctgcccagccccacagccagccccaaccacaccctggccccagccagccctgccccagcccggcccaggagccccagccagaccaggaaaggacctcctgtgccccccctgcccaaggtgacccccaccaaggagctgcagcaggagaacatcatctccttctttgaggacaactttgtgcctgagatctctgtgaccacccccagccagaatgaggtgcctgaggtgaagaaggaggagaccctgctggacctggactttgaccccttcaagccagaggtgaccccagctggcagcgctggggtgacccacagccccatgagccagaccctgccctgggacctgtggacagctggggtggaggcctgccagaaggccagcggcggcagcttcaacggcttcacccagccccaggacaccagcctcttcaccatgcagacagaccagagcatgatctgcaacctgatcatccctggagcagatgctgatgctgctgtgggcaccctggtgtctgctgctgagggcgcccctggagaggaggccgaggccgagaaggccaccgtgcctgctggggagggcgtgtccctggaggaggccaagattggaacagagaccacagaaggagctgagagcgcccagcctgaggccgaggagctggaggccaccgtgccccaggagaaggtgatccccagcgtggtgattgaaccagccagcaaccacgaggaggagggggagaatgagatcaccatcggggctgagcccaaggagaccacagaagatgctgcccctcctggccccaccagcgagaccccagagctggccacagagcagaagcccatccaggacccccagcccaccccatctgccccagccatgggcgctgctgaccagctggccagcgcccgggaggccagccaggagctgcccccaggcttcctgtacaaggtggagaccctgcatgactttgaagctgccaacagtgatgagctgaccctgcagagaggagatgtggtgctggtggtgcccagcgacagcgaggccgaccaggatgctggctggctggtgggcgtgaaggagagtgactggctgcagtacagagacctggccacctacaagggcctcttccctgagaacttcacccggcggctggactag

SEQ ID NO: 143453 - DNA, 1158 bp, synthetic construct
  misc_feature 1..1158: note = Description of Artificial Sequence: Synthetic coding sequence
  source 1..1158: mol_type = other DNA
atggctgacatcaagacaggcatctttgccaagaatgtgcagaagaggctgaacagagcccaggagaaggtgctgcagaagctgggcaaggcagatgagaccaaggatgagcagtttgaggagtatgtgcagaacttcaagaggcaggaggccgagggcacccggctgcagcgggagctgcggggctacctggccgccatcaagggcatgcaggaggcctccatgaagctgacagagagcctgcacgaggtgtatgagccagactggtacggcagagaagatgtgaagatggtgggggagaagtgtgatgtgctgtgggaggacttccaccagaagctggtggatggcagcctgctgaccctggacacctacctgggccagttcccagacatcaagaacagaattgccaagaggagcaggaagctggtggactatgattctgcccggcaccacctggaggccctgcagagcagcaagaggaaggatgagagccgcatcagcaaggccgaggaggagttccagaaggcccagaaggtgtttgaggagttcaacgtggacctgcaggaggagctgcccagcctgtggagcagaagagtgggcttctacgtgaacaccttcaagaatgtgagcagcctggaggccaagttccacaaggagattgctgtgctgtgccacaagctgtatgaggtgatgaccaagctgggggaccagcacgccgacaaggccttcaccatccagggcgccccccggcagtacctggacagcggccccctgcgcatcgccaagacccccagccccccagaggagcccagccccctgcccagccccacagccagccccaaccacaccctggccccagccagccctgccccagcccggcccaggagccccagccagaccaggaagggcccccctgtgccccccctgcccaaggtgacccccaccaaggagctgcagcaggagaacatcatctccttctttgaggacaactttgtgcctgagatctctgtgaccacccccagccagaatgaggtgcctgaggtgaagaaggaggagaccctgctggacctggactttgaccccttcaagccagaggtgaccccagctggcagcgctggggtgacccacagccccatgagccagacagtgggctggtag

SEQ ID NO: 143454 - DNA, 759 bp, synthetic construct
  misc_feature 1..759: note = Description of Artificial Sequence: Synthetic coding sequence
  source 1..759: mol_type = other DNA
atgagggcccccctgctgcccccagcccctgtggtgctgagcctgctgatcctgggcagcggccactacgccgccggcctggacctgaatgacacctacagcggcaagcgggagcccttcagcggggaccacagcgcagatggctttgaggtgaccagccgctctgagatgagcagcggcagcgagatcagccctgtgtctgagatgcccagcagcagcgagcccagcagtggagctgactatgactacagcgaggagtatgacaatgagccccagatccctggctacatcgtggatgattctgtgcgggtggagcaggtggtgaagccaccccagaacaagacagaaagtgagaacaccagtgacaagcccaagaggaagaagaagggcggcaagaatggcaagaacagaagaaacaggaagaagaagaacccctgcaatgctgagttccagaacttctgcatccacggggagtgcaagtacatcgagcacctggaggccgtgacctgcaagtgccagcaggagtactttggagagcgctgtggggagaagtccatgaagacccacagcatgattgacagcagcctgagcaagatcgccctggccgccatcgccgccttcatgtctgctgtgatcctgacagctgtggccgtcatcaccgtgcagctgcggcggcagtatgtgaggaaatatgaaggagaggccgaggagaggaagaagctgcggcaggagaatggaaatgtgcacgccatcgcctag

SEQ ID NO: 143455 - DNA, 759 bp, synthetic construct; identical to SEQ ID NO: 143454
  misc_feature 1..759: note = Description of Artificial Sequence: Synthetic coding sequence
  source 1..759: mol_type = other DNA

SEQ ID NO: 143456 - DNA, 1536 bp, synthetic construct
  misc_feature 1..1536: note = Description of Artificial Sequence: Synthetic coding sequence
  source 1..1536: mol_type = other DNA
atgaagctgttctggctgctcttcaccatcggcttctgctgggcccagtacagcagcaacacccagcagggccgcaccagcatcgtgcacctgtttgagtggcgctgggtggacatcgccctggagtgtgagcgctacctggcccccaagggctttggaggagtgcaggtgtccccaccaaatgaaaatgtggccatccacaaccccttccggccctggtgggagcgctaccagcctgtgtcctacaagctgtgcaccaggtctggaaatgaagatgagttcaggaacatggtgacccgctgcaacaacgtgggcgtgcgcatctacgtggatgctgtgatcaaccacatgtgtggaaatgctgtgtctgctggcaccagcagcacctgtggcagctacttcaaccctggcagccgggacttccctgctgtgccctacagcggctgggacttcaatgatggcaagtgcaagacaggcagcggggacatcgagaactacaatgatgccacccaggtgcgggactgccgcctgagcggcctgctggacctggccctgggcaaggactatgtgcgcagcaagattgctgagtacatgaaccacctgattgacatcggcgtggccggcttcagaattgatgccagcaagcacatgtggccaggggacatcaaggccatcctggacaagctgcacaacctgaacagcaactggttccctgagggcagcaagcccttcatctaccaggaggtgattgacctgggcggggagcccatcaagagcagtgactactttggaaatggccgggtgacagagttcaagtatggagccaagctgggcaccgtcatcaggaagtggaatggagagaagatgagctacctgaagaactggggcgagggctggggcttcatgcccagcgaccgggccctggtgtttgtggacaaccacgacaaccagaggggccacggggccggcggggccagcatcctgaccttctgggatgcccggctgtacaagatggctgtgggcttcatgctggcccacccctacggcttcaccagggtgatgagcagctaccgctggccccgctactttgaaaatggcaaggatgtgaatgactgggtgggccccccaaatgacaatggagtgaccaaggaggtgaccatcaacccagacaccacctgtggaaatgactgggtgtgtgagcaccgctggaggcagatccggaacatggtgaacttcagaaatgtggtggatggccagcccttcaccaactggtatgacaatggcagcaaccaggtggccttcggccggggcaacagaggcttcatcgtgttcaacaatgatgactggaccttcagcctgaccctgcagacaggcctgcctgctggcacctactgtgatgtgatcagcggggacaagatcaatggaaactgcaccggcatcaagatctacgtgtctgatgatggcaaggcccacttcagcatcagcaacagcgctgaggaccccttcatcgccatccatgctgagagcaagctgtag

SEQ ID NO: 143457 - DNA, 318 bp, synthetic construct
  misc_feature 1..318: note = Description of Artificial Sequence: Synthetic coding sequence
  source 1..318: mol_type = other DNA
atgaagctgttctggctgctcttcaccatcggcttctgctgggcccagtacagcagcaacacccagcagggccgcaccagcatcgtgcacctgtttgagtggcgctgggtggacatcgccctggagtgtgagcgctacctggcccccaagggctttggaggagtgcaggtgtccccaccaaatgaaaatgtggccatccacaaccccttccggccctggtgggagcgctaccagcctgtgtcctacaagctgtgcaccaggtctggaaatgaagatgagttcaggaacatggtgacccgctgcaacaacgtgggctag

SEQ ID NO: 143458 - DNA, 681 bp, synthetic construct
  misc_feature 1..681: note = Description of Artificial Sequence: Synthetic coding sequence
  source 1..681: mol_type = other DNA
atgaagctgttctggctgctcttcaccatcggcttctgctgggcccagtacagcagcaacacccagcagggccgcaccagcatcgtgcacctgtttgagtggcgctgggtggacatcgccctggagtgtgagcgctacctggcccccaagggctttggaggagtgcaggtgtccccaccaaatgaaaatgtggccatccacaaccccttccggccctggtgggagcgctaccagcctgtgtcctacaagctgtgcaccaggtctggaaatgaagatgagttcaggaacatggtgacccgctgcaacaacgtgggcgtgcgcatctacgtggatgctgtgatcaaccacatgtgtggaaatgctgtgtctgctggcaccagcagcacctgtggcagctacttcaaccctggcagccgggacttccctgctgtgccctacagcggctgggacttcaatgatggcaagtgcaagacaggcagcggggacatcgagaactacaatgatgccacccaggtgcgggactgccgcctgagcggcctgctggacctggccctgggcaaggactatgtgcgcagcaagattgctgagtacatgaaccacctgattgacatcggcgtggccggcttcagaattgatgccagcaagcacatgtggccaggggacatcaaggccatcctgtag

SEQ ID NO: 143459 - DNA, 1536 bp, synthetic construct; identical to SEQ ID NO: 143456
  misc_feature 1..1536: note = Description of Artificial Sequence: Synthetic coding sequence
  source 1..1536: mol_type = other DNA

SEQ ID NO: 143460 - DNA, 1536 bp, synthetic construct; identical to SEQ ID NO: 143456
  misc_feature 1..1536: note = Description of Artificial Sequence: Synthetic coding sequence
  source 1..1536: mol_type = other DNA

SEQ ID NO: 143461 - DNA, 318 bp, synthetic construct; identical to SEQ ID NO: 143457
  misc_feature 1..318: note = Description of Artificial Sequence: Synthetic coding sequence
  source 1..318: mol_type = other DNA

SEQ ID NO: 143462 - DNA, 681 bp, synthetic construct; identical to SEQ ID NO: 143458
  misc_feature 1..681: note = Description of Artificial Sequence: Synthetic coding sequence
  source 1..681: mol_type = other DNA

SEQ ID NO: 143463 - DNA, 1536 bp, synthetic construct; identical to SEQ ID NO: 143456
  misc_feature 1..1536: note = Description of Artificial Sequence: Synthetic coding sequence
  source 1..1536: mol_type = other DNA

SEQ ID NO: 143464 - DNA, 1536 bp, synthetic construct
  misc_feature 1..1536: note = Description of Artificial Sequence: Synthetic coding sequence
  source 1..1536: mol_type = other DNA
atgaagttcttcctgctgctcttcaccatcggcttctgctgggcccagtacagccccaacacccagcagggccgcaccagcatcgtgcacctgtttgagtggcgctgggtggacatcgccctggagtgtgagcgctacctggcccccaagggctttggaggagtgcaggtgtccccaccaaatgaaaatgtggccatctacaaccccttccggccctggtgggagcgctaccagcctgtgtcctacaagctgtgcaccaggtctggaaatgaagatgagttcaggaacatggtgacccgctgcaacaacgtgggcgtgcgcatctacgtggatgctgtgatcaaccacatgtgtggaaatgctgtgtctgctggcaccagcagcacctgtggcagctacttcaaccctggcagccgggacttccctgctgtgccctacagcggctgggacttcaatgatggcaagtgcaagacaggcagcggggacatcgagaactacaatgatgccacccaggtgcgggactgccgcctgaccggcctgctggacctggccctggagaaggactatgtgcgcagcaagattgctgagtacatgaaccacctgattgacatcggcgtggccggcttccggctggatgccagcaagcacatgtggccaggggacatcaaggccatcctggacaagctgcacaacctgaacagcaactggttccctgctggcagcaagcccttcatctaccaggaggtgattgacctgggcggggagcccatcaagagcagtgactactttggaaatggccgggtgacagagttcaagtatggagccaagctgggcaccgtcatcaggaagtggaatggagagaagatgagctacctgaagaactggggcgagggctggggctttgtgcccagcgaccgggccctggtgtttgtggacaaccacgacaaccagaggggccacggggccggcggggccagcatcctgaccttctgggatgcccggctgtacaagatggctgtgggcttcatgctggcccacccctacggcttcaccagggtgatgagcagctaccgctggccccggcagttccagaatggaaatgatgtgaatgactgggtgggcccccccaacaacaatggagtcatcaaggaggtgaccatcaacccagacaccacctgtggaaatgactgggtgtgtgagcaccgctggaggcagatccggaacatggtgatcttcagaaatgtggtggatggccagcccttcaccaactggtatgacaatggcagcaaccaggtggccttcggccggggcaacagaggcttcatcgtgttcaacaatgatgactggagcttcagcctgaccctgcagacaggcctgcctgctggcacctactgtgatgtgatcagcggggacaagatcaatggaaactgcaccggcatcaagatctacgtgtctgatgatggcaaggcccacttcagcatcagcaacagcgctgaggaccccttcatcgccatccatgctgagagcaagctgtag

SEQ ID NO: 143465 - DNA, 1536 bp, synthetic construct
  misc_feature 1..1536: note = Description of Artificial Sequence: Synthetic coding sequence
  source 1..1536: mol_type = other DNA
atgaagttcttcctgctgctcttcaccatcggcttctgctgggcccagtacagccccaacacccagcagggccgcaccagcatcgtgcacctgtttgagtggcgctgggtggacatcgccctggagtgtgagcgctacctggcccccaagggctttggaggagtgcaggtgtccccaccaaatgaaaatgtggccatccacaaccccttccggccctggtgggagcgctaccagcctgtgtcctacaagctgtgcaccaggtctggaaatgaagatgagttcaggaacatggtgacccgctgcaacaacgtgggcgtgcgcatctacgtggatgctgtgatcaaccacatgtctggaaatgctgtgtctgctggcaccagcagcacctgtggcagctacttcaaccctggcagccgggacttccctgctgtgccctacagcggctgggacttcaatgatggcaagtgcaagacaggcagcggggacatcgagaactacaatgatgccacccaggtgcgggactgccgcctggtgggcctgctggacctggccctggagaaggactatgtgcgcagcaagattgctgagtacatgaaccacctgattgacatcggcgtggccggcttccggctggatgccagcaagcacatgtggccaggggacatcaaggccatcctggacaagctgcacaacctgaacagcaactggttccctgctggcagcaagcccttcatctaccaggaggtgattgacctgggcggggagcccatcaagagcagtgactactttggaaatggccgggtgacagagttcaagtatggagccaagctgggcaccgtcatcaggaagtggaatggagagaagatgagctacctgaagaactggggcgagggctggggcttcatgcccagcgaccgggccctggtgtttgtggacaaccacgacaaccagaggggccacggggccggcggggccagcatcctgaccttctgggatgcccggctgtacaagatggctgtgggcttcatgctggcccacccctacggcttcaccagggtgatgagcagctaccgctggccccggcagttccagaatggaaatgatgtgaatgactgggtgggcccccccaacaacaatggagtcatcaaggaggtgaccatcaacccagacaccacctgtggaaatgactgggtgtgtgagcaccgctggaggcagatccggaacatggtgaacttcagaaatgtggtggatggccagcccttcaccaactggtatgacaatggcagcaaccaggtggccttcggccggggcaacagaggcttcatcgtgttcaacaatgatgactggaccttcagcctgaccctgcagacaggcctgcctgctggcacctactgtgatgtgatcagcggggacaagatcaatggaaactgcaccggcatcaagatctacgtgtctgatgatggcaaggcccacttcagcatcagcaacagcgctgaggaccccttcatcgccatccatgctgagagcaagctgtag

SEQ ID NO: 143466 - DNA, 291 bp, synthetic construct
  misc_feature 1..291: note = Description of Artificial Sequence: Synthetic coding sequence
  source 1..291: mol_type = other DNA
atgaagttcttcctgctgctcttcaccatcggcttctgctgggcccagtacagccccaacacccagcagggccgcaccagcatcgtgcacctgtttgagtggcgctgggtggacatcgccctggagtgtgagcgctacctggcccccaagggctttggaggagtgcaggtgtccccaccaaatgaaaatgtggccatccacaaccccttccggccctggtgggagcgctaccagcctgtgtcctacaagctgtgcaccaggtctggaaatgaagatgagttcagaaattag

SEQ ID NO: 143467 - DNA, 261 bp, synthetic construct
  misc_feature 1..261: note = Description of Artificial Sequence: Synthetic coding sequence
  source 1..261: mol_type = other DNA
atgaagttcttcctgctgctcttcaccatcggcttctgctgggcccagtacagccccaacacccagcagggccgcaccagcatcgtgcacctgtttgagtggcgctgggtggacatcgccctggagtgtgagcgctacctggcccccaagggctttggaggagtgcaggtgtccccaccaaatgaaaatgtggccatccacaaccccttccggccctggtgggagcgctaccagcctgtgtcctacaagctgtgcacctag

SEQ ID NO: 143468 - DNA, 2313 bp, synthetic construct
  misc_feature 1..2313: note = Description of Artificial Sequence: Synthetic coding sequence
  source 1..2313: mol_type = other DNA
atgctgcccggcctggccctgctgctgctggccgcctggacagcccgggccctggaggtgcccacagatggaaatgccggcctgctggccgagccccagatcgccatgttctgtggccgcctgaacatgcacatgaatgtgcagaatggcaagtgggacagcgaccccagcggcaccaagacctgcatcgacaccaaggagggcatcctgcagtactgccaggaggtgtacccagagctgcagatcaccaacgtggtggaggccaaccagcctgtgaccatccagaactggtgcaagaggggcaggaagcagtgcaagacccacccccactttgtgatcccctaccgctgcctggtgggggagtttgtgtctgatgccctgctggtgcctgacaagtgcaagttcctgcaccaggagaggatggatgtgtgtgagacccacctgcactggcacacagtggccaaggagacctgcagcgagaagagcaccaacctgcatgactatggcatgctgctgccctgtggcatcgacaagttccggggcgtggagtttgtgtgctgccccctggccgaggagagtgacaacgtggacagcgcagatgctgaagaagatgacagtgatgtgtggtggggcggcgctgacacagattatgcagatggcagcgaggacaaggtggtggaggtggccgaggaggaggaggtggccgaggtggaggaggaggaggctgatgatgatgaagatgatgaagatggagatgaggtggaggaggaggccgaggagccctatgaggaggccacagagaggaccaccagcatcgccaccaccaccaccaccaccacagagagcgtggaggaggtggtgcgggaggtgtgcagcgagcaggccgagaccggcccctgccgggccatgatcagccgctggtactttgatgtgacagagggcaaatgtgcccccttcttctatggaggctgcggcggcaacagaaacaactttgacacagaggagtactgcatggctgtgtgtggcagcgccatgagccagagcctgctgaagaccacccaggagcccctggcccgggaccctgtgaagctgcccaccacagctgccagcaccccagatgctgtggacaagtacctggagaccccaggagatgaaaatgagcacgcccacttccagaaggccaaggagcggctggaggccaagcaccgggagaggatgagccaggtgatgagggagtgggaggaggccgagcggcaggccaagaacctgcccaaggctgacaagaaggccgtcatccagcacttccaggagaaggtggagagcctggagcaggaggccgccaatgaaaggcagcagctggtggagacccacatggcccgggtggaggccatgctgaatgacagaagaaggctggccctggagaactacatcacagccctgcaggccgtgcccccccggcccaggcatgtgttcaacatgctgaagaagtatgtgcgggcagagcagaaggaccggcagcacaccctgaagcactttgagcacgtgaggatggtggaccccaagaaggccgcccagatccgcagccaggtgatgacccacctgcgggtcatctatgaaagaatgaaccagagcctgagcctgctgtacaacgtgcctgctgtggccgaggagatccaggatgaggtggatgagctgctgcagaaggagcagaactacagtgatgatgtgctggccaacatgatcagcgagccccgcatctcctatggaaatgatgccctgatgcccagcctgacagagaccaagaccaccgtggagctgctgcctgtgaatggagagttcagcctggatgacctgcagccctggcacagctttggagctgacagcgtgcctgccaacacagaaaatgaggtggagcctgtggatgcccggcctgctgctgaccggggcctgaccacccggcccggcagcggcctgaccaacatcaagacagaggagatcagcgaggtgaagatggatgctgagttcagacatgattctggctatgaggtgcaccaccagaagctggtgttctttgctgaagatgtgggcagcaacaagggggccatcatcggcctgatggtgggcggcgtggtgattgccaccgtcatcgtcatcaccctggtgatgctgaagaagaagcagtacaccagcatccaccacggcgtggtggaggtggatgctgctgtgaccccagaggagcggcacctgagcaagatgcagcagaatggctatgagaaccccacctacaagttctttgagcagatgcagaactag

SEQ ID NO: 143469 - DNA, 2088 bp, synthetic construct
  misc_feature 1..2088: note = Description of Artificial Sequence: Synthetic coding sequence
  source 1..2088: mol_type = other DNA
atgctgcccggcctggccctgctgctgctggccgcctggacagcccgggccctggaggtgcccacagatggaaatgccggcctgctggccgagccccagatcgccatgttctgtggccgcctgaacatgcacatgaatgtgcagaatggcaagtgggacagcgaccccagcggcaccaagacctgcatcgacaccaaggagggcatcctgcagtactgccaggaggtgtacccagagctgcagatcaccaacgtggtggaggccaaccagcctgtgaccatccagaactggtgcaagaggggcaggaagcagtgcaagacccacccccactttgtgatcccctaccgctgcctggtgggggagtttgtgtctgatgccctgctggtgcctgacaagtgcaagttcctgcaccaggagaggatggatgtgtgtgagacccacctgcactggcacacagtggccaaggagacctgcagcgagaagagcaccaacctgcatgactatggcatgctgctgccctgtggcatcgacaagttccggggcgtggagtttgtgtgctgccccctggccgaggagagtgacaacgtggacagcgcagatgctgaagaagatgacagtgatgtgtggtggggcggcgctgacacagattatgcagatggcagcgaggacaaggtggtggaggtggccgaggaggaggaggtggccgaggtggaggaggaggaggctgatgatgatgaagatgatgaagatggagatgaggtggaggaggaggccgaggagccctatgaggaggccacagagaggaccaccagcatcgccaccaccaccaccaccaccacagagagcgtggaggaggtggtgcgggtgcccaccacagctgccagcaccccagatgctgtggacaagtacctggagaccccaggagatgaaaatgaacatgcccacttccagaaggccaaggagcggctggaggccaagcaccgggagaggatgagccaggtgatgagggagtgggaggaggccgagcggcaggccaagaacctgcccaaggctgacaagaaggctgtgatccagcacttccaggagaaggtggagagcctggagcaggaggccgccaatgaaaggcagcagctggtggagacccacatggcccgggtggaggccatgctgaatgacagaagaaggctggccctggagaactacatcacagccctgcaggccgtgcccccccggcccaggcatgtgttcaacatgctgaagaagtatgtgcgggcagagcagaaggaccggcagcacaccctgaagcactttgaacatgtgaggatggtggaccccaagaaggccgcccagatccgcagccaggtgatgacccacctgcgggtcatctatgaaagaatgaaccagagcctgagcctgctgtacaacgtgcctgctgtggccgaggagatccaggatgaggtggatgagctgctgcagaaggagcagaactacagtgatgatgtgctggccaacatgatcagcgagccccgcatctcctatggaaatgatgccctgatgcccagcctgacagagaccaagaccaccgtggagctgctgcctgtgaatggagagttcagcctggatgacctgcagccctggcacagctttggagctgacagcgtgcctgccaacacagaaaatgaggtggagcctgtggatgcccggcctgctgctgaccggggcctgaccaccaggcctggcagcggcctgaccaacatcaagacagaggagatcagcgaggtgaagatggatgctgagttcagacatgacagcggctatgaggtgcaccaccagaagctggtgttctttgctgaagatgtgggcagcaacaagggggccatcatcggcctgatggtgggcggcgtggtgattgccaccgtgattgtcatcaccctggtgatgctgaagaagaagcagtacaccagcatccaccacggcgtggtggaggtggatgctgctgtgaccccagaggagcggcacctgagcaagatgcagcagaatggctatgagaaccccacctacaagttctttgagcagatgcagaactag

SEQ ID NO: 143470 - DNA, 1920 bp, synthetic construct
  misc_feature 1..1920: note = Description of Artificial Sequence: Synthetic coding sequence
  source 1..1920: mol_type = other DNA
atgctgcccggcctggccctgctgctgctggccgcctggacagcccgggccctggaggtgtacccagagctgcagatcaccaacgtggtggaggccaaccagcctgtgaccatccagaactggtgcaagaggggcaggaagcagtgcaagacccacccccactttgtgatcccctaccgctgcctggtgggggagtttgtgtctgatgccctgctggtgcctgacaagtgcaagttcctgcaccaggagaggatggatgtgtgtgagacccacctgcactggcacacagtggccaaggagacctgcagcgagaagagcaccaacctgcatgactatggcatgctgctgccctgtggcatcgacaagttccggggcgtggagtttgtgtgctgccccctggccgaggagagtgacaacgtggacagcgcagatgctgaagaagatgacagtgatgtgtggtggggcggcgctgacacagattatgcagatggcagcgaggacaaggtggtggaggtggccgaggaggaggaggtggccgaggtggaggaggaggaggctgatgatgatgaagatgatgaagatggagatgaggtggaggaggaggccgaggagccctatgaggaggccacagagaggaccaccagcatcgccaccaccaccaccaccaccacagagagcgtggaggaggtggtgcgggtgcccaccacagctgccagcaccccagatgctgtggacaagtacctggagaccccaggagatgaaaatgaacatgcccacttccagaaggccaaggagcggctggaggccaagcaccgggagaggatgagccaggtgatgagggagtgggaggaggccgagcggcaggccaagaacctgcccaaggctgacaagaaggctgtgatccagcacttccaggagaaggtggagagcctggagcaggaggccgccaatgaaaggcagcagctggtggagacccacatggcccgggtggaggccatgctgaatgacagaagaaggctggccctggagaactacatcacagccctgcaggccgtgcccccccggcccaggcatgtgttcaacatgctgaagaagtatgtgcgggcagagcagaaggaccggcagcacaccctgaagcactttgaacatgtgaggatggtggaccccaagaaggccgcccagatccgcagccaggtgatgacccacctgcgggtcatctatgaaagaatgaaccagagcctgagcctgctgtacaacgtgcctgctgtggccgaggagatccaggatgaggtggatgagctgctgcagaaggagcagaactacagtgatgatgtgctggccaacatgatcagcgagccccgcatctcctatggaaatgatgccctgatgcccagcctgacagagaccaagaccaccgtggagctgctgcctgtgaatggagagttcagcctggatgacctgcagccctggcacagctttggagctgacagcgtgcctgccaacacagaaaatgaggtggagcctgtggatgcccggcctgctgctgaccggggcctgaccaccaggcctggcagcggcctgaccaacatcaagacagaggagatcagcgaggtgaagatggatgctgagttcagacatgacagcggctatgaggtgcaccaccagaagctggtgttctttgctgaagatgtgggcagcaacaagggggccatcatcggcctgatggtgggcggcgtggtgattgccaccgtgattgtcatcaccctggtgatgctgaagaagaagcagtacaccagcatccaccacggcgtggtggaggtggatgctgctgtgaccccagaggagcggcacctgagcaagatgcagcagaatggctatgagaaccccacctacaagttctttgagcagatgcagaactag

SEQ ID NO: 143471 - DNA, 2256 bp, synthetic construct
  misc_feature 1..2256: note = Description of Artificial Sequence: Synthetic coding sequence
  source 1..2256: mol_type = other DNA
atgctgcccggcctggccctgctgctgctggccgcctggacagcccgggccctggaggtgcccacagatggaaatgccggcctgctggccgagccccagatcgccatgttctgtggccgcctgaacatgcacatgaatgtgcagaatggcaagtgggacagcgaccccagcggcaccaagacctgcatcgacaccaaggagggcatcctgcagtactgccaggaggtgtacccagagctgcagatcaccaacgtggtggaggccaaccagcctgtgaccatccagaactggtgcaagaggggcaggaagcagtgcaagacccacccccactttgtgatcccctaccgctgcctggtgggggagtttgtgtctgatgccctgctggtgcctgacaagtgcaagttcctgcaccaggagaggatggatgtgtgtgagacccacctgcactggcacacagtggccaaggagacctgcagcgagaagagcaccaacctgcatgactatggcatgctgctgccctgtggcatcgacaagttccggggcgtggagtttgtgtgctgccccctggccgaggagagtgacaacgtggacagcgcagatgctgaagaagatgacagtgatgtgtggtggggcggcgctgacacagattatgcagatggcagcgaggacaaggtggtggaggtggccgaggaggaggaggtggccgaggtggaggaggaggaggctgatgatgatgaagatgatgaagatggagatgaggtggaggaggaggccgaggagccctatgaggaggccacagagaggaccaccagcatcgccaccaccaccaccaccaccacagagagcgtggaggaggtggtgcgggaggtgtgcagcgagcaggccgagaccggcccctgccgggccatgatcagccgctggtactttgatgtgacagagggcaaatgtgcccccttcttctatggaggctgcggcggcaacagaaacaactttgacacagaggagtactgcatggctgtgtgtggcagcgccatccccaccacagctgccagcaccccagatgctgtggacaagtacctggagaccccaggagatgaaaatgaacatgcccacttccagaaggccaaggagcggctggaggccaagcaccgggagaggatgagccaggtgatgagggagtgggaggaggccgagcggcaggccaagaacctgcccaaggctgacaagaaggctgtgatccagcacttccaggagaaggtggagagcctggagcaggaggccgccaatgaaaggcagcagctggtggagacccacatggcccgggtggaggccatgctgaatgacagaagaaggctggccctggagaactacatcacagccctgcaggccgtgcccccccggcccaggcatgtgttcaacatgctgaagaagtatgtgcgggcagagcagaaggaccggcagcacaccctgaagcactttgaacatgtgaggatggtggaccccaagaaggccgcccagatccgcagccaggtgatgacccacctgcgggtcatctatgaaagaatgaaccagagcctgagcctgctgtacaacgtgcctgctgtggccgaggagatccaggatgaggtggatgagctgctgcagaaggagcagaactacagtgatgatgtgctggccaacatgatcagcgagccccgcatctcctatggaaatgatgccctgatgcccagcctgacagagaccaagaccaccgtggagctgctgcctgtgaatggagagttcagcctggatgacctgcagccctggcacagctttggagctgacagcgtgcctgccaacacagaaaatgaggtggagcctgtggatgcccggcctgctgctgaccggggcctgaccaccaggcctggcagcggcctgaccaacatcaagacagaggagatcagcgaggtgaagatggatgctgagttcagacatgacagcggctatgaggtgcaccaccagaagctggtgttctttgctgaagatgtgggcagcaacaagggggccatcatcggcctgatggtgggcggcgtggtgattgccaccgtgattgtcatcaccctggtgatgctgaagaagaagcagtacaccagcatccaccacggcgtggtggaggtggatgctgctgtgaccccagaggagcggcacctgagcaagatgcagcagaatggctatgagaaccccacctacaagttctttgagcagatgcagaactag

SEQ ID NO: 143472 - DNA, 2259 bp, synthetic construct
  misc_feature 1..2259: note = Description of Artificial Sequence: Synthetic coding sequence
  source 1..2259: mol_type = other DNA
atgctgcccggcctggccctgctgctgctggccgcctggacagcccgggccctggaggtgcccacagatggaaatgccggcctgctggccgagccccagatcgccatgttctgtggccgcctgaacatgcacatgaatgtgcagaatggcaagtgggacagcgaccccagcggcaccaagacctgcatcgacaccaaggagggcatcctgcagtactgccaggaggtgtacccagagctgcagatcaccaacgtggtggaggccaaccagcctgtgaccatccagaactggtgcaagaggggcaggaagcagtgcaagacccacccccactttgtgatcccctaccgctgcctggtgggggagtttgtgtctgatgccctgctggtgcctgacaagtgcaagttcctgcaccaggagaggatggatgtgtgtgagacccacctgcactggcacacagtggccaaggagacctgcagcgagaagagcaccaacctgcatgactatggcatgctgctgccctgtggcatcgacaagttccggggcgtggagtttgtgtgctgccccctggccgaggagagtgacaacgtggacagcgcagatgctgaagaagatgacagtgatgtgtggtggggcggcgctgacacagattatgcagatggcagcgaggacaaggtggtggaggtggccgaggaggaggaggtggccgaggtggaggaggaggaggctgatgatgatgaagatgatgaagatggagatgaggtggaggaggaggccgaggagccctatgaggaggccacagagaggaccaccagcatcgccaccaccaccaccaccaccacagagagcgtggaggaggtggtgcgggaggtgtgcagcgagcaggccgagaccggcccctgccgggccatgatcagccgctggtactttgatgtgacagagggcaaatgtgcccccttcttctatggaggctgcggcggcaacagaaacaactttgacacagaggagtactgcatggctgtgtgtggcagcgccatgagccagagcctgctgaagaccacccaggagcccctggcccgggaccctgtgaagctgcccaccacagctgccagcaccccagatgctgtggacaagtacctggagaccccaggagatgaaaatgagcacgcccacttccagaaggccaaggagcggctggaggccaagcaccgggagaggatgagccaggtgatgagggagtgggaggaggccgagcggcaggccaagaacctgcccaaggctgacaagaaggccgtcatccagcacttccaggagaaggtggagagcctggagcaggaggccgccaatgaaaggcagcagctggtggagacccacatggcccgggtggaggccatgctgaatgacagaagaaggctggccctggagaactacatcacagccctgcaggccgtgcccccccggcccaggcatgtgttcaacatgctgaagaagtatgtgcgggcagagcagaaggaccggcagcacaccctgaagcactttgagcacgtgaggatggtggaccccaagaaggccgcccagatccgcagccaggtgatgacccacctgcgggtcatctatgaaagaatgaaccagagcctgagcctgctgtacaacgtgcctgctgtggccgaggagatccaggatgaggtggatgagctgctgcagaaggagcagaactacagtgatgatgtgctggccaacatgatcagcgagccccgcatctcctatggaaatgatgccctgatgcccagcctgacagagaccaagaccaccgtggagctgctgcctgtgaatggagagttcagcctggatgacctgcagccctggcacagctttggagctgacagcgtgcctgccaacacagaaaatgaaggcagcggcctgaccaacatcaagacagaggagatcagcgaggtgaagatggatgctgagttcagacatgattctggctatgaggtgcaccaccagaagctggtgttctttgctgaagatgtgggcagcaacaagggggccatcatcggcctgatggtgggcggcgtggtgattgccaccgtcatcgtcatcaccctggtgatgctgaagaagaagcagtacaccagcatccaccacggcgtggtggaggtggatgctgctgtgaccccagaggagcggcacctgagcaagatgcagcagaatggctatgagaaccccacctacaagttctttgagcagatgcagaactag

SEQ ID NO: 143473 - DNA, 2145 bp, synthetic construct
  misc_feature 1..2145: note = Description of Artificial Sequence: Synthetic coding sequence
  source 1..2145: mol_type = other DNA
atgctgcccggcctggccctgctgctgctggccgcctggacagcccgggccctggaggtgcccacagatggaaatgccggcctgctggccgagccccagatcgccatgttctgtggccgcctgaacatgcacatgaatgtgcagaatggcaagtgggacagcgaccccagcggcaccaagacctgcatcgacaccaaggagggcatcctgcagtactgccaggaggtgtacccagagctgcagatcaccaacgtggtggaggccaaccagcctgtgaccatccagaactggtgcaagaggggcaggaagcagtgcaagacccacccccactttgtgatcccctaccgctgcctggtgggggagtttgtgtctgatgccctgctggtgcctgacaagtgcaagttcctgcaccaggagaggatggatgtgtgtgagacccacctgcactggcacacagtggccaaggagacctgcagcgagaagagcaccaacctgcatgactatggcatgctgctgccctgtggcatcgacaagttccggggcgtggagtttgtgtgctgccccctggccgaggagagtgacaacgtggacagcgcagatgctgaagaagatgacagtgatgtgtggtggggcggcgctgacacagattatgcagatggcagcgaggacaaggtggtggaggtggccgaggaggaggaggtggccgaggtggaggaggaggaggctgatgatgatgaagatgatgaagatggagatgaggtggaggaggaggccgaggagccctatgaggaggccacagagaggaccaccagcatcgccaccaccaccaccaccaccacagagagcgtggaggaggtggtgcgggtgtcccagagcctgctgaagaccacccaggagcccctggcccgggaccctgtgaagctgcccaccacagctgccagcaccccagatgctgtggacaagtacctggagaccccaggagatgaaaatgagcacgcccacttccagaaggccaaggagcggctggaggccaagcaccgggagaggatgagccaggtgatgagggagtgggaggaggccgagcggcaggccaagaacctgcccaaggctgacaagaaggccgtcatccagcacttccaggagaaggtggagagcctggagcaggaggccgccaatgaaaggcagcagctggtggagacccacatggcccgggtggaggccatgctgaatgacagaagaaggctggccctggagaactacatcacagccctgcaggccgtgcccccccggcccaggcatgtgttcaacatgctgaagaagtatgtgcgggcagagcagaaggaccggcagcacaccctgaagcactttgagcacgtgaggatggtggaccccaagaaggccgcccagatccgcagccaggtgatgacccacctgcgggtcatctatgaaagaatgaaccagagcctgagcctgctgtacaacgtgcctgctgtggccgaggagatccaggatgaggtggatgagctgctgcagaaggagcagaactacagtgatgatgtgctggccaacatgatcagcgagccccgcatctcctatggaaatgatgccctgatgcccagcctgacagagaccaagaccaccgtggagctgctgcctgtgaatggagagttcagcctggatgacctgcagccctggcacagctttggagctgacagcgtgcctgccaacacagaaaatgaggtggagcctgtggatgcccggcctgctgctgaccggggcctgaccacccggcccggcagcggcctgaccaacatcaagacagaggagatcagcgaggtgaagatggatgctgagttcagacatgattctggctatgaggtgcaccaccagaagctggtgttctttgctgaagatgtgggcagcaacaagggggccatcatcggcctgatggtgggcggcgtggtgattgccaccgtcatcgtcatcaccctggtgatgctgaagaagaagcagtacaccagcatccaccacggcgtggtggaggtggatgctgctgtgaccccagaggagcggcacctgagcaagatgcagcagaatggctatgagaaccccacctacaagttctttgagcagatgcagaactag

SEQ ID NO: 143474 - DNA, 2145 bp, synthetic construct
  misc_feature 1..2145: note = Description of Artificial Sequence: Synthetic coding sequence
  source 1..2145: mol_type = other DNA
atgctgcccggcctggccctgctgctgctggccgcctggacagcccgggccctggaggtgtacccagagctgcagatcaccaacgtggtggaggccaaccagcctgtgaccatccagaactggtgcaagaggggcaggaagcagtgcaagacccacccccactttgtgatcccctaccgctgcctggtgggggagtttgtgtctgatgccctgctggtgcctgacaagtgcaagttcctgcaccaggagaggatggatgtgtgtgagacccacctgcactggcacacagtggccaaggagacctgcagcgagaagagcaccaacctgcatgactatggcatgctgctgccctgtggcatcgacaagttccggggcgtggagtttgtgtgctgccccctggccgaggagagtgacaacgtggacagcgcagatgctgaagaagatgacagtgatgtgtggtggggcggcgctgacacagattatgcagatggcagcgaggacaaggtggtggaggtggccgaggaggaggaggtggccgaggtggaggaggaggaggctgatgatgatgaagatgatgaagatggagatgaggtggaggaggaggccgaggagccctatgaggaggccacagagaggaccaccagcatcgccaccaccaccaccaccaccacagagagcgtggaggaggtggtgcgggaggtgtgcagcgagcaggccgagaccggcccctgccgggccatgatcagccgctggtactttgatgtgacagagggcaaatgtgcccccttcttctatggaggctgcggcggcaacagaaacaactttgacacagaggagtactgcatggctgtgtgtggcagcgccatgagccagagcctgctgaagaccacccaggagcccctggcccgggaccctgtgaagctgcccaccacagctgccagcaccccagatgctgtggacaagtacctggagaccccaggagatgaaaatgagcacgcccacttccagaaggccaaggagcggctggaggccaagcaccgggagaggatgagccaggtgatgagggagtgggaggaggccgagcggcaggccaagaacctgcccaaggctgacaagaaggccgtcatccagcacttccaggagaaggtggagagcctggagcaggaggccgccaatgaaaggcagcagctggtggagacccacatggcccgggtggaggccatgctgaatgacagaagaaggctggccctggagaactacatcacagccctgcaggccgtgcccccccggcccaggcatgtgttcaacatgctgaagaagtatgtgcgggcagagcagaaggaccggcagcacaccctgaagcactttgagcacgtgaggatggtggaccccaagaaggccgcccagatccgcagccaggtgatgacccacctgcgggtcatctatgaaagaatgaaccagagcctgagcctgctgtacaacgtgcctgctgtggccgaggagatccaggatgaggtggatgagctgctgcagaaggagcagaactacagtgatgatgtgctggccaacatgatcagcgagccccgcatctcctatggaaatgatgccctgatgcccagcctgacagagaccaagaccaccgtggagctgctgcctgtgaatggagagttcagcctggatgacctgcagccctggcacagctttggagctgacagcgtgcctgccaacacagaaaatgaggtggagcctgtggatgcccggcctgctgctgaccggggcctgaccacccggcccggcagcggcctgaccaacatcaagacagaggagatcagcgaggtgaagatggatgctgagttcagacatgattctggctatgaggtgcaccaccagaagctggtgttctttgctgaagatgtgggcagcaacaagggggccatcatcggcctgatggtgggcggcgtggtgattgccaccgtcatcgtcatcaccctggtgatgctgaagaagaagcagtacaccagcatccaccacggcgtggtggaggtggatgctgctgtgaccccagaggagcggcacctgagcaagatgcagcagaatggctatgagaaccccacctacaagttctttgagcagatgcagaactag

SEQ ID NO: 143475 - DNA, 2241 bp, synthetic construct
  misc_feature 1..2241: note = Description of Artificial Sequence: Synthetic coding sequence
  source 1..2241: mol_type = other DNA
atggaccagctggaggacctgctggtgctcttcatcaactacgtgcccacagatggaaatgccggcctgctggccgagccccagatcgccatgttctgtggccgcctgaacatgcacatgaatgtgcagaatggcaagtgggacagcgaccccagcggcaccaagacctgcatcgacaccaaggagggcatcctgcagtactgccaggaggtgtacccagagctgcagatcaccaacgtggtggaggccaaccagcctgtgaccatccagaactggtgcaagaggggcaggaagcagtgcaagacccacccccacttcgtcatcccctaccgctgcctggtgggggagtttgtgtctgatgccctgctggtgcctgacaagtgcaagttcctgcaccaggagaggatggatgtgtgtgagacccacctgcactggcacacagtggccaaggagacctgcagcgagaagagcaccaacctgcatgactatggcatgctgctgccctgtggcatcgacaagttccggggcgtggagtttgtgtgctgccccctggccgaggagagtgacaacgtggacagcgcagatgctgaggaggatgacagtgatgtgtggtggggcggcgctgacacagattatgcagatggcagcgaggacaaggtggtggaggtggccgaggaggaggaggtggccgaggtggaggaggaggaggctgatgatgatgaagatgatgaagatggagatgaggtggaggaggaggccgaggagccctatgaggaggccacagagaggaccaccagcatcgccaccaccaccaccaccaccacagaatctgtggaggaggtggtgcgggaggtgtgcagcgagcaggccgagaccggcccctgccgggccatgatcagccgctggtactttgatgtgacagagggcaaatgtgcccccttcttctacggcggctgcggcggcaacagaaacaactttgacacagaggagtactgcatggctgtgtgtggcagcgccatccccaccacagctgccagcaccccagatgctgtggacaagtacctggagaccccaggagatgaaaatgagcacgcccacttccagaaggccaaggagcggctggaggccaagcaccgggagaggatgagccaggtgatgagggagtgggaggaggccgagcggcaggccaagaacctgcccaaggctgacaagaaggccgtcatccagcacttccaggagaaggtggagagcctggagcaggaggccgccaatgaaaggcagcagctggtggagacccacatggcccgggtggaggccatgctgaatgacagaagaaggctggccctggagaactacatcacagccctgcaggccgtgcccccccggcccaggcatgtgttcaacatgctgaagaagtatgtgcgggcagagcagaaggaccggcagcacaccctgaagcactttgagcacgtgaggatggtggaccccaagaaggccgcccagatccgcagccaggtgatgacccacctgcgggtcatctatgaaagaatgaaccagagcctgagcctgctgtacaacgtgcctgctgtggccgaggagatccaggatgaggtggatgagctgctgcagaaggagcagaactacagtgatgatgtgctggccaacatgatcagcgagccccgcatctcctatggaaatgatgccctgatgcccagcctgacagagaccaagaccaccgtggagctgctgcctgtgaatggagagttcagcctggatgacctgcagccctggcacagctttggagctgacagcgtgcctgccaacacagaaaatgaggtggagcctgtggatgcccggcctgctgctgaccggggcctgaccacccggcccggcagcggcctgaccaacatcaagacagaggagatcagcgaggtgaagatggatgctgagttcagacatgattctggctatgaggtgcaccaccagaagctggtgttctttgctgaagatgtgggcagcaacaagggggccatcatcggcctgatggtgggcggcgtggtgattgccaccgtcatcgtcatcaccctggtgatgctgaagaagaagcagtacaccagcatccaccacggcgtggtggaggtggatgctgctgtgaccccagaggagcggcacctgagcaagatgcagcagaatggctatgagaaccccacctacaagttctttgagcagatgcagaactag

SEQ ID NO: 143476 - DNA, 1983 bp, synthetic construct
  misc_feature 1..1983: note = Description of Artificial Sequence: Synthetic coding sequence
  source 1..1983: mol_type = other DNA
atgttctgtggccgcctgaacatgcacatgaatgtgcagaatggcaagtgggacagcgaccccagcggcaccaagacctgcatcgacaccaaggagggcatcctgcagtactgccaggaggtgtacccagagctgcagatcaccaacgtggtggaggccaaccagcctgtgaccatccagaactggtgcaagaggggcaggaagcagtgcaagacccacccccacttcgtcatcccctaccgctgcctggtgggggagtttgtgtctgatgccctgctggtgcctgacaagtgcaagttcctgcaccaggagaggatggatgtgtgtgagacccacctgcactggcacacagtggccaaggagacctgcagcgagaagagcaccaacctgcatgactatggcatgctgctgccctgtggcatcgacaagttccggggcgtggagtttgtgtgctgccccctggccgaggagagtgacaacgtggacagcgcagatgctgaggaggatgacagtgatgtgtggtggggcggcgctgacacagattatgcagatggcagcgaggacaaggtggtggaggtggccgaggaggaggaggtggccgaggtggaggaggaggaggctgatgatgatgaagatgatgaagatggagatgaggtggaggaggaggccgaggagccctatgaggaggccacagagaggaccaccagcatcgccaccaccaccaccaccaccacagaatctgtggaggaggtggtgcgggtgcccaccacagctgccagcaccccagatgctgtggacaagtacctggagaccccaggagatgaaaatgagcacgcccacttccagaaggccaaggagcggctggaggccaagcaccgggagaggatgagccaggtgatgagggagtgggaggaggccgagcggcaggccaagaacctgcccaaggctgacaagaaggccgtcatccagcacttccaggagaaggtggagagcctggagcaggaggccgccaatgaaaggcagcagctggtggagacccacatggcccgggtggaggccatgctgaatgacagaagaaggctggccctggagaactacatcacagccctgcaggccgtgcccccccggcccaggcatgtgttcaacatgctgaagaagtatgtgcgggcagagcagaaggaccggcagcacaccctgaagcactttgagcacgtgaggatggtggaccccaagaaggccgcccagatccgcagccaggtgatgacccacctgcgggtcatctatgaaagaatgaaccagagcctgagcctgctgtacaacgtgcctgctgtggccgaggagatccaggatgaggtggatgagctgctgcagaaggagcagaactacagtgatgatgtgctggccaacatgatcagcgagccccgcatctcctatggaaatgatgccctgatgcccagcctgacagagaccaagaccaccgtggagctgctgcctgtgaatggagagttcagcctggatgacctgcagccctggcacagctttggagctgacagcgtgcctgccaacacagaaaatgaggtggagcctgtggatgcccggcctgctgctgaccggggcctgaccacccggcccggcagcggcctgaccaacatcaagacagaggagatcagcgaggtgaagatggatgctgagttcagacatgattctggctatgaggtgcaccaccagaagctggtgttctttgctgaagatgtgggcagcaacaagggggccatcatcggcctgatggtgggcggcgtggtgattgccaccgtcatcgtcatcaccctggtgatgctgaagaagaagcagtacaccagcatccaccacggcgtggtggaggtggatgctgctgtgaccccagaggagcggcacctgagcaagatgcagcagaatggctatgagaaccccacctacaagttctttgagcagatgcagaactag

SEQ ID NO: 143477 - DNA, 789 bp, synthetic construct
  misc_feature 1..789: note = Description of Artificial Sequence: Synthetic coding sequence
  source 1..789: mol_type = other DNA
atgagggtgcaggacaccagcggcacctactactggcacatccccaccggcaccacccagtgggagcccccaggccgggccagccccagccagggcagcagcccccaggaggagagccagctgacctggacaggctttgcccacggggagggctttgaagatggagagttctggaaggatgagcccagtgatgaggcccccatggagctgggcctgaaggagcctgaggagggcaccctgaccttccctgcccagagcctgagccctgagcccctgccccaggaggaggagaagctgccccccaggaacaccaaccctggcatcaagtgctttgctgtgcgcagcctgggctgggtggagatgacagaggaggagctggcccctggccgcagctctgtggccgtgaacaactgcatccggcagctgagctaccacaagaacaacctgcatgaccccatgtctgggggctggggcgagggcaaggacctgctgctgcagctggaggatgagaccctgaagctggtggagccccagagccaggccctgctgcacgcccagcccatcatcagcatccgggtgtggggcgtgggccgggacagcggccgggactttgcctacgtggcccgggacaagctgacccagatgctgaagtgccacgtgttccgctgtgaggccccagccaagaacatcgccaccagcctgcacgagatctgcagcaaggcccggcccccacccctgcccggcctggtggccacctttgccctgcagggctgcggctggggccactag

SEQ ID NO: 143478 - DNA, 1482 bp, synthetic construct
  misc_feature 1..1482: note = Description of Artificial Sequence: Synthetic coding sequence
  source 1..1482: mol_type = other DNA
atgctgggcaaggactacatgctggccatcatcctggtgaactgtgatgatgacctgtggggagaccacagcctggaggtggaggccggcctgcccccaggctggaggaagatccatgatgctgctggcacctactactggcacgtgcccagcggcagcacccagtggcagaggcccacctgggagctgggagatgctgaagatcctggcactggaacagagggcatctggggcctgcggccccccaagggccgctccttcagcagcctggagagcagcctggacaggagcaacagcctgtcctggtatggaggagagagctacatccagagcatggagcccggggccaagtgctttgctgtgcgcagcctgggctgggtggaggtgcctgaggaggacctggcccctgggaagagcagcattgctgtgaacaactgcatccagcagctggcccagaccaggagccgcagccagcccccagatggagcctggggcgagggccagaacatgctgatgatcctgaagaaggatgccatgagcctggtgaaccccctggaccacagcctcatccactgccagcccctggtgcacatccgggtgtggggcgtgggcagcagcaagggccgggacagccccatcagcgccccagcccgggactttgcctttgtggccagtgacaaggacagctgcatgctgaagtgccacgtgttctgctgtgatgtgcctgccaaggccatcgccagcgccctgcacggcctgtgtgcccagatcctgtctgagcgggtggaggtgtctggagatgccagctgctgcagcccagaccccatcagccctgaggacctgccccggcaggtggagctgctggatgctgtgtcccaggccgcccagaagtatgaggccctgtacatgggcaccctgcctgtgaccaaggccatgggcatggatgtgctgaatgaggccatcggcaccctgacagcccggggggacagaaatgcctgggtgcccaccatgctgtctgtgtctgacagcctgatgacagcccaccccatccaggccgaggccagcacagaggaggagcccctgtggcagtgccctgtgcggctggtgaccttcatcggcgtgggccgggacccccacaccttcggcctgattgctgacctgggccggcagagcttccagtgtgccgccttctggtgccagccccatgctgggggcctgtctgaggccgtgcaggccgcctgcatggtgcagtaccagaagtgcctggtggccagcgctgcccggggcaaggcctggggcgcccaggcccgggcccggctgcggctgaagaggaccagctccatggacagccctgggggccccctgcccctgcccctgctgaagggcggcgtgggcggggccggggccacccccaggaagaggggcgtcttctccttcctggatgccttccggctgaagcccagcctgctgcacatgccctag

SEQ ID NO: 143479 - DNA, 1377 bp, synthetic construct
  misc_feature 1..1377: note = Description of Artificial Sequence: Synthetic coding sequence
  source 1..1377: mol_type = other DNA
atgatcaccaagacccacaaggtggacctgggcctgcctgagaagaagaagaagaagaaggtggtgaaggagcctgagacccgctacagcgtgctgaacaatgatgactactttgctgatgtgagccccctgcgggccaccagccccagcaagtctgtggcccacggccaggcccctgagatgcccctggtgaagaagaagaagaagaagaagaagggcgtgtccaccctgtgtgaggagcacgtggagcctgagaccaccctgcctgccaggagaacagagaagagccccagcctgaggaagcaggtgtttggccacctggagttcctgtctggagagaagaagaacaagaagagccccctggccatgagccacgccagcggcgtgaagaccagcccagacccccggcagggcgaggaggagaccagggtgggcaagaagctgaagaagcacaagaaggagaagaagggggcccaggaccccacagccttctctgtgcaggacccctggttctgtgaggcccgggaggccagagatgtgggggacacctgcagcgtgggcaagaaggatgaggagcaggccgccctgggccagaagaggaagaggaagagcccccgggagcacaacgggaaggtgaagaagaagaagaagatccaccaggagggagatgccctgcccggccacagcaagcccagccgctccatggagagcagccccaggaagggcagcaagaagaagcctgtgaaggtggaggcccctgagtacatccccatcagtgatgaccccaaggccagcgccaagaagaagatgaagagcaagaagaaggtggagcagcctgtgattgaggagcccgccctgaagaggaagaagaagaagaagaggaaggagagcggcgtggccggggacccctggaaggaggagacagacacagacctggaggtggtgctggagaagaagggcaacatggatgaggcccacatcgaccaggtgcggaggaaggccctgcaggaggagattgaccgggagagcggcaagacagaggccagcgagaccaggaagtggacaggcacccagtttggccagtgggacacagctggctttgaaaatgaagaccagaagctgaagttcctgcggctgatgggcggcttcaagaacctgagccccagcttcagcaggcctgccagcaccatcgcccggcccaacatggccctgggcaagaaggctgctgacagcctgcagcagaacctgcagagggactatgaccgggccatgtcctggaagtacagcagaggagctggcctgggcttcagcacagcccccaacaagatcttctacatcgacagaaatgccagcaagtctgtgaagctggaggactag

SEQ ID NO: 143480 - DNA, 2214 bp, synthetic construct
  misc_feature 1..2214: note = Description of Artificial Sequence: Synthetic coding sequence
  source 1..2214: mol_type = other DNA
atggcccacaggaagctggagagcgtgggcagcggcatgctggaccaccgggtgcggcccggccctgtgccccacagccaggagcctgagagcgaggacatggagctgcccctggagggctacgtgcctgagggcctggagctggccgccctgcggcctgagagccctgcccctgaggagcaggagtgccacaaccacagcccagatggagacagcagcagtgactatgtgaacaacaccagcgaggaggaggactatgatgagggcctgcctgaggaggaggagggcatcacctactacatccgctactgcccagaagatgacagctacctggagggcatggactgcaatggagaggagtacctggcccacagcgcccaccctgtggacacagatgagtgccaggaggccgtggaggagtggacagacagcgctggcccccacccccacggccacgaggccgagggcagccaggactacccagatggccagctgcccatcccagaagatgagcccagcgtgctggaggcccatgaccaggaggaggatggccactactgtgccagcaaggagggctaccaggactactacccagaggaggccaacggcaacacaggagccagcccctaccgcctgcggagaggagatggagacctggaggaccaggaggaggacatcgaccagatcgtggccgagatcaagatgagcctgtccatgaccagcatcaccagcgccagcgaggccagccctgagcacggccctgagcccggcccagaagattctgtggaggcctgcccccccatcaaggccagctgcagccccagcagacatgaggcccggcccaagagcctgaacctgctgcctgaggccaagcaccctggggacccccagaggggcttcaagcccaagaccaggaccccagaggagcggctgaagtggccccatgagcaggtgtgcaatggcctggagcagcccaggaagcagcagaggagtgacctgaatggacctgtggacaacaacaacatccctgagaccaagaaggtggccagcttccccagctttgtggccgtgcccggcccctgtgagcctgaggacctgattgatggcatcatctttgctgccaactacctgggcagcacccagctgctgtctgagaggaaccccagcaagaacatccgcatgatgcaggcccaggaggccgtgtcccgggtgaagaacagtgaaggagatgcccagaccctgacagaggtggacctcttcatcagcacccagaggatcaaggtgctgaatgctgacacccaggagaccatgatggaccacgccctgcggaccatctcctacatcgctgacatcggcaacatcgtggtgctgatggcccggcggaggatgcccaggtctgccagccaggactgcatcgagaccacccctggggcccaggagggcaagaagcagtacaagatgatctgccacgtgtttgaaagtgaagatgcccagctgattgcccagagcatcggccaggccttctctgtggcctaccaggagttcctgcgggccaacggcatcaaccctgaggacctgagccagaaggagtacagcgacatcatcaacacccaggagatgtacaatgatgacctgatccacttcagcaacagcgagaactgcaaggagctgcagctggagaagcacaagggggagatcctgggcgtggtggtggtggagagcggctggggcagcatcctgcccaccgtcatcctggccaacatgatgaatggaggccctgctgcccggagcggcaagctgagcatcggggaccagatcatgagcatcaatggcaccagcctggtgggcctgcccctggccacctgccagggcatcatcaagggcctgaagaaccagacccaggtgaagctgaacatcgtgtcctgcccccctgtgaccaccgtgctgatcaagaggccagacctgaagtaccagctgggcttctctgtgcagaatggcatcatctgcagcctgatgaggggcggcattgctgagcggggcggcgtgcgggtgggccaccgcatcatcgagatcaatggccagagcgtggtggccacagcccacgagaagatcgtgcaggccctgagcaacagcgtgggggagatccacatgaagaccatgcctgctgccatgttccggctgctgaccggccaggagacccccctgtacatctag

SEQ ID NO: 143481 - DNA, 84 bp, synthetic construct
  misc_feature 1..84: note = Description of Artificial Sequence: Synthetic coding sequence
  source 1..84: mol_type = other DNA
atggcccacaggaagctggagagcgtgggcagcggcatgctggaccaccgggtgcggcccggccctgtgccccacagccagtag

SEQ ID NO: 143482 - DNA, 2250 bp, synthetic construct
  misc_feature 1..2250: note = Description of Artificial Sequence: Synthetic coding sequence
  source 1..2250: mol_type = other DNA
atggcccacaggaagctggagagcgtgggcagcggcatgctggaccaccgggtgcggcccggccctgtgccccacagccaggagcctgagagcgaggacatggagctgcccctggagggctacgtgcctgagggcctggagctggccgccctgcggcctgagagccctgcccctgaggagcaggagtgccacaaccacagcccagatggagacagcagcagtgactatgtgaacaacaccagcgaggaggaggactatgatgagggcctgcctgaggaggaggagggcatcacctactacatccgctactgcccagaagatgacagctacctggagggcatggactgcaatggagaggagtacctggcccacagcgcccaccctgtggacacagatgagtgccaggaggccgtggaggagtggacagacagcgctggcccccacccccacggccacgaggccgagggcagccaggactacccagatggccagctgcccatcccagaagatgagcccagcgtgctggaggcccatgaccaggaggaggatggccactactgtgccagcaaggagggctaccaggactactacccagaggaggccaacggcaacacaggagccagcccctaccgcctgcggagaggagatggagacctggaggaccaggaggaggacatcgaccagatcgtggccgagatcaagatgagcctgtccatgaccagcatcaccagcgccagcgaggccagccctgagcacggccctgagcccggcccagaagattctgtggaggcctgcccccccatcaaggccagctgcagccccagcagacatgaggcccggcccaagagcctgaacctgctgcctgaggccaagcaccctggggacccccagaggggcttcaagcccaagaccaggaccccagaggagcggctgaagtggccccatgagcaggtgtgcaatggcctggagcagcccaggaagcagcagaggagtgacctgaatggacctgtggacaacaacaacatccctgagaccaagaaggtggccagcttccccagctttgtggccgtgcccggcccctgtgagcctgaggacctgattgatggcatcatctttgctgccaactacctgggcagcacccagctgctgtctgagaggaaccccagcaagaacatccgcatgatgcaggcccaggaggccgtgtcccgggtgaagaggatgcagaaggccgccaagatcaagaagaaggccaacagtgaaggagatgcccagaccctgacagaggtggacctcttcatcagcacccagaggatcaaggtgctgaatgctgacacccaggagaccatgatggaccacgccctgcggaccatctcctacatcgctgacatcggcaacatcgtggtgctgatggcccggcggaggatgcccaggtctgccagccaggactgcatcgagaccacccctggggcccaggagggcaagaagcagtacaagatgatctgccacgtgtttgaaagtgaagatgcccagctgattgcccagagcatcggccaggccttctctgtggcctaccaggagttcctgcgggccaacggcatcaaccctgaggacctgagccagaaggagtacagcgacatcatcaacacccaggagatgtacaatgatgacctgatccacttcagcaacagcgagaactgcaaggagctgcagctggagaagcacaagggggagatcctgggcgtggtggtggtggagagcggctggggcagcatcctgcccaccgtcatcctggccaacatgatgaatggaggccctgctgcccggagcggcaagctgagcatcggggaccagatcatgagcatcaatggcaccagcctggtgggcctgcccctggccacctgccagggcatcatcaagggcctgaagaaccagacccaggtgaagctgaacatcgtgtcctgcccccctgtgaccaccgtgctgatcaagaggccagacctgaagtaccagctgggcttctctgtgcagaatggcatcatctgcagcctgatgaggggcggcattgctgagcggggcggcgtgcgggtgggccaccgcatcatcgagatcaatggccagagcgtggtggccacagcccacgagaagatcgtgcaggccctgagcaacagcgtgggggagatccacatgaagaccatgcctgctgccatgttccggctgctgaccggccaggagacccccctgtacatctag

SEQ ID NO: 143483 - DNA, 2214 bp, synthetic construct; identical to SEQ ID NO: 143480
  misc_feature 1..2214: note = Description of Artificial Sequence: Synthetic coding sequence
  source 1..2214: mol_type = other DNA

SEQ ID NO: 143484 - DNA, 795 bp, synthetic construct
  misc_feature 1..795: note = Description of Artificial Sequence: Synthetic coding sequence
  source 1..795: mol_type = other DNA
atggcccacaggaagctggagagcgtgggcagcggcatgctggaccaccgggtgcggcccggccctgtgccccacagccaggagcctgagagcgaggacatggagctgcccctggagggctacgtgcctgagggcctggagctggccgccctgcggcctgagagccctgcccctgaggagcaggagtgccacaaccacagcccagatggagacagcagcagtgactatgtgaacaacaccagcgaggaggaggactatgatgagggcctgcctgaggaggaggagggcatcacctactacatccgctactgcccagaagatgacagctacctggagggcatggactgcaatggagaggagtacctggcccacagcgcccaccctgtggacacagatgagtgccaggaggccgtggaggagtggacagacagcgctggcccccacccccacggccacgaggccgagggcagccaggactacccagatggccagctgcccatcccagaagatgagcccagcgtgctggaggcccatgaccaggaggaggatggccactactgtgccagcaaggagggctaccaggactactacccagaggaggccaacggcaacacaggagccagcccctaccgcctgcggagaggagatggagacctggaggaccaggaggaggacatcgaccagatcgtggccgagatcaagatgagcctgtccatgaccagcatcaccagcgccagcgaggccagccctgagcacggccctgagcccggcccagaagattctgtggaggcctag

SEQ ID NO: 143485 - DNA, 2250 bp, synthetic construct; identical to SEQ ID NO: 143482
  misc_feature 1..2250: note = Description of Artificial Sequence: Synthetic coding sequence
  source 1..2250: mol_type = other DNA

SEQ ID NO: 143486 - DNA, 213 bp, synthetic construct
  misc_feature 1..213: note = Description of Artificial Sequence: Synthetic coding sequence
  source 1..213: mol_type = other DNA
atggcccacaggaagctggagagcgtgggcagcggcatgctggaccaccgggtgcggcccggccctgtgccccacagccaggagcctgagagcgaggacatggagctgcccctggagggctacgtgcctgagggcctggagctggccgccctgcggcctgagagccctgcccctgaggagcaggagtgccacaaccacagcccagatggatag

SEQ ID NO: 143487 - DNA, 15 bp, synthetic construct
  misc_feature 1..15: note = Description of Artificial Sequence: Synthetic coding sequence
  source 1..15: mol_type = other DNA
atggcccacaggtag

SEQ ID NO: 143488 - DNA, 339 bp, synthetic construct
  misc_feature 1..339: note = Description of Artificial Sequence: Synthetic coding sequence
  source 1..339: mol_type = other DNA
atggcccacaggaagctggagagcgtgggcagcggcatgctggaccaccgggtgcggcccggccctgtgccccacagccaggagcctgagagcgaggacatggagctgcccctggagggctacgtgcctgagggcctggagctggccgccctgcggcctgagagccctgcccctgaggagcaggagtgccacaaccacagcccagatggagacagcagcagtgactatgtgaacaacaccagcgaggaggaggactatgatgagggcctgcctgaggaggaggagggcatcacctactacatccgctactgcccagaagatgacagctacctggagtag

SEQ ID NO: 143489 - DNA, 2250 bp, synthetic construct; identical to SEQ ID NO: 143482
  misc_feature 1..2250: note = Description of Artificial Sequence: Synthetic coding sequence
  source 1..2250: mol_type = other DNA

SEQ ID NO: 143490 - DNA, 2127 bp, synthetic construct
  misc_feature 1..2127: note = Description of Artificial Sequence: Synthetic coding sequence
  source 1..2127: mol_type = other DNA
atgtctgtgcccagcagcctgagccagagcgccatcaatgccaacagccatggaggccctgccctgagcctgcccctgcccctgcacgccgcccacaaccagctgctgaatgccaagctgcaggccacagctgtgggccccaaggacctgcggagcgccatgggagagggcggcggccctgagcccggccctgccaatgccaagtggctgaaggagggccagaaccagctgcggcgggccgccacagcccaccgggaccagaacagaaatgtgaccctgaccctggccgaggaggccagccaggagcctgagatggcccccctgggccccaagggcctcatccacctgtacagcgagctggagctgagcgcccacaatgctgccaacagaggcctgcggggccctggcctcatcatcagcacccaggagcagggcccagatgaaggagaggagaaggccgccggggaggccgaggaggaggaggaggatgatgatgatgaggaggaggaggaggacctgagcagccccccaggcctgcctgagcccctggagagcgtggaggccccaccccggccccaggccctgacagatggcccccgggagcacagcaagagcgccagcctgctgtttggcatgagaaattctgctgccagtgatgaggacagctcctgggccaccctgagccagggcagccccagctatggcagccctgaggacacagacagcttctggaaccccaatgcctttgaaacagacagcgacctgcctgctggctggatgagggtgcaggacaccagcggcacctactactggcacatccccaccggcaccacccagtgggagcccccaggccgggccagccccagccagggcagcagcccccaggaggagagccagctgacctggacaggctttgcccatggagagggctttgaagatggagagttctggaaggatgagcccagtgatgaggcccccatggagctgggcctgaaggagcctgaggagggcaccctgaccttccctgcccagagcctgagccctgagcccctgccccaggaggaggagaagctgcccccaagaaacaccaaccctggcatcaagtgctttgctgtgcgcagcctgggctgggtggagatgacagaggaggagctggcccctggccgcagctctgtggccgtgaacaactgcatccggcagctgagctaccacaagaacaacctgcatgaccccatgtctgggggctggggcgagggcaaggacctgctgctgcagctggaggatgagaccctgaagctggtggagccccagagccaggccctgctgcacgcccagcccatcatcagcatccgggtgtggggcgtgggccgggacagcggccgggactttgcctacgtggcccgggacaagctgacccagatgctgaagtgccacgtgttccgctgtgaggccccagccaagaacatcgccaccagcctgcacgagatctgcagcaagatcatggccgagaggagaaatgcccgctgcctggtgaatggcctgagcctggaccacagcaagctggtggatgtgcccttccaggtggagttccctgcccccaagaatgagctggtgcagaagttccaggtgtactacctgggcaatgtgcctgtggccaagcctgtgggcgtggatgtgatcaatggagccctggagagcgtgctgagcagcagcagccgggagcagtggacccccagccacgtgtctgtggccccagccaccctgaccatcctgcaccagcagacagaagctgtgctgggagaatgtcgggtgcgcttcctgtccttcctggccgtgggcagagatgtgcacacctttgccttcatcatggctgctggccctgccagcttctgctgccacatgttctggtgtgagcccaatgctgccagcctgtctgaggccgtgcaggccgcctgcatgctgcgctaccagaagtgcctggatgcccggagccaggccagcaccagctgcctgcctgcccccccagctgagagcgtggccaggagagtgggctggacagtgcggcggggcgtgcagagcctgtggggcagcctgaagcccaagaggctgggcgcccacaccccctag

SEQ ID NO: 143491 - DNA, 2127 bp, synthetic construct; identical to SEQ ID NO: 143490
  misc_feature 1..2127: note = Description of Artificial Sequence: Synthetic coding sequence
  source 1..2127: mol_type = other DNA

SEQ ID NO: 143492 - DNA, 2133 bp, synthetic construct
  misc_feature 1..2133: note = Description of Artificial Sequence: Synthetic coding sequence
  source 1..2133: mol_type = other DNA
atgtctgtgcccagcagcctgagccagagcgccatcaatgccaacagccatggaggccctgccctgagcctgcccctgcccctgcacgccgcccacaaccagctgctgaatgccaagctgcaggccacagctgtgggccccaaggacctgcggagcgccatgggagagggcggcggccctgagcccggccctgccaatgccaagtggctgaaggagggccagaaccagctgcggcgggccgccacagcccaccgggaccagaacagaaatgtgaccctgaccctggccgaggaggccagccaggagcctgagatggcccccctgggccccaagggcctcatccacctgtacagcgagctggagctgagcgcccacaatgctgccaacagaggcctgcggggccctggcctcatcatcagcacccaggagcagggcccagatgaaggagaggagaaggccgccggggaggccgaggaggaggaggaggatgatgatgatgaggaggaggaggaggacctgagcagccccccaggcctgcctgagcccctggagagcgtggaggccccaccccggccccaggccctgacagatggcccccgggagcacagcaagagcgccagcctgctgtttggcatgagaaattctgctgccagtgatgaggacagctcctgggccaccctgagccagggcagccccagctatggcagccctgaggacacagacagcttctggaaccccaatgcctttgaaacagacagcgacctgcctgctggctggatgagggtgcaggacaccagcggcacctactactggcacatccccaccggcaccacccagtgggagcccccaggccgggccagccccagccagggcagcagcccccaggaggagagccagctgacctggacaggctttgcccatggagagggctttgaagatggagagttctggaaggatgagcccagtgatgaggcccccatggagctgggcctgaaggagcctgaggagggcaccctgaccttccctgcccagagcctgagccctgagcccctgccccaggaggaggagaagctgcccccaagaaacaccaaccctggcatcaagtgctttgctgtgcgcagcctgggctgggtggagatgacagaggaggagctggcccctggccgcagctctgtggccgtgaacaactgcatccggcagctgagctaccacaagaacaacctgcatgaccccatgtctgggggctggggcgagggcaaggacctgctgctgcagctggaggatgagaccctgaagctggtggagccccagagccaggccctgctgcacgcccagcccatcatcagcatccgggtgtggggcgtgggccgggacagcggcagcaacagagactttgcctacgtggcccgggacaagctgacccagatgctgaagtgccacgtgttccgctgtgaggccccagccaagaacatcgccaccagcctgcacgagatctgcagcaagatcatggccgagaggagaaatgcccgctgcctggtgaatggcctgagcctggaccacagcaagctggtggatgtgcccttccaggtggagttccctgcccccaagaatgagctggtgcagaagttccaggtgtactacctgggcaatgtgcctgtggccaagcctgtgggcgtggatgtgatcaatggagccctggagagcgtgctgagcagcagcagccgggagcagtggacccccagccacgtgtctgtggccccagccaccctgaccatcctgcaccagcagacagaagctgtgctgggagaatgtcgggtgcgcttcctgtccttcctggccgtgggcagagatgtgcacacctttgccttcatcatggctgctggccctgccagcttctgctgccacatgttctggtgtgagcccaatgctgccagcctgtctgaggccgtgcaggccgcctgcatgctgcgctaccagaagtgcctggatgcccggagccaggccagcaccagctgcctgcctgcccccccagctgagagcgtggccaggagagtgggctggacagtgcggcggggcgtgcagagcctgtggggcagcctgaagcccaagaggctgggcgcccacaccccctag

SEQ ID NO: 143493 - DNA, 1356 bp, synthetic construct
  misc_feature 1..1356: note = Description of Artificial Sequence: Synthetic coding sequence
  source 1..1356: mol_type = other DNA
atgagggtgcaggacaccagcggcacctactactggcacatccccaccggcaccacccagtgggagcccccaggccgggccagccccagccagggcagcagcccccaggaggagagccagctgacctggacaggctttgcccacggggagggctttgaagatggagagttctggaaggatgagcccagtgatgaggcccccatggagctgggcctgaaggagcctgaggagggcaccctgaccttccctgcccagagcctgagccctgagcccctgccccaggaggaggagaagctgccccccaggaacaccaaccctggcatcaagtgctttgctgtgcgcagcctgggctgggtggagatgacagaggaggagctggcccctggccgcagctctgtggccgtgaacaactgcatccggcagctgagctaccacaagaacaacctgcatgaccccatgtctgggggctggggcgagggcaaggacctgctgctgcagctggaggatgagaccctgaagctggtggagccccagagccaggccctgctgcacgcccagcccatcatcagcatccgggtgtggggcgtgggccgggacagcggcagcaacagagactttgcctacgtggcccgggacaagctgacccagatgctgaagtgccacgtgttccgctgtgaggccccagccaagaacatcgccaccagcctgcacgagatctgcagcaagatcatggccgagaggagaaatgcccgctgcctggtgaatggcctgagcctggaccacagcaagctggtggatgtgcccttccaggtggagttccctgcccccaagaatgagctggtgcagaagttccaggtgtactacctgggcaatgtgcctgtggccaagcctgtgggcgtggatgtgatcaacggggccctggagagcgtgctgagcagcagcagccgggagcagtggacccccagccacgtgtctgtggccccagccaccctgaccatcctgcaccagcagacagaggccgtgctgggggagtgccgggtgcgcttcctgtccttcctggccgtgggcagagatgtgcacacctttgccttcatcatggccgccggccctgccagcttctgctgccacatgttctggtgtgagcccaatgctgccagcctgtctgaggccgtgcaggccgcctgcatgctgcgctaccagaagtgcctggatgcccggagccaggccagcaccagctgcctgcctgcccctcctgctgagagcgtggcccggcgggtgggctggacagtgagaagaggagtgcagagcctgtggggcagcctgaagcccaagaggctgggcgcccacaccccctag

SEQ ID NO: 143494 - DNA, 1680 bp, synthetic construct
  misc_feature 1..1680: note = Description of Artificial Sequence: Synthetic coding sequence
  source 1..1680: mol_type = other DNA
atgtctgtgcccagcagcctgagccagagcgccatcaatgccaacagccatggaggccctgccctgagcctgcccctgcccctgcacgccgcccacaaccagctgctgaatgccaagctgcaggccacagctgtgggccccaaggacctgcacagcaagagcgccagcctgctgtttggcatgaggaacagcgctgccagtgatgaggacagctcctgggccaccctgagccagggcagccccagctatggcagccctgaggacacagacagcttctggaaccccaatgcctttgaaacagacagcgacctgcctgctggctggatgagggtgcaggacaccagcggcacctactactggcacatccccaccggcaccacccagtgggagcccccaggccgggccagccccagccagggcagcagcccccaggaggagagccagctgacctggacaggctttgcccacggggagggctttgaagatggagagttctggaaggatgagcccagtgatgaggcccccatggagctgggcctgaaggagcctgaggagggcaccctgaccttccctgcccagagcctgagccctgagcccctgccccaggaggaggagaagctgccccccaggaacaccaaccctggcatcaagtgctttgctgtgcgcagcctgggctgggtggagatgacagaggaggagctggcccctggccgcagctctgtggccgtgaacaactgcatccggcagctgagctaccacaagaacaacctgcatgaccccatgtctgggggctggggcgagggcaaggacctgctgctgcagctggaggatgagaccctgaagctggtggagccccagagccaggccctgctgcacgcccagcccatcatcagcatccgggtgtggggcgtgggccgggacagcggcagcaacagagactttgcctacgtggcccgggacaagctgacccagatgctgaagtgccacgtgttccgctgtgaggccccagccaagaacatcgccaccagcctgcacgagatctgcagcaagatcatggccgagaggagaaatgcccgctgcctggtgaatggcctgagcctggaccacagcaagctggtggatgtgcccttccaggtggagttccctgcccccaagaatgagctggtgcagaagttccaggtgtactacctgggcaatgtgcctgtggccaagcctgtgggcgtggatgtgatcaacggggccctggagagcgtgctgagcagcagcagccgggagcagtggacccccagccacgtgtctgtggccccagccaccctgaccatcctgcaccagcagacagaggccgtgctgggggagtgccgggtgcgcttcctgtccttcctggccgtgggcagagatgtgcacacctttgccttcatcatggccgccggccctgccagcttctgctgccacatgttctggtgtgagcccaatgctgccagcctgtctgaggccgtgcaggccgcctgcatgctgcgctaccagaagtgcctggatgcccggagccaggccagcaccagctgcctgcctgcccctcctgctgagagcgtggcccggcgggtgggctggacagtgagaagaggagtgcagagcctgtggggcagcctgaagcccaagaggctgggcgcccacaccccctag

SEQ ID NO: 143495 - DNA, 1428 bp, synthetic construct
  misc_feature 1..1428: note = Description of Artificial Sequence: Synthetic coding sequence
  source 1..1428: mol_type = other DNA
atgacccagatgagggacagcttctggaaccccaatgcctttgaaacagacagcgacctgcctgctggctggatgagggtgcaggacaccagcggcacctactactggcacatccccaccggcaccacccagtgggagcccccaggccgggccagccccagccagggcagcagcccccaggaggagagccagctgacctggacaggctttgcccacggggagggctttgaagatggagagttctggaaggatgagcccagtgatgaggcccccatggagctgggcctgaaggagcctgaggagggcaccctgaccttccctgcccagagcctgagccctgagcccctgccccaggaggaggagaagctgccccccaggaacaccaaccctggcatcaagtgctttgctgtgcgcagcctgggctgggtggagatgacagaggaggagctggcccctggccgcagctctgtggccgtgaacaactgcatccggcagctgagctaccacaagaacaacctgcatgaccccatgtctgggggctggggcgagggcaaggacctgctgctgcagctggaggatgagaccctgaagctggtggagccccagagccaggccctgctgcacgcccagcccatcatcagcatccgggtgtggggcgtgggccgggacagcggcagcaacagagactttgcctacgtggcccgggacaagctgacccagatgctgaagtgccacgtgttccgctgtgaggccccagccaagaacatcgccaccagcctgcacgagatctgcagcaagatcatggccgagaggagaaatgcccgctgcctggtgaatggcctgagcctggaccacagcaagctggtggatgtgcccttccaggtggagttccctgcccccaagaatgagctggtgcagaagttccaggtgtactacctgggcaatgtgcctgtggccaagcctgtgggcgtggatgtgatcaacggggccctggagagcgtgctgagcagcagcagccgggagcagtggacccccagccacgtgtctgtggccccagccaccctgaccatcctgcaccagcagacagaggccgtgctgggggagtgccgggtgcgcttcctgtccttcctggccgtgggcagagatgtgcacacctttgccttcatcatggccgccggccctgccagcttctgctgccacatgttctggtgtgagcccaatgctgccagcctgtctgaggccgtgcaggccgcctgcatgctgcgctaccagaagtgcctggatgcccggagccaggccagcaccagctgcctgcctgcccctcctgctgagagcgtggcccggcgggtgggctggacagtgagaagaggagtgcagagcctgtggggcagcctgaagcccaagaggctgggcgcccacaccccctag

SEQ ID NO: 143496 - DNA, 2277 bp, synthetic construct
  misc_feature 1..2277: note = Description of Artificial Sequence: Synthetic coding sequence
  source 1..2277: mol_type = other DNA
atgtctgaggtgctgcctgctgacagcggcgtggacaccctggccgtgttcatggccagcagcggcaccacagatgtgaccaacagaaacagccctgccaccccacccaacaccctgaacctgcggagcagccacaatgagctgctgaatgctgagatcaagcacacagagaccaagaacagcaccccacccaagtgcaggaagaagtatgccctgaccaacatccaggccgccatgggcctgagtgaccctgctgcccagcccctgctgggcaatggcagcgccaacatcaagctggtgaagaatggagagaaccagctgaggaaggctgctgagcagggccagcaggaccccaacaagaacctgagccccacagctgtgatcaacatcaccagcgagaagctggagggcaaggagccccacccccaggacagcagcagctgtgagatcctgcccagccagcccaggaggaccaagagcttcctgaactactatgctgacctggagaccagcgcccgggagctggagcagaacagaggcaaccaccacggcacagctgaggagaagagccagcctgtgcagggccaggccagcaccatcattggaaatggagacctgctgctgcagaagcccaaccggccccagagcagcccagaagatggccaggtggccaccgtgagcagcagccctgagaccaagaaggaccaccccaagacaggagccaagacagactgtgccctgcaccgcatccagaacctggcccccagtgatgaggagagctcctggaccaccctgagccaggacagcgccagccccagcagcccagatgaaacagacatctggagcgaccacagcttccagacagatcctgacctgcccccaggctggaagagggtgtctgacattgctggcacctactactggcacatccccaccggcaccacccagtgggagaggcctgtgtccatcccagctgacctgcagggcagcaggaagggcagcctgagctctgtgacccccagccccaccccagaaaatgagaagcagccctggagcgactttgctgtgctgaatggaggcaagatcaacagcgacatctggaaggacctgcacgccgccaccgtgaacccagaccccagcctgaaggagtttgagggcgccaccctgcgctatgccagcctgaagctgagaaatgccccccacccagatgatgatgacagctgcagcatcaacagcgaccctgaggccaagtgctttgctgtgcgcagcctgggctgggtggagatggccgaggaggacctggcccctgggaagagctctgtggccgtgaacaactgcatccggcagctgagctactgcaagaatgacatccgggacacagtgggcatctggggcgagggcaaggacatgtacctgatcctggagaatgacatgctgagcctggtggaccccatggacagatctgtgctgcacagccagcccatcgtgtccatccgggtgtggggcgtgggccgggacaatggccgggactttgcctacgtggcccgggacaaggacacccgcatcctgaagtgccacgtgttccgctgtgacaccccagccaaggccatcgccaccagcctgcacgagatctgcagcaagatcatggccgagaggaagaatgccaaggccctggcctgcagcagcctgcaggagcgggccaacgtgaacctggatgtgcccctgcaggtggacttccccacccccaagacagagctggtgcagaagttccacgtgcagtacctgggcatgctgcctgtggacaagcctgtgggcatggacatcctgaacagcgccatcgagaacctgatgaccagcagcaacaaggaggactggctgtctgtgaacatgaatgtggctgatgccaccgtgaccgtcatcagcgagaagaatgaggaggaggtgctggtggagtgccgggtgcgcttcctgtccttcatgggcgtgggcaaggatgtgcacacctttgccttcatcatggacaccggcaaccagagatttgaatgtcatgtgttctggtgtgagcccaatgctggaaatgtgtctgaggccgtgcaggccgcctgcatgctgcgctaccagaagtgcctggtggcccggccccccagccagaaggtgcggcccccacctcctcctgctgacagcgtgaccaggagagtgaccaccaacgtgaagaggggcgtgctgagcctgattgacaccctgaagcagaagaggcctgtgacagagatgccctag

SEQ ID NO: 143497 - DNA, 2274 bp, synthetic construct
  misc_feature 1..2274: note = Description of Artificial Sequence: Synthetic coding sequence
  source 1..2274: mol_type = other DNA
agccactgcatcccagctgacagcggcgtggacaccctggccgtgttcatggccagcagcggcaccacagatgtgaccaacagaaacagccctgccaccccacccaacaccctgaacctgcggagcagccacaatgagctgctgaatgctgagatcaagcacacagagaccaagaacagcaccccacccaagtgcaggaagaagtatgccctgaccaacatccaggccgccatgggcctgagtgaccctgctgcccagcccctgctgggcaatggaagtgccaacatcaagctggtgaagaatggagagaaccagctgaggaaggctgctgagcagggccagcaggaccccaacaagaacctgagccccacagctgtgatcaacatcaccagcgagaagctggagggcaaggagccccacccccaggacagcagcagctgtgagatcctgcccagccagcccaggaggaccaagagcttcctgaactactatgctgacctggagaccagcgcccgggagctggagcagaacagaggcaaccaccacggcacagctgaggagaagagccagcctgtgcagggccaggccagcaccatcattggaaatggagacctgctgctgcagaagcccaaccggccccagagcagcccagaagatggccaggtggccaccgtgagcagcagccctgagaccaagaaggaccaccccaagacaggagccaagacagactgtgccctgcaccgcatccagaacctggcccccagtgatgaggagagctcctggaccaccctgagccaggacagcgccagccccagcagcccagatgaaacagacatctggagcgaccacagcttccagacagatcctgacctgcccccaggctggaagagggtgtctgacattgctggcacctactactggcacatccccaccggcaccacccagtgggagaggcctgtgtccatcccagctgacctgcagggcagcaggaagggcagcctgagctctgtgacccccagccccaccccagaaaatgagaagcagccctggagcgactttgctgtgctgaatggaggcaagatcaacagcgacatctggaaggacctgcatgctgccaccgtgaacccagaccccagcctgaaggagtttgaaggagccaccctgcgctatgccagcctgaagctgagaaatgccccccacccagatgatgatgacagctgcagcatcaacagcgaccctgaggccaagtgctttgctgtgcgcagcctgggctgggtggagatggccgaggaggacctggcccctgggaagagctctgtggccgtgaacaactgcatccggcagctgagctactgcaagaatgacatccgggacacagtgggcatctggggcgagggcaaggacatgtacctgatcctggagaatgacatgctgagcctggtggaccccatggacagatctgtgctgcacagccagcccatcgtgtccatccgggtgtggggcgtgggccgggacaatggccgggactttgcctacgtggcccgggacaaggacacccgcatcctgaagtgccacgtgttccgctgtgacaccccagccaaggccatcgccaccagcctgcacgagatctgcagcaagatcatggccgagaggaagaatgccaaggccctggcctgcagcagcctgcaggagcgggccaacgtgaacctggatgtgcccctgcaggtggacttccccacccccaagacagagctggtgcagaagttccacgtgcagtacctgggcatgctgcctgtggacaagcctgtgggcatggacatcctgaacagcgccatcgagaacctgatgaccagcagcaacaaggaggactggctgtctgtgaacatgaatgtggctgatgccaccgtgaccgtcatcagcgagaagaatgaggaggaggtgctggtggagtgccgggtgcgcttcctgtccttcatgggcgtgggcaaggatgtgcacacctttgccttcatcatggacaccggcaaccagagatttgagtgccacgtgttctggtgtgagcccaatgctggaaatgtgtctgaggccgtgcaggccgcctgcatgctgcgctaccagaagtgcctggtggcccggccccccagccagaaggtgcggcccccacctcctcctgctgacagcgtgacccggcgggtgaccaccaacgtgaagaggggcgtgctgagcctgattgacaccctgaagcagaagaggcctgtgacagagatgccctag

SEQ ID NO: 143498 - DNA, 633 bp, synthetic construct
  misc_feature 1..633: note = Description of Artificial Sequence: Synthetic coding sequence
  source 1..633: mol_type = other DNA
atggccgagaggaagaatgccaaggccctggcctgcagcagcctgcaggagcgggccaacgtgaacctggatgtgcccctgcaggtggacttccccacccccaagacagagctggtgcagaagttccacgtgcagtacctgggcatgctgcctgtggacaagcctgtgggcatggacatcctgaacagcgccatcgagaacctgatgaccagcagcaacaaggaggactggctgtctgtgaacatgaatgtggctgatgccaccgtgaccgtcatcagcgagaagaatgaggaggaggtgctggtggagtgccgggtgcgcttcctgtccttcatgggcgtgggcaaggatgtgcacacctttgccttcatcatggacaccggcaaccagagatttgaatgtcatgtgttctggtgtgagcccaatgctggaaatgtgtctgaggccgtgcaggccgcctgcatgctgcgctaccagaagtgcctggtggcccggccccccagccagaaggtgcggcccccacctcctcctgctgacagcgtgaccaggagagtgaccaccaacgtgaagaggggcgtgctgagcctgattgacaccctgaagcagaagaggcctgtgacagagatgccctag

SEQ ID NO: 143499 - DNA, 33 bp, synthetic construct
  misc_feature 1..33: note = Description of Artificial Sequence: Synthetic coding sequence
  source 1..33: mol_type = other DNA
atgtctgaggtgctgcctgctgacagcggctag

SEQ ID NO: 143500 - DNA, 633 bp, synthetic construct; identical to SEQ ID NO: 143498
  misc_feature 1..633: note = Description of Artificial Sequence: Synthetic coding sequence
  source 1..633: mol_type = other DNA

SEQ ID NO: 143501 - DNA, 2214 bp, synthetic construct
  misc_feature 1..2214: note = Description of Artificial Sequence: Synthetic coding sequence
  source 1..2214: mol_type = other DNA
atgtctgaggtgctgcctgctgacagcggcgtggacaccctggccgtgttcatggccagcagcggcaccacagatgtgaccaacagaaacagccctgccaccccacccaacaccctgaacctgcggagcagccacaatgagctgctgaatgctgagatcaagcacacagagaccaagaacagcaccccacccaagtgcaggaagaagtatgccctgaccaacatccaggccgccatgggcctgagtgaccctgctgcccagcccctgctgggcaatggcagcgccaacatcaagctggtgaagaatggagagaaccagctgaggaaggctgctgagcagggccagcaggaccccaacaagaacctgagccccacagctgtgatcaacatcaccagcgagaagctggagggcaaggagccccacccccaggacagcagcagctgtgagatcctgcccagccagcccaggaggaccaagagcttcctgaactactatgctgacctggagaccagcgcccgggagctggagcagaacagaggcaaccaccacggcacagctgaggagaagagccagcctgtgcagggccaggccagcaccatcattggaaatggagacctgctgctgcagaagcccaaccggccccagagcagcccagaagatggccaggtggccaccgtgagcagcagccctgagaccaagaaggaccaccccaagacaggagccaagacagactgtgccctgcaccgcatccagaacctggcccccagtgatgaggagagctcctggaccaccctgagccaggacagcgccagccccagcagcccagatgaaacagacatctggagcgaccacagcttccagacagatcctgacctgcccccaggctggaagagggtgtctgacattgctggcacctactactggcacatccccaccggcaccacccagtgggagaggcctgtgtccatcccagctgacctgcagggcagcaggaagggcagcctgagctctgtgacccccagccccaccccagaaaatgaagacctgcatgctgccaccgtgaacccagaccccagcctgaaggagtttgaaggagccaccctgcgctatgccagcctgaagctgagaaatgccccccacccagatgatgatgacagctgcagcatcaacagcgaccctgaggccaagtgctttgctgtgcgcagcctgggctgggtggagatggccgaggaggacctggcccctgggaagagctctgtggccgtgaacaactgcatccggcagctgagctactgcaagaatgacatccgggacacagtgggcatctggggcgagggcaaggacatgtacctgatcctggagaatgacatgctgagcctggtggaccccatggacagatctgtgctgcacagccagcccatcgtgtccatccgggtgtggggcgtgggccgggacaatggccgggactttgcctacgtggcccgggacaaggacacccgcatcctgaagtgccacgtgttccgctgtgacaccccagccaaggccatcgccaccagcctgcacgagatctgcagcaagatcatggccgagaggaagaatgccaaggccctggcctgcagcagcctgcaggagcgggccaacgtgaacctggatgtgcccctgcaggtggacttccccacccccaagacagagctggtgcagaagttccacgtgcagtacctgggcatgctgcctgtggacaagcctgtgggcatggacatcctgaacagcgccatcgagaacctgatgaccagcagcaacaaggaggactggctgtctgtgaacatgaatgtggctgatgccaccgtgaccgtcatcagcgagaagaatgaggaggaggtgctggtggagtgccgggtgcgcttcctgtccttcatgggcgtgggcaaggatgtgcacacctttgccttcatcatggacaccggcaaccagagatttgagtgccacgtgttctggtgtgagcccaatgctggaaatgtgtctgaggccgtgcaggccgcctgcatgctgcgctaccagaagtgcctggtggcccggccccccagccagaaggtgcggcccccacctcctcctgctgacagcgtgacccggcgggtgaccaccaacgtgaagaggggcgtgctgagcctgattgacaccctgaagcagaagaggcctgtgacagagatgccctag

SEQ ID NO: 143502 - DNA, 2280 bp, synthetic construct
  misc_feature 1..2280: note = Description of Artificial Sequence: Synthetic coding sequence
  source 1..2280: mol_type = other DNA
atgtctgaggtgctgcctgctgacagcggcgtggacaccctggccgtgttcatggccagcagcggcaccacagatgtgaccaacagaaacagccctgccaccccacccaacaccctgaacctgcggagcagccacaatgagctgctgaatgctgagatcaagcacacagagaccaagaacagcaccccacccaagtgcaggaagaagtatgccctgaccaacatccaggccgccatgggcctgagtgaccctgctgcccagcccctgctgggcaatggcagcgccaacatcaagctggtgaagaatggagagaaccagctgaggaaggctgctgagcagggccagcaggaccccaacaagaacctgagccccacagctgtgatcaacatcaccagcgagaagctggagggcaaggagccccacccccaggacagcagcagctgtgagatcctgcccagccagcccaggaggaccaagagcttcctgaactactatgctgacctggagaccagcgcccgggagctggagcagaacagaggcaaccaccacggcacagctgaggagaagagccagcctgtgcagggccaggccagcaccatcattggaaatggagacctgctgctgcagaagcccaaccggccccagagcagcccagaagatggccaggtggccaccgtgagcagcagccctgagaccaagaaggaccaccccaagacaggagccaagacagactgtgccctgcaccgcatccagaacctggcccccagtgatgaggagagctcctggaccaccctgagccaggacagcgccagccccagcagcccagatgaaacagctgacatctggagcgaccacagcttccagacagatcctgacctgcccccaggctggaagagggtgtctgacattgctggcacctactactggcacatccccaccggcaccacccagtgggagaggcctgtgtccatcccagctgacctgcagggcagcaggaagggcagcctgagctctgtgacccccagccccaccccagaaaatgagaagcagccctggagcgactttgctgtgctgaatggaggcaagatcaacagcgacatctggaaggacctgcatgctgccaccgtgaacccagaccccagcctgaaggagtttgaaggagccaccctgcgctatgccagcctgaagctgagaaatgccccccacccagatgatgatgacagctgcagcatcaacagcgaccctgaggccaagtgctttgctgtgcgcagcctgggctgggtggagatggccgaggaggacctggcccctgggaagagctctgtggccgtgaacaactgcatccggcagctgagctactgcaagaatgacatccgggacacagtgggcatctggggcgagggcaaggacatgtacctgatcctggagaatgacatgctgagcctggtggaccccatggacagatctgtgctgcacagccagcccatcgtgtccatccgggtgtggggcgtgggccgggacaatggccgggactttgcctacgtggcccgggacaaggacacccgcatcctgaagtgccacgtgttccgctgtgacaccccagccaaggccatcgccaccagcctgcacgagatctgcagcaagatcatggccgagaggaagaatgccaaggccctggcctgcagcagcctgcaggagcgggccaacgtgaacctggatgtgcccctgcaggtggacttccccacccccaagacagagctggtgcagaagttccacgtgcagtacctgggcatgctgcctgtggacaagcctgtgggcatggacatcctgaacagcgccatcgagaacctgatgaccagcagcaacaaggaggactggctgtctgtgaacatgaatgtggctgatgccaccgtgaccgtcatcagcgagaagaatgaggaggaggtgctggtggagtgccgggtgcgcttcctgtccttcatgggcgtgggcaaggatgtgcacacctttgccttcatcatggacaccggcaaccagagatttgagtgccacgtgttctggtgtgagcccaatgctggaaatgtgtctgaggccgtgcaggccgcctgcatgctgcgctaccagaagtgcctggtggcccggccccccagccagaaggtgcggcccccacctcctcctgctgacagcgtgacccggcgggtgaccaccaacgtgaagaggggcgtgctgagcctgattgacaccctgaagcagaagaggcctgtgacagagatgccctag

SEQ ID NO: 143503 - DNA, 84 bp, synthetic construct
  misc_feature 1..84: note = Description of Artificial Sequence: Synthetic coding sequence
  source 1..84: mol_type = other DNA
atgtctgaggtgctgcctgctgacagcggcgtggacaccctggccgtgttcatggccagcagcggcaccacagatgtgacctag

SEQ ID NO: 143504 - DNA, 207 bp, synthetic construct
  misc_feature 1..207: note = Description of Artificial Sequence: Synthetic coding sequence
  source 1..207: mol_type = other DNA
atgtctgaggtgctgcctgctgacagcggcgtggacaccctggccgtgttcatggccagcagcggcaccacagatgtgaccaacagaaacagccctgccaccccacccaacaccctgaacctgcggagcagccacaatgagctgctgaatgctgagatcaagcacacagagaccaagaacagcaccccacccaagtgcaggaagtag

SEQ ID NO: 143505 - DNA, 2211 bp, synthetic construct
  misc_feature 1..2211: note = Description of Artificial Sequence: Synthetic coding sequence
  source 1..2211: mol_type = other DNA
atgtctgaggtgctgcctgctgacagcggcgtggacaccctggccgtgttcatggccagcagcggcaccacagatgtgaccaacagaaacagccctgccaccccacccaacaccctgaacctgcggagcagccacaatgagctgctgaatgctgagatcaagcacacagagaccaagaacagcaccccacccaagtgcaggaagaagtatgccctgaccaacatccaggccgccatgggcctgagtgaccctgctgcccagcccctgctgggcaatggcagcgccaacatcaagctggtgaagaatggagagaaccagctgaggaaggctgctgagcagggccagcaggaccccaacaagaacctgagccccacagctgtgatcaacatcaccagcgagaagctggagggcaaggagccccacccccaggacagcagcagctgtgagatcctgcccagccagcccaggaggaccaagagcttcctgaactactatgctgacctggagaccagcgcccgggagctggagcagaacagaggcaaccaccacggcacagctgaggagaagagccagcctgtgcagggccaggccagcaccatcattggaaatggagacctgctgctgcagaagcccaaccggccccagagcagcccagaagatggccaggtggccaccgtgagcagcagccctgagaccaagaaggaccaccccaagacaggagccaagacagactgtgccctgcaccgcatccagaacctggcccccagtgatgaggagagctcctggaccaccctgagccaggacagcgccagccccagcagcccagatgaaacagacatctggagcgaccacagcttccagacagatcctgacctgcccccaggctggaagagggtgtctgacattgctggcacctactactggcacatccccaccggcaccacccagtgggagaggcctgtgtccatcccagctgacctgcagggcagcaggaagggcagcctgagctctgtgacccccagccccaccccagaaaatgaagacctgcatgctgccaccgtgaacccagaccccagcctgaaggagtttgaaggagccaccctgcgctatgccagcctgaagctgagaaatgccccccacccagatgatgatgacagctgcagcatcaacagcgaccctgaggccaagtgctttgctgtgcgcagcctgggctgggtggagatggccgaggaggacctggcccctgggaagagctctgtggccgtgaacaactgcatccggcagctgagctactgcaagaatgacatccgggacacagtgggcatctggggcgagggcaaggacatgtacctgatcctggagaatgacatgctgagcctggtggaccccatggacagatctgtgctgcacagccagcccatcgtgtccatccgggtgtggggcgtgggccgggacaatggccgggactttgcctacgtggcccgggacaaggacacccgcatcctgaagtgccacgtgttccgctgtgacaccccagccaaggccatcgccaccagcctgcacgagatctgcagcaagatcatggccgagaggaagaatgccaaggccctggcctgcagcagcctgcaggagcgggccaacgtgaacctggatgtgcccctgcaggacttccccacccccaagacagagctggtgcagaagttccacgtgcagtacctgggcatgctgcctgtggacaagcctgtgggcatggacatcctgaacagcgccatcgagaacctgatgaccagcagcaacaaggaggactggctgtctgtgaacatgaatgtggctgatgccaccgtgaccgtcatcagcgagaagaatgaggaggaggtgctggtggagtgccgggtgcgcttcctgtccttcatgggcgtgggcaaggatgtgcacacctttgccttcatcatggacaccggcaaccagagatttgaatgtcatgtgttctggtgtgagcccaatgctggaaatgtgtctgaggccgtgcaggccgcctgcatgctgcgctaccagaagtgcctggtggcccggccccccagccagaaggtgcggcccccacctcctcctgctgacagcgtgaccaggagagtgaccaccaacgtgaagaggggcgtgctgagcctgattgacaccctgaagcagaagaggcctgtgacagagatgccctag

SEQ ID NO: 143506 - DNA, 2187 bp, synthetic construct
  misc_feature 1..2187: note = Description of Artificial Sequence: Synthetic coding sequence
  source 1..2187: mol_type = other DNA
tgagacaccctggccgtgttcatggccagcagcggcaccacagatgtgaccaacagaaacagccctgccaccccacccaacaccctgaacctgcggagcagccacaatgagctgctgaatgctgagatcaagcacacagagaccaagaacagcaccccacccaagtgcaggaagaagtatgccctgaccaacatccaggccgccatgggcctgagtgaccctgctgcccagcccctgctgggcaatggcagcgccaacatcaagctggtgaagaatggagagaaccagctgaggaaggctgctgagcagggccagcaggaccccaacaagaacctgagccccacagctgtgatcaacatcaccagcgagaagctggagggcaaggagccccacccccaggacagcagcagctgtgagatcctgcccagccagcccaggaggaccaagagcttcctgaactactatgctgacctggagaccagcgcccgggagctggagcagaacagaggcaaccaccacggcacagctgaggagaagagccagcctgtgcagggccaggccagcaccatcattggaaatggagacctgctgctgcagaagcccaaccggccccagagcagcccagaagatggccaggtggccaccgtgagcagcagccctgagaccaagaaggaccaccccaagacaggagccaagacagactgtgccctgcaccgcatccagaacctggcccccagtgatgaggagagctcctggaccaccctgagccaggacagcgccagccccagcagcccagatgaaacagctgacatctggagcgaccacagcttccagacagatcctgacctgcccccaggctggaagagggtgtctgacattgctggcacctactactggcacatccccaccggcaccacccagtgggagaggcctgtgtccatcccagctgacctgcagggcagcaggaagggcagcctgagctctgtgacccccagccccaccccagaaaatgaagacctgcacgccgccaccgtgaacccagaccccagcctgaaggagtttgagggcgccaccctgcgctatgccagcctgaagctgagaaatgccccccacccagatgatgatgacagctgcagcatcaacagcgaccctgaggccaagtgctttgctgtgcgcagcctgggctgggtggagatggccgaggaggacctggcccctgggaagagctctgtggccgtgaacaactgcatccggcagctgagctactgcaagaatgacatccgggacacagtgggcatctggggcgagggcaaggacatgtacctgatcctggagaatgacatgctgagcctggtggaccccatggacagatctgtgctgcacagccagcccatcgtgtccatccgggtgtggggcgtgggccgggacaatggccgggactttgcctacgtggcccgggacaaggacacccgcatcctgaagtgccacgtgttccgctgtgacaccccagccaaggccatcgccaccagcctgcacgagatctgcagcaagatcatggccgagaggaagaatgccaaggccctggcctgcagcagcctgcaggagcgggccaacgtgaacctggatgtgcccctgcaggtggacttccccacccccaagacagagctggtgcagaagttccacgtgcagtacctgggcatgctgcctgtggacaagcctgtgggcatggacatcctgaacagcgccatcgagaacctgatgaccagcagcaacaaggaggactggctgtctgtgaacatgaatgtggctgatgccaccgtgaccgtcatcagcgagaagaatgaggaggaggtgctggtggagtgccgggtgcgcttcctgtccttcatgggcgtgggcaaggatgtgcacacctttgccttcatcatggacaccggcaaccagagatttgaatgtcatgtgttctggtgtgagcccaatgctggaaatgtgtctgaggccgtgcaggccgcctgcatgctgcgctaccagaagtgcctggtggcccggccccccagccagaaggtgcggcccccacctcctcctgctgacagcgtgaccaggagagtgaccaccaacgtgaagaggggcgtgctgagcctgattgacaccctgaagcagaagaggcctgtgacagagatgccctag

SEQ ID NO: 143507 - DNA, 633 bp, synthetic construct; identical to SEQ ID NO: 143498
  misc_feature 1..633: note = Description of Artificial Sequence: Synthetic coding sequence
  source 1..633: mol_type = other DNA

SEQ ID NO: 143508 - DNA, 1476 bp, synthetic construct
  misc_feature 1..1476: note = Description of Artificial Sequence: Synthetic coding sequence
  source 1..1476: mol_type = other DNA
atgctgggcaaggactacatgctggccatcatcctggtgaactgtgatgatgacctgtggggagaccacagcctggaggtggaggccggcctgcccccaggctggaggaagatccatgatgctgctggcacctactactggcacgtgcccagcggcagcacccagtggcagaggcccacctgggagctgggagatgctgaagatcctggcactggaacagagggcatctggggcctgcggccccccaagggccgctccttcagcagcctggagagcagcctggacaggagcaacagcctgtcctggtatggaggagagagctacatccagagcatggagcccggggccaagtgctttgctgtgcgcagcctgggctgggtggaggtgcctgaggaggacctggcccctgggaagagcagcattgctgtgaacaactgcatccagcagctggcccagaccaggagccgcagccagcccccagatggagcctggggcgagggccagaacatgctgatgatcctgaagaaggatgccatgagcctggtgaaccccctggaccacagcctcatccactgccagcccctggtgcacatccgggtgtggggcgtgggcagcagcaagggccggcccatcagcgccccagcccgggactttgcctttgtggccagtgacaaggacagctgcatgctgaagtgccacgtgttctgctgtgatgtgcctgccaaggccatcgccagcgccctgcacggcctgtgtgcccagatcctgtctgagcgggtggaggtgtctggagatgccagctgctgcagcccagaccccatcagccctgaggacctgccccggcaggtggagctgctggatgctgtgtcccaggccgcccagaagtatgaggccctgtacatgggcaccctgcctgtgaccaaggccatgggcatggatgtgctgaatgaggccatcggcaccctgacagcccggggggacagaaatgcctgggtgcccaccatgctgtctgtgtctgacagcctgatgacagcccaccccatccaggccgaggccagcacagaggaggagcccctgtggcagtgccctgtgcggctggtgaccttcatcggcgtgggccgggacccccacaccttcggcctgattgctgacctgggccggcagagcttccagtgtgccgccttctggtgccagccccatgctgggggcctgtctgaggccgtgcaggccgcctgcatggtgcagtaccagaagtgcctggtggccagcgctgcccggggcaaggcctggggcgcccaggcccgggcccggctgcggctgaagaggaccagctccatggacagccctgggggccccctgcccctgcccctgctgaagggcggcgtgggcggggccggggccacccccaggaagaggggcgtcttctccttcctggatgccttccggctgaagcccagcctgctgcacatgccctag

SEQ ID NO: 143509 - DNA, 1461 bp, synthetic construct
  misc_feature 1..1461: note = Description of Artificial Sequence: Synthetic coding sequence
  source 1..1461: mol_type = other DNA
atgctgggcaaggactacatgctggccatcatcctggtgaactgtgatgatgacctgtggggagaccacagcctggaggtggaggccggcctgcccccaggctggaggaagatccatgatgctgctggcacctactactggcacgtgcccagcggcagcacccagtggcagaggcccacctgggagctgggagatgctgaagatcctggcactggaacagagggcatctggggcctgcggccccccaagggccgctccttcagcagcctggagagcagcctggacaggagcaacagcctgtcctggtatggaggagagagctacatccagagcatggagcccggggccaagtgctttgctgtgcgcagcctgggctgggtggaggtgcctgaggaggacctggcccctgggaagagcagcattgctgtgaacaactgcatccagcagctggcccagaccaggagccgcagccagcccccagatggagcctggggcgagggccagaacatgctgatgatcctgaagaaggatgccatgagcctggtgaaccccctggaccacagcctcatccactgccagcccctggtgcacatccgggtgtggggcgtgggcagcagcaagggccgggaccgggactttgcctttgtggccagtgacaaggacagctgcatgctgaagtgccacgtgttctgctgtgatgtgcctgccaaggccatcgccagcgccctgcacggcctgtgtgcccagatcctgtctgagcgggtggaggtgtctggagatgccagctgctgcagcccagaccccatcagccctgaggacctgccccggcaggtggagctgctggatgctgtgtcccaggccgcccagaagtatgaggccctgtacatgggcaccctgcctgtgaccaaggccatgggcatggatgtgctgaatgaggccatcggcaccctgacagcccggggggacagaaatgcctgggtgcccaccatgctgtctgtgtctgacagcctgatgacagcccaccccatccaggccgaggccagcacagaggaggagcccctgtggcagtgccctgtgcggctggtgaccttcatcggcgtgggccgggacccccacaccttcggcctgattgctgacctgggccggcagagcttccagtgtgccgccttctggtgccagccccacgccggcggcctgtctgaggccgtgcaggccgcctgcatggtgcagtaccagaagtgcctggtggccagcgctgcccggggcaaggcctggggcgcccaggcccgggcccggctgcggctgaagaggaccagctccatggacagccctgggggccccctgcccctgcccctgctgaagggcggcgtgggcggggccggggccacccccaggaagaggggcgtcttctccttcctggatgccttccggctgaagcccagcctgctgcacatgccctag

SEQ ID NO: 143510 - DNA, 1020 bp, synthetic construct
  misc_feature 1..1020: note = Description of Artificial Sequence: Synthetic coding sequence
  source 1..1020: mol_type = other DNA
atgctgggcaaggactacatgctggccatcatcctggtgaactgtgatgatgacctgtggggagaccacagcctggaggtggaggccggcctgcccccaggctggaggaagatccatgatgctgctggcacctactactggcacgtgcccagcggcagcacccagtggcagaggcccacctgggagctgggagatgctgaagatcctggcactggaacagagggcatctggggcctgcggccccccaagggccgctccttcagcagcctggagagcagcctggacaggagcaacagcctgtcctggtatggaggagagagctacatccagagcatggagcccggggccaagtgctttgctgtgcgcagcctgggctgggtggaggtgcctgaggaggacctggcccctgggaagagcagcattgctgtgaacaactgcatccagcagctggcccagaccaggagccgcagccagcccccagatggagcctggggcgagggccagaacatgctgatgatcctgaagaaggatgccatgagcctggtgaaccccctggaccacagcctcatccactgccagcccctggtgcacatccgggtgtggggcgtgggcagcagcaagggccgggaccgggactttgcctttgtggccagtgacaaggacagctgcatgctgaagtgccacgtgttctgctgtgatgtgcctgccaaggccatcgccagcgccctgcacggcctgtgtgcccagatcctgtctgagcgggtggaggtgtctggagatgccagctgctgcagcccagaccccatcagccctgaggacctgccccggcaggtggagctgctggatgctgtgtcccaggccgcccagaagtatgaggccctgtacatgggcaccctgcctgtgaccaaggccatgggccggggccagtaccggggcggggccatcgtggccgtgccctgtgccccctgtgacatctactggtgctggccccggcccacccacctgtggccccacaggtag

SEQ ID NO: 143511 - DNA, 1455 bp, synthetic construct
  misc_feature 1..1455: note = Description of Artificial Sequence: Synthetic coding sequence
  source 1..1455: mol_type = other DNA
atgctgggcaaggactacatgctggccatcatcctggtgaactgtgatgatgacctgtggggagaccacagcctggaggtggaggccggcctgcccccaggctggaggaagatccatgatgctgctggcacctactactggcacgtgcccagcggcagcacccagtggcagaggcccacctgggagctgggagatgctgaagatcctggcactggaacagagggcatctggggcctgcggccccccaagggccgctccttcagcagcctggagagcagcctggacaggagcaacagcctgtcctggtatggaggagagagctacatccagagcatggagcccggggccaagtgctttgctgtgcgcagcctgggctgggtggaggtgcctgaggaggacctggcccctgggaagagcagcattgctgtgaacaactgcatccagcagctggcccagaccaggagccgcagccagcccccagatggagcctggggcgagggccagaacatgctgatgatcctgaagaaggatgccatgagcctggtgaaccccctggaccacagcctcatccactgccagcccctggtgcacatccgggtgtggggcgtgggcagcagcaagggccgggactttgcctttgtggccagtgacaaggacagctgcatgctgaagtgccacgtgttctgctgtgatgtgcctgccaaggccatcgccagcgccctgcacggcctgtgtgcccagatcctgtctgagcgggtggaggtgtctggagatgccagctgctgcagcccagaccccatcagccctgaggacctgccccggcaggtggagctgctggatgctgtgtcccaggccgcccagaagtatgaggccctgtacatgggcaccctgcctgtgaccaaggccatgggcatggatgtgctgaatgaggccatcggcaccctgacagcccggggggacagaaatgcctgggtgcccaccatgctgtctgtgtctgacagcctgatgacagcccaccccatccaggccgaggccagcacagaggaggagcccctgtggcagtgccctgtgcggctggtgaccttcatcggcgtgggccgggacccccacaccttcggcctgattgctgacctgggccggcagagcttccagtgtgccgccttctggtgccagccccacgccggcggcctgtctgaggccgtgcaggccgcctgcatggtgcagtaccagaagtgcctggtggccagcgctgcccggggcaaggcctggggcgcccaggcccgggcccggctgcggctgaagaggaccagctccatggacagccctgggggccccctgcccctgcccctgctgaagggcggcgtgggcggggccggggccacccccaggaagaggggcgtcttctccttcctggatgccttccggctgaagcccagcctgctgcacatgccctag

SEQ ID NO: 143512 - DNA, 738 bp, synthetic construct
  misc_feature 1..738: note = Description of Artificial Sequence: Synthetic coding sequence
  source 1..738: mol_type = other DNA
atgctgggcaaggactacatgctggccatcatcctggtgaactgtgatgatgacctgtggggagaccacagcctggaggtggaggccggcctgcccccaggctggaggaagatccatgatgctgctggcacctactactggcacgtgcccagcggcagcacccagtggcagaggcccacctgggagctgggagatgctgaagatcctggcactggaacagagggcatctggggcctgcggccccccaagggccgctccttcagcagcctggagagcagcctggacaggagcaacagcctgtcctggtatggaggagagagctacatccagagcatggagcccggggccaagtgctttgctgtgcgcagcctgggctgggtggaggtgcctgaggaggacctggcccctgggaagagcagcattgctgtgaacaactgcatccagcagctggcccagaccaggagccgcagccagcccccagatggagcctggggcgagggccagaacatgctgatgatcctgaagaaggatgccatgagcctggtgaaccccctggaccacagcctcatccactgccagcccctggtgcacatccgggtgtggggcgtgggcagcagcaagggccgcagcagtgatgtggaccccggcctgctgcccctgcccggccctgccctggtgggggagggcggccccagcagcgctggcaccgtgtggggcgagagcgagcggctgggctag

SEQ ID NO: 143513 - DNA, 792 bp, synthetic construct
  misc_feature 1..792: note = Description of Artificial Sequence: Synthetic coding sequence
  source 1..792: mol_type = other DNA
atgctgaagtgccacgtgttctgctgtgatgtgcctgccaaggccatcgccagcgccctgcacggcctgtgtgcccagatcctgtctgagcgggtggaggtgtctggagatgccagctgctgcagcccagaccccatcagccctgaggacctgccccggcaggtggagctgctggatgctgtgtcccaggccgcccagaagtatgaggccctgtacatgggcaccctgcctgtgaccaaggccatgggcatggatgtgctgaatgaggccatcggcaccctgacagcccggggggacagaaatgcctgggtgcccaccatgctgtctgtgtctgacagcctgatgacagcccaccccatccaggccgaggccagcacagaggaggagcccctgtggcagtgccctgtgcggctggtgaccttcatcggcgtgggccgggacccccacaccttcggcctgattgctgacctgggccggcagagcttccagtgtgccgccttctggtgccagccccatgctgggggcctgtctgaggccgtgcaggccgcctgcatggtgcagtaccagaagtgcctggtggccagcgctgcccggggcaaggcctggggcgcccaggcccgggcccggctgcggctgaagaggaccagctccatggacagccctgggggccccctgcccctgcccctgctgaagggcggcgtgggcggggccggggccacccccaggaagaggggcgtcttctccttcctggatgccttccggctgaagcccagcctgctgcacatgccctag

SEQ ID NO: 143514 - DNA, 645 bp, synthetic construct
  misc_feature 1..645: note = Description of Artificial Sequence: Synthetic coding sequence
  source 1..645: mol_type = other DNA
atgctgggcaaggactacatgctggccatcatcctggtgaactgtgatgatgacctgtggggagaccacagcctggaggtggaggccggcctgcccccaggctggaggaagatccatgatgctgctggcacctactactggcacgtgcccagcggcagcacccagtggcagaggcccacctgggagctgggagatgctgaagatcctggcactggaacagagggcatctggggcctgcggccccccaagggccgctccttcagcagcctggagagcagcctggacaggagcaacagcctgtcctggtatggaggagagagctacatccagagcatggagcccggggccaagtgctttgctgtgcgcagcctgggctgggtggaggtgcctgaggaggacctggcccctgggaagagcagcattgctgtgaacaactgcatccagcagctggcccagaccaggagccgcagccagcccccagatggagcctggggcgagggccagaacatgctgatgatcctgaagaaggatgccatgagcctggtgaaccccctggaccacagcctcatccactgccagcccctggccgtcatccccacagatgctgacccccagtacctgaacccctggacccagatcctgtag

SEQ ID NO: 143515 - DNA, 378 bp, synthetic construct
  misc_feature 1..378: note = Description of Artificial Sequence: Synthetic coding sequence
  source 1..378: mol_type = other DNA
atggagccagatggcacctatgagcccggctttgtgggcatccgcttctgccaggagtgcaacaacatgctgtaccccaaggaggacaaggaaaatcgcatcctgctgtatgcctgcaggaactgtgactaccagcaggaggccgacaacagctgcatctacgtgaacaagatcacccatgaggtggatgagctgacccagatcatcgcagatgtgtcccaggaccccaccctgcccaggacagaggaccacccctgccagaagtgtggccacaaggaggccgtgttcttccagagccacagcgcccgggcagaagatgccatgaggctgtactacgtgtgcacagccccccactgcggccaccgctggacagaatag

SEQ ID NO: 143516 - DNA, 1836 bp, synthetic construct
  misc_feature 1..1836: note = Description of Artificial Sequence: Synthetic coding sequence
  source 1..1836: mol_type = other DNA
atgctggccagcctggagaaggacaagacagcccctggcagcgcccaggtggccggcctgtgtggccgcctgaccctgcaccgggacctgaggacaggccgctgggagccagacccccagaggagccgccgctgcctgcgggacccccagagggtgctggagtactgccggcagatgtacccagagctgcagatcgcccgggtggagcaggccacccaggccatccccatggagcgctggtgtggcggcagccgcagcggcagctgtgcccacccccaccaccaggtggtgcccttccgctgcctgcctggagaatttgtgtctgaggccctgctggtgcctgagggctgccgcttcctgcaccaggagaggatggaccagtgtgagagcagcaccaggaggcaccaggaggcccaggaggcctgcagcagccagggcctcatcctgcacggcagcggcatgctgctgccctgtggcagtgaccgcttccggggcgtggagtatgtgtgctgccccccacctggcaccccagaccccagcggcacagctgtgggggaccccagcaccaggtcctggcccccaggcagccgggtggagggcgcagaagatgaggaggaggaggagagcttcccccagcctgtggatgactactttgtggagcccccccaggccgaggaggaggaggagaccgtgcccccacccagcagccacaccctggccgtggtgggcaaggtgacccccaccccccggcccacagatggagtggacatctacttcggcatgcctggagagatcagcgagcacgagggcttcctgcgggccaagatggacctggaggagaggaggatgaggcagatcaatgaggtgatgagggagtgggccatggctgacaaccagagcaagaacctgcccaaggctgaccggcaggccctgaatgagcacttccagagcatcctgcagaccctggaggagcaggtgtctggagagcggcagaggctggtggagacccacgccaccagggtcatcgccctgatcaatgaccagaggagagctgccctggagggcttcctggccgccctgcaggccgaccccccccaggccgagcgggtgctgctggccctgcggcgctacctgcgggcagagcagaaggagcagaggcacaccctgcggcactaccagcacgtggccgctgtggaccctgagaaggcccagcagatgaggttccaggtgcacacccacctgcaggtgattgaggagcgggtgaaccagagcctgggcctgctggaccagaacccccacctggcccaggagctgcggccccagatccaggagctgctgcacagcgagcacctgggccccagcgagctggaggccccagcccctgggggcagcagcgaggacaagggcggcctgcagcccccagacagcaaggatgacacccccatgaccctgcccaagggcagcacagagcaggatgctgccagccctgagaaggagaagatgaaccccctggagcagtatgaaaggaaggtgaatgcctctgtgccccggggcttccccttccacagcagcgagatccagagagatgagctggccccagctggcaccggggtgtcccgggaggccgtgtctggcctgctgatcatgggcgccggcggcggcagcctgattgtgctgtccatgctgctgctgcggaggaagaagccctacggggccatcagccatggagtggtggaggtggaccccatgctgaccctggaggagcagcagctgcgggagctgcagagacatggctatgagaaccccacctaccgcttcctggaggagcggccctag

SEQ ID NO: 143517 - DNA, 2292 bp, synthetic construct
  misc_feature 1..2292: note = Description of Artificial Sequence: Synthetic coding sequence
  source 1..2292: mol_type = other DNA
atggccgccaccggcacagctgctgctgctgccaccggccgcctgctgctgctgctgctggtgggcctgacagccccagccctggccctggccggctacatcgaggccctggccgccaatgccggcactggatttgctgtggccgagccccagatcgccatgttctgtgggaagctgaacatgcacgtgaacatccagacaggcaagtgggagccagaccccaccggcaccaagagctgctttgagaccaaggaggaggtgctgcagtactgccaggagatgtacccagagctgcagatcaccaacgtgatggaggccaaccagagggtgtccattgacaactggtgcagaagagacaagaagcagtgcaagagcagatttgtgacccccttcaagtgcctggtgggggagtttgtgtctgatgtgctgctggtgcctgagaagtgccagttcttccacaaggagaggatggaggtgtgtgagaaccaccagcactggcacacagtggtgaaggaggcctgcctgacccagggcatgaccctgtacagctatggcatgctgctgccctgtggggtggaccagttccacggcacagaatatgtgtgctgcccccagaccaagatcatcggctctgtgtccaaggaggaggaggaggaggatgaggaggaggaggaggaggaggatgaggaggaggactatgatgtgtacaagtctgagttccccacagaggccgacctggaggacttcacagaggccgctgtggatgaagatgatgaagatgaggaggagggggaggaggtggtggaggaccgggactactactatgacaccttcaagggagatgactacaatgaggagaaccccacagagcccggcagtgatggcaccatgtctgacaaggagatcacccatgatgtgaaggctgtgtgcagccaggaggccatgacaggcccctgcagagctgtgatgccccgctggtactttgacctgagcaagggcaaatgtgtgcgcttcatctacggcggctgcggcggcaacagaaacaactttgaaagtgaggactactgcatggctgtgtgcaaggccatgatcccccccacccccctgcccaccaatgatgtggatgtgtactttgagaccagcgcagatgacaatgaacatgcccgcttccagaaggccaaggagcagctggagatccgccacaggaacaggatggacagagtgaagaaggagtgggaggaggccgagctgcaggccaagaacctgcccaaggccgagcggcagaccctcatccagcacttccaggccatggtgaaggccctggagaaggaggccgccagcgagaagcagcagctggtggagacccacctggcccgggtggaggccatgctgaatgacagaagaaggatggccctggagaactacctggccgccctgcagagcgaccccccccggccccaccgcatcctgcaggccctgcggcgctacgtgcgggcagagaacaaggaccggctgcacaccatccgccactaccagcacgtgctggccgtggaccctgagaaggccgcccagatgaagagccaggtgatgacccacctgcacgtgattgaggagaggaggaaccagagcctgagcctgctgtacaaggtgccctacgtggcccaggagatccaggaggagattgatgagctgctgcaggagcagagagctgacatggaccagttcaccgccagcatcagcgagacccctgtggatgtgcgggtgagcagcgaggagagcgaggagatcccccccttccaccccttccaccccttccctgccctgcctgaaaatgaagacacccagcctgagctgtaccaccccatgaagaagggcagcggcgtgggggagcaggacggcggcctcatcggggctgaggagaaggtgatcaacagcaagaacaaggtggatgagaacatggtgattgatgagaccctggatgtgaaggagatgatcttcaatgctgagcgggtgggcggcctggaggaggagcgggagagcgtgggccccctgcgggaggacttcagcctgagcagcagcgccctgattggcctgctggtgattgctgtggccatcgccaccgtgattgtcatcagcctggtgatgctgaggaagaggcagtatggcaccatcagccacggcatcgtggaggtggaccccatgctgaccccagaggagcggcacctgaacaagatgcagaaccacggctatgagaaccccacctacaagtacctggagcagatgcagatctag

SEQ ID NO: 143518 - DNA, 2286 bp, synthetic construct
  misc_feature 1..2286: note = Description of Artificial Sequence: Synthetic coding sequence
  source 1..2286: mol_type = other DNA
atgctgcgggcccctggagagctgccccggcaggccgcccgctgcagcctgtgccgcctgggccctggccggggccgggccttcttcaagtggcgctgcctgcctgcctctgtggaccggggcaaccccctgtgggccctggccgccaatgccggcactggatttgctgtggccgagccccagatcgccatgttctgtgggaagctgaacatgcacgtgaacatccagacaggcaagtgggagccagaccccaccggcaccaagagctgctttgagaccaaggaggaggtgctgcagtactgccaggagatgtacccagagctgcagatcaccaacgtgatggaggccaaccagagggtgtccattgacaactggtgcagaagagacaagaagcagtgcaagagcagatttgtgacccccttcaagtgcctggtgggggagtttgtgtctgatgtgctgctggtgcctgagaagtgccagttcttccacaaggagaggatggaggtgtgtgagaaccaccagcactggcacacagtggtgaaggaggcctgcctgacccagggcatgaccctgtacagctatggcatgctgctgccctgtggggtggaccagttccacggcacagaatatgtgtgctgcccccagaccaagatcatcggctctgtgtccaaggaggaggaggaggaggatgaggaggaggaggaggaggaggatgaggaggaggactatgatgtgtacaagtctgagttccccacagaggccgacctggaggacttcacagaggccgctgtggatgaagatgatgaagatgaggaggagggggaggaggtggtggaggaccgggactactactatgacaccttcaagggagatgactacaatgaggagaaccccacagagcccggcagtgatggcaccatgtctgacaaggagatcacccatgatgtgaaggctgtgtgcagccaggaggccatgacaggcccctgcagagctgtgatgccccgctggtactttgacctgagcaagggcaaatgtgtgcgcttcatctacggcggctgcggcggcaacagaaacaactttgaaagtgaggactactgcatggctgtgtgcaaggccatgatcccccccacccccctgcccaccaatgatgtggatgtgtactttgagaccagcgcagatgacaatgaacatgcccgcttccagaaggccaaggagcagctggagatccgccacaggaacaggatggacagagtgaagaaggagtgggaggaggccgagctgcaggccaagaacctgcccaaggccgagcggcagaccctcatccagcacttccaggccatggtgaaggccctggagaaggaggccgccagcgagaagcagcagctggtggagacccacctggcccgggtggaggccatgctgaatgacagaagaaggatggccctggagaactacctggccgccctgcagagcgaccccccccggccccaccgcatcctgcaggccctgcggcgctacgtgcgggcagagaacaaggaccggctgcacaccatccgccactaccagcacgtgctggccgtggaccctgagaaggccgcccagatgaagagccaggtgatgacccacctgcacgtgattgaggagaggaggaaccagagcctgagcctgctgtacaaggtgccctacgtggcccaggagatccaggaggagattgatgagctgctgcaggagcagagagctgacatggaccagttcaccgccagcatcagcgagacccctgtggatgtgcgggtgagcagcgaggagagcgaggagatcccccccttccaccccttccaccccttccctgccctgcctgaaaatgaaggcagcggcgtgggggagcaggacggcggcctcatcggggctgaggagaaggtgatcaacagcaagaacaaggtggatgagaacatggtgattgatgagaccctggatgtgaaggagatgatcttcaatgctgagcgggtgggcggcctggaggaggagcgggagagcgtgggccccctgcgggaggacttcagcctgagcagcagcgccctgattggcctgctggtgattgctgtggccatcgccaccgtgattgtcatcagcctggtgatgctgaggaagaggcagtatggcaccatcagccacggcatcgtggaggtggaccccatgctgaccccagaggagcggcacctgaacaagatgcagaaccacggctatgagaaccccacctacaagtacctggagcagatgcagatctag

SEQ ID NO: 143519 - DNA, 2256 bp, synthetic construct
  misc_feature 1..2256: note = Description of Artificial Sequence: Synthetic coding sequence
  source 1..2256: mol_type = other DNA
atggccgccaccggcacagctgctgctgctgccaccggccgcctgctgctgctgctgctggtgggcctgacagccccagccctggccctggccggctacatcgaggccctggccgccaatgccggcactggatttgctgtggccgagccccagatcgccatgttctgtgggaagctgaacatgcacgtgaacatccagacaggcaagtgggagccagaccccaccggcaccaagagctgctttgagaccaaggaggaggtgctgcagtactgccaggagatgtacccagagctgcagatcaccaacgtgatggaggccaaccagagggtgtccattgacaactggtgcagaagagacaagaagcagtgcaagagcagatttgtgacccccttcaagtgcctggtgggggagtttgtgtctgatgtgctgctggtgcctgagaagtgccagttcttccacaaggagaggatggaggtgtgtgagaaccaccagcactggcacacagtggtgaaggaggcctgcctgacccagggcatgaccctgtacagctatggcatgctgctgccctgtggggtggaccagttccacggcacagaatatgtgtgctgcccccagaccaagatcatcggctctgtgtccaaggaggaggaggaggaggatgaggaggaggaggaggaggaggatgaggaggaggactatgatgtgtacaagtctgagttccccacagaggccgacctggaggacttcacagaggccgctgtggatgaagatgatgaagatgaggaggagggggaggaggtggtggaggaccgggactactactatgacaccttcaagggagatgactacaatgaggagaaccccacagagcccggcagtgatggcaccatgtctgacaaggagatcacccatgatgtgaaggctgtgtgcagccaggaggccatgacaggcccctgcagagctgtgatgccccgctggtactttgacctgagcaagggcaaatgtgtgcgcttcatctacggcggctgcggcggcaacagaaacaactttgaaagtgaggactactgcatggctgtgtgcaaggccatgatcccccccacccccctgcccaccaatgatgtggatgtgtactttgagaccagcgcagatgacaatgaacatgcccgcttccagaaggccaaggagcagctggagatccgccacaggaacaggatggacagagtgaagaaggagtgggaggaggccgagctgcaggccaagaacctgcccaaggccgagcggcagaccctcatccagcacttccaggccatggtgaaggccctggagaaggaggccgccagcgagaagcagcagctggtggagacccacctggcccgggtggaggccatgctgaatgacagaagaaggatggccctggagaactacctggccgccctgcagagcgaccccccccggccccaccgcatcctgcaggccctgcggcgctacgtgcgggcagagaacaaggaccggctgcacaccatccgccactaccagcacgtgctggccgtggaccctgagaaggccgcccagatgaagagccaggtgatgacccacctgcacgtgattgaggagaggaggaaccagagcctgagcctgctgtacaaggtgccctacgtggcccaggagatccaggaggagattgatgagctgctgcaggagcagagagctgacatggaccagttcaccgccagcatcagcgagacccctgtggatgtgcgggtgagcagcgaggagagcgaggagatcccccccttccaccccttccaccccttccctgccctgcctgaaaatgaaggcagcggcgtgggggagcaggacggcggcctcatcggggctgaggagaaggtgatcaacagcaagaacaaggtggatgagaacatggtgattgatgagaccctggatgtgaaggagatgatcttcaatgctgagcgggtgggcggcctggaggaggagcgggagagcgtgggccccctgcgggaggacttcagcctgagcagcagcgccctgattggcctgctggtgattgctgtggccatcgccaccgtgattgtcatcagcctggtgatgctgaggaagaggcagtatggcaccatcagccacggcatcgtggaggtggaccccatgctgaccccagaggagcggcacctgaacaagatgcagaaccacggctatgagaaccccacctacaagtacctggagcagatgcagatctag

SEQ ID NO: 143520 - DNA, 1569 bp, synthetic construct
  misc_feature 1..1569: note = Description of Artificial Sequence: Synthetic coding sequence
  source 1..1569: mol_type = other DNA
atggccgccaccggcacagctgctgctgctgccaccggccgcctgctgctgctgctgctggtgggcctgacagccccagccctggccctggccggctacatcgaggccctggccgccaatgccggcactggatttgctgtggccgagccccagatcgccatgttctgtgggaagctgaacatgcacgtgaacatccagacaggcaagtgggagccagaccccaccggcaccaagagctgctttgagaccaaggaggaggtgctgcagtactgccaggagatgtacccagagctgcagatcaccaacgtgatggaggccaaccagagggtgtccattgacaactggtgcagaagagacaagaagcagtgcaagagcagatttgtgacccccttcaagtgcctggtgccccccacccccctgcccaccaatgatgtggatgtgtactttgagaccagcgcagatgacaatgagcacgcccgcttccagaaggccaaggagcagctggagatccgccacaggaacaggatggacagagtgaagaaggagtgggaggaggccgagctgcaggccaagaacctgcccaaggccgagcggcagaccctcatccagcacttccaggccatggtgaaggccctggagaaggaggccgccagcgagaagcagcagctggtggagacccacctggcccgggtggaggccatgctgaatgacagaagaaggatggccctggagaactacctggccgccctgcagagcgaccccccccggccccaccgcatcctgcaggccctgcggcgctacgtgcgggcagagaacaaggaccggctgcacaccatccgccactaccagcacgtgctggccgtggaccctgagaaggccgcccagatgaagagccaggtgatgacccacctgcacgtgattgaggagaggaggaaccagagcctgagcctgctgtacaaggtgccctacgtggcccaggagatccaggaggagattgatgagctgctgcaggagcagagagctgacatggaccagttcaccgccagcatcagcgagacccctgtggatgtgcgggtgtcctctgaggagagcgaggagatcccccccttccaccccttccaccccttccctgccctgcctgaaaatgaaggcagcggcgtgggggagcaggacggcggcctgattggagctgaggagaaggtgatcaacagcaagaacaaggtggatgagaacatggtgattgatgagaccctggatgtgaaggagatgatcttcaatgctgagcgggtgggcggcctggaggaggagcgggagagcgtgggccccctgcgggaggacttcagcctgagcagcagcgccctgattggcctgctggtgattgctgtggccatcgccaccgtcatcgtcatcagcctggtgatgctgaggaagaggcagtatggcaccatcagccatggaattgtggaggtggaccccatgctgaccccagaggagcggcacctgaacaagatgcagaaccacggctatgagaaccccacctacaagtacctggagcagatgcagatctag

SEQ ID NO: 143521 - DNA, 2088 bp, synthetic construct
  misc_feature 1..2088: note = Description of Artificial Sequence: Synthetic coding sequence
  source 1..2088: mol_type = other DNA
atggccgccaccggcacagctgctgctgctgccaccggccgcctgctgctgctgctgctggtgggcctgacagccccagccctggccctggccggctacatcgaggccctggccgccaatgccggcactggatttgctgtggccgagccccagatcgccatgttctgtgggaagctgaacatgcacgtgaacatccagacaggcaagtgggagccagaccccaccggcaccaagagctgctttgagaccaaggaggaggtgctgcagtactgccaggagatgtacccagagctgcagatcaccaacgtgatggaggccaaccagagggtgtccattgacaactggtgcagaagagacaagaagcagtgcaagagcagatttgtgacccccttcaagtgcctggtgggggagtttgtgtctgatgtgctgctggtgcctgagaagtgccagttcttccacaaggagaggatggaggtgtgtgagaaccaccagcactggcacacagtggtgaaggaggcctgcctgacccagggcatgaccctgtacagctatggcatgctgctgccctgtggggtggaccagttccacggcacagaatatgtgtgctgcccccagaccaagatcatcggctctgtgtccaaggaggaggaggaggaggatgaggaggaggaggaggaggaggatgaggaggaggactatgatgtgtacaagtctgagttccccacagaggccgacctggaggacttcacagaggccgctgtggatgaagatgatgaagatgaggaggagggggaggaggtggtggaggaccgggactactactatgacaccttcaagggagatgactacaatgaggagaaccccacagagcccggcagtgatggcaccatgtctgacaaggagatcacccatgatgtgaaggtgccccccacccccctgcccaccaatgatgtggatgtgtactttgagaccagcgcagatgacaatgaacatgcccgcttccagaaggccaaggagcagctggagatccgccacaggaacaggatggacagagtgaagaaggagtgggaggaggccgagctgcaggccaagaacctgcccaaggccgagcggcagaccctcatccagcacttccaggccatggtgaaggccctggagaaggaggccgccagcgagaagcagcagctggtggagacccacctggcccgggtggaggccatgctgaatgacagaagaaggatggccctggagaactacctggccgccctgcagagcgaccccccccggccccaccgcatcctgcaggccctgcggcgctacgtgcgggcagagaacaaggaccggctgcacaccatccgccactaccagcacgtgctggccgtggaccctgagaaggccgcccagatgaagagccaggtgatgacccacctgcacgtgattgaggagaggaggaaccagagcctgagcctgctgtacaaggtgccctacgtggcccaggagatccaggaggagattgatgagctgctgcaggagcagagagctgacatggaccagttcaccgccagcatcagcgagacccctgtggatgtgcgggtgagcagcgaggagagcgaggagatcccccccttccaccccttccaccccttccctgccctgcctgaaaatgaaggcagcggcgtgggggagcaggacggcggcctcatcggggctgaggagaaggtgatcaacagcaagaacaaggtggatgagaacatggtgattgatgagaccctggatgtgaaggagatgatcttcaatgctgagcgggtgggcggcctggaggaggagcgggagagcgtgggccccctgcgggaggacttcagcctgagcagcagcgccctgattggcctgctggtgattgctgtggccatcgccaccgtgattgtcatcagcctggtgatgctgaggaagaggcagtatggcaccatcagccacggcatcgtggaggtggaccccatgctgaccccagaggagcggcacctgaacaagatgcagaaccacggctatgagaaccccacctacaagtacctggagcagatgcagatctag

SEQ ID NO: 143522 - DNA, 480 bp, synthetic construct
  misc_feature 1..480: note = Description of Artificial Sequence: Synthetic coding sequence
  source 1..480: mol_type = other DNA
atggccgccaccggcacagctgctgctgctgccaccggccgcctgctgctgctgctgctggtgggcctgacagccccagccctggccctggccggctacatcgagagcagccagatctgctgcagccccaggagcttcctgatcagcaccctgaagtgcctgattgtggatgagatcaatgccctggccgccaatgccggcaccggctttgctgtggccgagccccagatcgccatgttctgtgggaagctgaacatgcacgtgaacatccagacaggcaagtgggagccagaccccaccggcaccaagagctgctttgagaccaaggaggaggtgctgcagtactgccaggagatgtacccagagctgcagatcaccaacgtgatggaggccaaccagagggtgtccattgacaactggtgccggcgggacaagaagcagtgcaagagcagatttgtgacccccttcaagtgcctgtag

SEQ ID NO: 143523 - DNA, 351 bp, synthetic construct
  misc_feature 1..351: note = Description of Artificial Sequence: Synthetic coding sequence
  source 1..351: mol_type = other DNA
atggccgccaccggcacagctgctgctgctgccaccggccgcctgctgctgctgctgctggtgggcctgacagccccagccctggccctggccggctacatcgaggccctggccgccaatgccggcactggatttgctgtggccgagccccagatcgccatgttctgtgggaagctgaacatgcacgtgaacatccagacaggcaagtgggagccagaccccaccggcaccaagagctgctttgagaccaaggaggaggtgctgcagtactgccaggagatgtacccagagctgcagatcaccaacagcggctggaggtgtgtgcgcatcaccagcacaggcaccaggtag

SEQ ID NO: 143524 - DNA, 1656 bp, synthetic construct
  misc_feature 1..1656: note = Description of Artificial Sequence: Synthetic coding sequence
  source 1..1656: mol_type = other DNA
atggaggtgtgtgagaaccaccagcactggcacacagtggtgaaggaggcctgcctgacccagggcatgaccctgtacagctatggcatgctgctgccctgtggggtggaccagttccacggcacagaatatgtgtgctgcccccagaccaagatcatcggctctgtgtccaaggaggaggaggaggaggatgaggaggaggaggaggaggaggatgaggaggaggactatgatgtgtacaagtctgagttccccacagaggccgacctggaggacttcacagaggccgctgtggatgaagatgatgaagatgaggaggagggggaggaggtggtggaggaccgggactactactatgacaccttcaagggagatgactacaatgaggagaaccccacagagcccggcagtgatggcaccatgtctgacaaggagatcacccatgatgtgaaggtgccccccacccccctgcccaccaatgatgtggatgtgtactttgagaccagcgcagatgacaatgaacatgcccgcttccagaaggccaaggagcagctggagatccgccacaggaacaggatggacagagtgaagaaggagtgggaggaggccgagctgcaggccaagaacctgcccaaggccgagcggcagaccctcatccagcacttccaggccatggtgaaggccctggagaaggaggccgccagcgagaagcagcagctggtggagacccacctggcccgggtggaggccatgctgaatgacagaagaaggatggccctggagaactacctggccgccctgcagagcgaccccccccggccccaccgcatcctgcaggccctgcggcgctacgtgcgggcagagaacaaggaccggctgcacaccatccgccactaccagcacgtgctggccgtggaccctgagaaggccgcccagatgaagagccaggtgatgacccacctgcacgtgattgaggagaggaggaaccagagcctgagcctgctgtacaaggtgccctacgtggcccaggagatccaggaggagattgatgagctgctgcaggagcagagagctgacatggaccagttcaccgccagcatcagcgagacccctgtggatgtgcgggtgagcagcgaggagagcgaggagatcccccccttccaccccttccaccccttccctgccctgcctgaaaatgaagacacccagcctgagctgtaccaccccatgaagaagggcagcggcgtgggggagcaggacggcggcctcatcggggctgaggagaaggtgatcaacagcaagaacaaggtggatgagaacatggtgattgatgagaccctggatgtgaaggagatgatcttcaatgctgagcgggtgggcggcctggaggaggagcgggagagcgtgggccccctgcgggaggacttcagcctgagcagcagcgccctgattggcctgctggtgattgctgtggccatcgccaccgtgattgtcatcagcctggtgatgctgaggaagaggcagtatggcaccatcagccacggcatcgtggaggtggaccccatgctgaccccagaggagcggcacctgaacaagatgcagaaccacggctatgagaaccccacctacaagtacctggagcagatgcagatctag

SEQ ID NO: 143525 - DNA, 1977 bp, synthetic construct
  misc_feature 1..1977: note = Description of Artificial Sequence: Synthetic coding sequence
  source 1..1977: mol_type = other DNA
atgtacccagagctgcagatcaccaacgtgatggaggccaaccagagggtgtccattgacaactggtgccggcgggacaagaagcagtgcaagagcagatttgtgacccccttcaagtgcctggtgggggagtttgtgtctgatgtgctgctggtgcctgagaagtgccagttcttccacaaggagaggatggaggtgtgtgagaaccaccagcactggcacacagtggtgaaggaggcctgcctgacccagggcatgaccctgtacagctatggcatgctgctgccctgtggggtggaccagttccatggaacagaatatgtgtgctgcccccagaccaagatcatcggctctgtgtccaaggaggaggaggaggaggatgaggaggaggaggaggaggaggatgaggaggaggactatgatgtgtacaagtctgagttccccacagaagctgacctggaggacttcacagaagctgctgtggatgaagatgatgaagatgaggaggagggggaggaggtggtggaggaccgggactactactatgacaccttcaagggagatgactacaatgaggagaaccccacagagcccggcagtgatggcaccatgtctgacaaggagatcacccatgatgtgaaggctgtgtgcagccaggaggccatgacaggcccctgcagagctgtgatgccccgctggtactttgacctgagcaaaggaaaatgtgtgcgcttcatctatggaggctgcggcggcaacagaaacaactttgaaagtgaggactactgcatggctgtgtgcaaggccatgatcccccccacccccctgcccaccaatgatgtggatgtgtactttgagaccagcgcagatgacaatgagcacgcccgcttccagaaggccaaggagcagctggagatccgccacaggaacaggatggacagagtgaagaaggagtgggaggaggccgagctgcaggccaagaacctgcccaaggccgagcggcagaccctcatccagcacttccaggccatggtgaaggccctggagaaggaggccgccagcgagaagcagcagctggtggagacccacctggcccgggtggaggccatgctgaatgacagaagaaggatggccctggagaactacctggccgccctgcagagcgaccccccccggccccaccgcatcctgcaggccctgcggcgctacgtgcgggcagagaacaaggaccggctgcacaccatccgccactaccagcacgtgctggccgtggaccctgagaaggccgcccagatgaagagccaggtgatgacccacctgcacgtgattgaggagaggaggaaccagagcctgagcctgctgtacaaggtgccctacgtggcccaggagatccaggaggagattgatgagctgctgcaggagcagagagctgacatggaccagttcaccgccagcatcagcgagacccctgtggatgtgcgggtgtcctctgaggagagcgaggagatcccccccttccaccccttccaccccttccctgccctgcctgaaaatgaaggcagcggcgtgggggagcaggacggcggcctgattggagctgaggagaaggtgatcaacagcaagaacaaggtggatgagaacatggtgattgatgagaccctggatgtgaaggagatgatcttcaatgctgagcgggtgggcggcctggaggaggagcgggagagcgtgggccccctgcgggaggacttcagcctgagcagcagcgccctgattggcctgctggtgattgctgtggccatcgccaccgtcatcgtcatcagcctggtgatgctgaggaagaggcagtatggcaccatcagccatggaattgtggaggtggaccccatgctgaccccagaggagcggcacctgaacaagatgcagaaccacggctatgagaaccccacctacaagtacctggagcagatgcagatctag

SEQ ID NO: 143526 - DNA, 1758 bp, synthetic construct
  misc_feature 1..1758: note = Description of Artificial Sequence: Synthetic coding sequence
  source 1..1758: mol_type = other DNA
atggctgctgtggagctggagtggatccctgagaccctgtacaacacagccatctctgctgtggtggacaactacatccgcagcagaagagacatccgcagcctgcctgagaacatccagtttgatgtgtactacaagctgtaccagcagggccgcctgtgccagctgggcagcgagttctgtgagctggaggtgtttgccaaggtgctgcgggccctggacaagaggcacctgctgcaccactgcttccaggccctgatggaccatggagtgaaggtggcctctgtgctggcctacagcttcagccgccgctgcagctacatcgccgagagtgatgctgctgtgaaggagaaggccatccaggtgggctttgtgctgggcggcttcctgagtgatgctggctggtacagtgatgctgagaaggtgttcctgagctgcctgcagctgtgcaccctgcatgatgagatgctgcactggttccgggctgtggagtgctgcgtgcggctgctgcacgtgagaaatggaaactgcaagtaccacctgggggaggagaccttcaagctggcccagacctacatggacaagctgagcaagcacggccagcaggccaacaaggccgccctgtatggagagctgtgtgccctgctgtttgccaagagccactatgatgaggcctacaagtggtgcatcgaggccatgaaggagatcacagctggcctgcctgtgaaggtggtggtggatgtgctgcggcaggccagcaaggcctgtgtggtgaagcgggagttcaagaaggccgagcagctgatcaagcatgctgtgtacctggcccgggaccacttcggcagcaagcaccccaagtacagcgacaccctgctggactatggcttctacctgctgaatgtggacaacatctgccagagcgtggccatctaccaggccgccctggacatccggcagagcgtgtttggaggcaagaacatccacgtggccacagcccacgaggacctggcctacagcagctatgtgcaccagtacagcagcggcaagtttgacaatgccctcttccacgccgagcgggccatcggcatcatcacccacatcctgcctgaggaccacctgctgctggccagcagcaagagggtgaaggccctgatcctggaggagatcgccatcgactgccacaacaaggagacagagcagaggctgctgcaggaggcccatgacctgcacctgagcagcctgcagctggccaagaaggcctttggagagttcaacgtgcagacagccaagcactacggcaacctgggccgcctgtaccagagcatgaggaagttcaaggaggccgaggagatgcacatcaaggccatccagatcaaggagcagctgctgggccaggaggactatgaggtggccctgtctgtgggccacctggccagcctgtacaactatgacatgaaccagtatgaaaatgctgagaagctgtacctgcggagcatcgccatcggcaagaagctgtttggagagggctacagcggcctggagtatgactaccggggcctcatcaagctgtacaacagcatcggcaactatgagaaggtgtttgagtaccacaacgtgctgagcaactggaaccggctgcgggaccggcagtacagcgtgacagatgccctggaggatgtgtccaccagcccccagagcacagaggaggtggtgcagagcttcctgatcagccagaatgtggagggccccagctgctag

SEQ ID NO: 143527 - DNA, 4974 bp, synthetic construct
  misc_feature 1..4974: note = Description of Artificial Sequence: Synthetic coding sequence
  source 1..4974: mol_type = other DNA
atggacagcaagaagaggagcagcacagaagctgagggcagcaaggagcggggcctggtgcacatctggcaggccggcagcttccccatcaccccagagcggctgcccggctggggcggcaagacagtgctgcaggccgccctgggcgtgaagcacggcgtgctgctgacagaagatggagaggtgtacagctttggcaccctgccctggaggagcggccctgtggagatctgccccagcagccccatcctggagaatgccctggtgggccagtatgtgatcaccgtggccaccggcagcttccacagcggggctgtgacagacaatggagtggcctacatgtggggagaaaattctgctggccagtgtgctgtggccaaccagcagtatgtgcctgagcccaaccctgtgtccattgctgacagcgaggccagccccctgctggccgtgcgcatcctgcagctggcctgtggggaggagcacaccctggccctgagcatcagccgggagatctgggcctggggcaccggctgccagctgggcctcatcaccacagccttccctgtgaccaagccccagaaggtggagcacctggccggccgggtggtgctgcaggtggcctgtggggccttccacagcctggccctggtgcagtgcctgcccagccaggacctgaagcctgtgcctgagcgctgcaaccagtgcagccagctgctgatcaccatgacagacaaggaggaccacgtgatcatcagtgacagccactgctgccccctgggcgtgaccctgacagagagccaggctgaaaatcatgccagcacagccctgagccccagcacagagaccctggaccggcaggaggaggtgtttgagaacaccctggtggccaatgaccagagcgtggccacagagctgaatgctgtgtctgcccagatcaccagcagtgatgccatgagcagccagcagaatgtgatgggcaccacagagatcagcagcgccaggaacatccccagctacccagacacccaggccgtgaatgagtacctgaggaagctgagtgaccacagcgtgagagaagattctgaacatggagagaagcctgtgcccagccagcccctgctggaggaggccatccccaacctgcacagcccccccaccaccagcaccagcgccctgaacagcctggtggtgtcctgtgccagcgctgtgggcgtgcgggtggccgccacctatgaagctggggccctgagcctgaagaaggtgatgaacttctacagcaccaccccctgtgagaccggggcccaggccggcagcagcgccatcggccctgagggcctgaaggacagccgggaggagcaggtgaagcaggagagcatgcagggcaagaagagcagcagcctggtggacatccgggaggaggagacagaaggaggcagccggcggctgagcctgcccggcctgctgagccaggtgagcccccggctgctgaggaaggccgcccgggtgaagaccaggacagtggtgctgacccccacctacagcggggaggctgatgccctgctgcccagcctgaggacagaggtgtggacctggggcaagggcaaggagggccagctgggccatggagatgtgctgccccggctgcagcccctgtgtgtgaagtgcctggatggcaaggaggtgatccacctggaggccggcggctaccacagcctggccctgacagccaagagccaggtgtacagctggggcagcaacaccttcggccagctgggccacagcgacttccccaccaccgtgccccggctggccaagatcagcagtgaaaatggagtgtggagcattgctgctggccgggactacagcctcttcctggtggacacagaggacttccagcccggcctgtactacagcggccggcaggaccccacagaaggagacaacctgcctgagaaccacagcggcagcaagacccctgtgctgctgagctgcagcaagctgggctacatcagccgggtgacagctgggaaggacagctacctggccctggtggacaagaacatcatgggctacatcgccagcctgcacgagctggccaccacagaaagacgcttctacagcaagctgagtgacatcaagagccagatcctgcggcccctgctgagcctggagaacctgggcaccaccaccaccgtgcagctgctgcaggaggtggccagccgcttcagcaagctgtgctacctgattggccagcacggggccagcctgagcagcttcctgcatggagtgaaggaggcccggagcctggtgatcctgaagcacagcagcctcttcctggacagctacacagagtactgcaccagcatcaccaacttcctggtgatgggcggcttccagctgctggccaagccagccatcgacttcctgaacaagaaccaggagctgctgcaggacctgtctgaggtgaatgatgagaacacccagctgatggagatcctgaacaccctcttcttcctgcccatccggcggctgcacaactatgccaaggtgctgctgaagctggccacctgctttgaggtggccagccctgagtaccagaagctgcaggacagcagcagctgctatgagtgcctggccctgcacctgggcaggaagaggaaggaggccgagtacaccctgggcttctggaagaccttccctgggaagatgacagacagcctgaggaagccagagcggcggctgctgtgtgagagcagcaacagagccctgagcctgcagcacgccggccgcttctctgtgaactggttcatcctcttcaatgatgccctggtgcacgcccagttcagcacccaccacgtgttccccctggccaccctgtgggccgagcccctgtctgaggaggccggcggcgtgaatggcctgaagatcaccaccccagaggagcagttcaccctcatcagcagcaccccccaggagaagaccaagtggctgcgggccatcagccaggccgtggaccaggccctgcggggcatgtctgacctgcccccctacggcagcggcagctctgtgcagaggcaggagccccccatcagccgcagcgccaagtacaccttctacaaggacccccggctgaaggatgccacctatgatggccgctggctgagcggcaagccccacggccggggcgtgctgaagtggccagatggcaagatgtacagcggcatgttcagaaatggcctggaggatggctacggggagtaccgcatccccaacaaggccatgaacaaggaggaccactacgtgggccactggaaggagggcaagatgtgtggccagggcgtgtacagctatgccagcggggaggtgtttgagggctgcttccaggacaacatgagacatggccacggcctgctgcggagcggcaagctgaccagcagcagccccagcatgttcatcggccagtgggtgatggacaagaaggccggctatggagtgtttgatgacatcaccagaggagagaagtacatgggcatgtggcaggatgatgtgtgccagggcaatggagtggtggtgacccagtttggcctgtactatgagggcaacttccacctgaacaagatgatgggaaatggagtgctgctgtctgaagatgacaccatctatgaaggagagttcagtgatgactggaccctgagcggcaagggcaccctgaccatgcccaatggagactacatcgagggctacttcagcggggagtggggcagcggcatcaagatcaccggcacctacttcaagcccagcctgtatgaaagtgacaaggaccggcccaaggtgttcaggaagctgggcaacctggccgtgcctgcagatgagaagtggaaggctgtgtttgatgagtgctggaggcagctgggctgtgagggccctggccagggcgaggtgtggaaggcctgggacaacattgctgtggccctgaccaccagccggcggcagcaccgggacagccctgagatcctgagccgcagccagacccagaccctggagagcctggagttcatcccccagcacgtgggcgccttctctgtggagaagtatgatgacatcaggaagtacctgatcaaggcctgtgacacccccctgcaccccctgggccgcctggtggagaccctggtggccgtgtacaggatgacctacgtgggcgtgggcgccaacagaaggctgctgcaggaggccgtgaaggagatcaagagctacctgaagaggatcttccagctggtgcgcttcctgtttcctgagctgcctgaggagggcagcaccatccccctgagcgcccccctgcccacagagaggaagagcttctgcaccgggaagagtgacagccgctctgagagccctgagcccggctacgtggtgaccagcagcggcctgctgctgcctgtgctgctgccccggctgtacccacccctcttcatgctgtatgccctggacaatgaccgggaggaggacatctactgggagtgtgtgctgcggctgaacaagcagcctgacatcgccctgctgggcttcctgggcgtgcagaggaagttctggccagccaccctgagcatcctgggggagagcaagaaggtgctgcccaccaccaaggatgcctgctttgccagcgctgtggagtgcctgcagcagatcagcaccaccttcacccccagcgacaagctgaaggtgatccagcagacctttgaggagatcagccagagcgtgctggccagcctgcacgaggacttcctgtggagcatggatgacctcttccctgtgttcctgtatgtggtgctgcgggcccgcatccggaacctgggcagcgaggtgcacctgattgaggacctgatggacccctacctgcagcacggggagcagggcatcatgttcaccaccctgaaggcctgctactaccagatccagcgggagaagctgaactag

SEQ ID NO: 143528 - DNA, 420 bp, synthetic construct
  misc_feature 1..420: note = Description of Artificial Sequence: Synthetic coding sequence
  source 1..420: mol_type = other DNA
atggacagcaagaagaggagcagcacagaagctgagggcagcaaggagcggggcctggtgcacatctggcaggccggcagcttccccatcaccccagagcggctgcccggctggggcggcaagacagtgctgcaggccgccctgggcgtgaagcacggcgtgctgctgacagaagatggagaggtgtacagctttggcaccctgccctggaggagcggccctgtggagatctgccccagcagccccatcctggagaatgccctggtgggccagtatgtgatcaccgtggccaccggcagcttccacagcggggctgtgacagacaatggagtggcctacatgtggggagaaaattctgctggccagtgtgctgtggccaaccagcagtatgtgcctgagcccaaccctgtgtccatctag

SEQ ID NO: 143529 - DNA, 321 bp, synthetic construct
  misc_feature 1..321: note = Description of Artificial Sequence: Synthetic coding sequence
  source 1..321: mol_type = other DNA
atggacagcaagaagaggagcagcacagaagctgagggcagcaaggagcggggcctggtgcacatctggcaggccggcagcttccccatcaccccagagcggctgcccggctggggcggcaagacagtgctgcaggccgccctgggcgtgaagcacggcgtgctgctgacagaagatggagaggtgtacagctttggcaccctgccctggaggagcggccctgtggagatctgccccagcagccccatcctggagaatgccctggtgggccagtatgtgatcaccgtggccaccggcagcttccacagcggggctgtgtag

SEQ ID NO: 143530 - DNA, 1758 bp, synthetic construct
  misc_feature 1..1758: note = Description of Artificial Sequence: Synthetic coding sequence
  source 1..1758: mol_type = other DNA
tgactggccctggtggacaagaacatcatgggctacatcgccagcctgcacgagctggccaccacagagcggcgcttctacagcaagctgagtgacatcaagagccagatcctgcggcccctgctgagcctggagaacctgggcaccaccaccaccgtgcagctgctgcaggaggtggccagccgcttcagcaagctgtgctacctgattggccagcacggggccagcctgagcagcttcctgcacggcgtgaaggaggcccggagcctggtgatcctgaagcacagcagcctcttcctggacagctacacagagtactgcaccagcatcaccaacttcctggtgatgggcggcttccagctgctggccaagccagccatcgacttcctgaacaagaaccaggagctgctgcaggacctgtctgaggtgaatgatgagaacacccagctgatggagatcctgaacaccctcttcttcctgcccatccggcggctgcacaactatgccaaggtgctgctgaagctggccacctgctttgaggtggccagccctgagtaccagaagctgcaggacagcagcagctgctatgaatgtctggccctgcacctgggcaggaagaggaaggaggccgagtacaccctgggcttctggaagaccttccctgggaagatgacagacagcctgaggaagccagagcggcggctgctgtgtgagagcagcaacagagccctgagcctgcagcacgccggccgcttctctgtgaactggttcatcctcttcaatgatgccctggtgcacgcccagttcagcacccaccacgtgttccccctggccaccctgtgggccgagcccctgtctgaggaggccggcggcgtgaatggcctgaagatcaccaccccagaggagcagttcaccctcatcagcagcaccccccaggagaagaccaagtggctgcgggccatcagccaggccgtggaccaggccctgcggggcatgtctgacctgcccccctacggcagcggcagctctgtgcagaggcaggagccccccatcagccgcagcgccaagtacaccttctacaaggacccccggctgaaggatgccacctatgatggccgctggctgagcggcaagccccacggccggggcgtgctgaagtggccagatggcaagatgtacagcggcatgttcagaaatggcctggaggatggctatggagagtaccgcatccccaacaaggccatgaacaaggaggaccactacgtgggccactggaaggagggcaagatgtgtggccagggcgtgtacagctatgccagcggggaggtgtttgagggctgcttccaggacaacatgagacatggccacggcctgctgcggagcggcaagctgaccagcagcagccccagcatgtttattggccagtgggtgatggacaagaaggccggctacggcgtgtttgatgacatcaccagaggagagaagtacatgggcatgtggcaggatgatgtgtgccagggcaatggagtggtggtgacccagtttggcctgtactatgagggcaacttccacctgaacaagatgatgggaaatggagtgctgctgtctgaagatgacaccatctatgaaggagagttcagtgatgactggaccctgagcggcaaggacaacagcggcctgattgagcaggtgggcaagtgcagcctgctgccctacttcctgaaggtgtgtgaggccctggtgctcttcctgctgtag

SEQ ID NO: 143531 - DNA, 1731 bp, synthetic construct
  misc_feature 1..1731: note = Description of Artificial Sequence: Synthetic coding sequence
  source 1..1731: mol_type = other DNA
atgggctacatcgccagcctgcacgagctggccaccacagaaagacgcttctacagcaagctgagtgacatcaagagccagatcctgcggcccctgctgagcctggagaacctgggcaccaccaccaccgtgcagctgctgcaggaggtggccagccgcttcagcaagctgtgctacctgattggccagcacggggccagcctgagcagcttcctgcatggagtgaaggaggcccggagcctggtgatcctgaagcacagcagcctcttcctggacagctacacagagtactgcaccagcatcaccaacttcctggtgatgggcggcttccagctgctggccaagccagccatcgacttcctgaacaagaaccaggagctgctgcaggacctgtctgaggtgaatgatgagaacacccagctgatggagatcctgaacaccctcttcttcctgcccatccggcggctgcacaactatgccaaggtgctgctgaagctggccacctgctttgaggtggccagccctgagtaccagaagctgcaggacagcagcagctgctatgagtgcctggccctgcacctgggcaggaagaggaaggaggccgagtacaccctgggcttctggaagaccttccctgggaagatgacagacagcctgaggaagccagagcggcggctgctgtgtgagagcagcaacagagccctgagcctgcagcacgccggccgcttctctgtgaactggttcatcctcttcaatgatgccctggtgcacgcccagttcagcacccaccacgtgttccccctggccaccctgtgggccgagcccctgtctgaggaggccggcggcgtgaatggcctgaagatcaccaccccagaggagcagttcaccctcatcagcagcaccccccaggagaagaccaagtggctgcgggccatcagccaggccgtggaccaggccctgcggggcatgtctgacctgcccccctacggcagcggcagctctgtgcagaggcaggagccccccatcagccgcagcgccaagtacaccttctacaaggacccccggctgaaggatgccacctatgatggccgctggctgagcggcaagccccacggccggggcgtgctgaagtggccagatggcaagatgtacagcggcatgttcagaaatggcctggaggatggctacggggagtaccgcatccccaacaaggccatgaacaaggaggaccactacgtgggccactggaaggagggcaagatgtgtggccagggcgtgtacagctatgccagcggggaggtgtttgagggctgcttccaggacaacatgagacatggccacggcctgctgcggagcggcaagctgaccagcagcagccccagcatgttcatcggccagtgggtgatggacaagaaggccggctatggagtgtttgatgacatcaccagaggagagaagtacatgggcatgtggcaggatgatgtgtgccagggcaatggagtggtggtgacccagtttggcctgtactatgagggcaacttccacctgaacaagatgatgggaaatggagtgctgctgtctgaagatgacaccatctatgaaggagagttcagtgatgactggaccctgagcggcaaggacaacagcggcctcatcgagcaggtgggcaagtgcagcctgctgccctacttcctgaaggtgtgtgaggccctggtgctcttcctgctgtag

SEQ ID NO: 143532 - DNA, 1191 bp, synthetic construct
  misc_feature 1..1191: note = Description of Artificial Sequence: Synthetic coding sequence
  source 1..1191: mol_type = other DNA
atggacagcaagaagaggagcagcacagaagctgagggcagcaaggagcggggcctggtgcacatctggcaggccggcagcttccccatcaccccagagcggctgcccggctggggcggcaagacagtgctgcaggccgccctgggcgtgaagcacggcgtgctgctgacagaagatggagaggtgtacagctttggcaccctgccctggaggagcggccctgtggagatctgccccagcagccccatcctggagaatgccctggtgggccagtatgtgatcaccgtggccaccggcagcttccacagcggggctgtgacagacaatggagtggcctacatgtggggagaaaattctgctggccagtgtgctgtggccaaccagcagtatgtgcctgagcccaaccctgtgtccattgctgacagcgaggccagccccctgctggccgtgcgcatcctgcagctggcctgtggggaggagcacaccctggccctgagcatcagccgggagatctgggcctggggcaccggctgccagctgggcctcatcaccacagccttccctgtgaccaagccccagaaggtggagcacctggccggccgggtggtgctgcaggtggcctgtggggccttccacagcctggccctggtgcagtgcctgcccagccaggacctgaagcctgtgcctgagcgctgcaaccagtgcagccagctgctgatcaccatgacagacaaggaggaccacgtgatcatcagtgacagccactgctgccccctgggcgtgaccctgacagagagccaggctgaaaatcatgccagcacagccctgagccccagcacagagaccctggaccggcaggaggaggtgtttgagaacaccctggtggccaatgaccagagcgtggccacagagctgaatgctgtgtctgcccagatcaccagcagtgatgccatgagcagccagcagaatgtgatgggcaccacagagatcagcagcgccaggaacatccccagctacccagacacccaggccgtgaatgagtacctgaggaagctgagtgaccacagcgtgagagaagattctgaacatggagagaagcctgtgcccagccaggtgcctgcccagttctacaagatcaaggtgtgcctggagctgaactgcatgggcttcagcctggagaccctgaagtag

SEQ ID NO: 143533 - DNA, 2178 bp, synthetic construct
  misc_feature 1..2178: note = Description of Artificial Sequence: Synthetic coding sequence
  source 1..2178: mol_type = other DNA
atggagcagagcaatgacagcctgcgggtgaaccacaatgatggagaggagagcaagaccagcgcccaggtgtttgagcacctgatctgcatggacagccgggacagcagctttggccagaatgacagccccaccgtgctgcccatcaccacccgggaggccaacaacagcctcatcagccagaacatccctggccccctgacccagacccagaccctgtctgctgagcagttccacctggtggaccagaatggccaggccatccagtatgagctgcagagcctgggggagagcaatgcccagatgatgattgtggccagccccacagaaaatggccaggtgctgcgggtcatcccccccacccagacaggcatggcccaggtgatcatcccccagggccagctggtggatgtgaacagccccagagatgtgcctgaggagaagcccagcaacagaaacctgcccaccgtgcgggtggacaccctggccgacaacaccagcaactacatcctgcacccccagaccagcttccccctgcccaagaagtctgtgacaggcatgctggaggagcccctgctgggccccctgcagcccctgagcagcaacacccccatctgggcctgccgcctgcggagctgtgagaagatcggggacagctaccggggctactgtgtgtctgaaacagagctggagagcgtgctgaccttccacaagcagcagacccagagcgtgtggggcacccggcagagccccagccctgccaagccagccacccggctgatgtggaagagccagtatgtgccctatgatggcatcccctttgtgaatgccggcagcagagctgtggtgatggagtgccagtatggccccaggaggaagggcttccagctgaagaaggtgtctgagcaggagagccgcagctgccagctgtacaaggccacctgcccagcccgcatctacatcaagaaggtgcagaagtttcctgagtacagagtgcccacagaccccaagattgacaagaagatcatccgcatggagcaggagaaggccttcaacatgctgaagaagaacctggtggatgctggaggagtgctgcgctggtacgtgcagctgcccacccagcaggcccaccagtaccacgagctggagaccccctgcctgaccctgagccccagccccttccctgtgagcagcctggaggaggaggagacagctgtgagagatgagaactgtgccctgcccagccggctgcacccccaggtggcccacaagatccaggagctggtgtcccagggcatcgagcaggtgtatgctgtgaggaagcagctgaggaagtttgtggagcgggagctgttcaagccagatgaggtgcctgagcggcacaacctgtccttcttccccaccgtgaatgacatcaagaaccacatccacgaggtgcagaagagcctgagaaatggagacacagtgtacaacagcgagatcatcccagccaccctgcagtggaccacagattctggcaacatcctgaaggagaccatgacagtgacctttgctgagggcaacagccctggagagagcatcaccaccaaggtggagaccaaccagacccggggcagcctgagccctgagcccacccacctgctgagcagcctgagcagcttccagcccaagatcttcacccagctgcagggcctgcagctgcagccccgctacaccagcccagatgagagccctgctgtggtgtctgtgaacaaccagcccagcagcagccccagcggcctgctggacaccatcggcagcgctgtgatgaacaacaacagcctgctgctgggccagagccacagcctgcagagggacacctgcctgacccagaacaacagcacagccagcaccatgggcaacctgcctgagccagaccagaacctggtggccatggatgagctggtggaggtgggagatgtggaggacaccggcaacctggagggcaccgtgcaccgcatcctgctgggagatgtgcagaccatccccatccagatcatcgacaaccacagcgccctgattgaagaaaatcctgagagcaccatctctgtgtcccaggtgaagcaggagcccaaggagcccgccctgtccatggaggccaagaagacagtggactacaagaagctgagcgccacctag

SEQ ID NO: 143534 - DNA, 2178 bp, synthetic construct; identical to SEQ ID NO: 143533
  misc_feature 1..2178: note = Description of Artificial Sequence: Synthetic coding sequence
  source 1..2178: mol_type = other DNA

SEQ ID NO: 143535 - DNA, 165 bp, synthetic construct
  misc_feature 1..165: note = Description of Artificial Sequence: Synthetic coding sequence
  source 1..165: mol_type = other DNA
atggagcagagcaatgacagcctgcgggtgaaccacaatgatggagaggagagcaagaccagcgcccaggtgtttgagcacctgatctgcatggacagccgggacagcagctttggccagaatgacagccccaccgtgctgcccatcaccacccgggaggcctag

SEQ ID NO: 143536 - DNA, 396 bp, synthetic construct
  misc_feature 1..396: note = Description of Artificial Sequence: Synthetic coding sequence
  source 1..396: mol_type = other DNA
atggagcagagcaatgacagcctgcgggtgaaccacaatgatggagaggagagcaagaccagcgcccaggtgtttgagcacctgatctgcatggacagccgggacagcagctttggccagaatgacagccccaccgtgctgcccatcaccacccgggaggccaacaacagcctcatcagccagaacatccctggccccctgacccagacccagaccctgtctgctgagcagttccacctggtggaccagaatggccaggccatccagtatgagctgcagagcctgggggagagcaatgcccagatgatgattgtggccagccccacagaaaatggccaggtgctgcgggtcatcccccccacccagacaggcatggcccaggtgatcatcccctag

SEQ ID NO: 143537 - DNA, 66 bp, synthetic construct
  misc_feature 1..66: note = Description of Artificial Sequence: Synthetic coding sequence
  source 1..66: mol_type = other DNA
atggagcagagcaatgacagcctgcgggtgaaccacaatgatggagaggagagcaagaccagctag

SEQ ID NO: 143538 - DNA, 222 bp, synthetic construct
  misc_feature 1..222: note = Description of Artificial Sequence: Synthetic coding sequence
  source 1..222: mol_type = other DNA
atggagcagagcaatgacagcctgcgggtgaaccacaatgatggagaggagagcaagaccagcgcccaggtgtttgagcacctgatctgcatggacagccgggacagcagctttggccagaatgacagccccaccgtgctgcccatcaccacccgggaggccaacaacagcctcatcagccagaacatccctggccccctgacccagacccagaccctgtag

SEQ ID NO: 143539 - DNA, 2178 bp, synthetic construct; identical to SEQ ID NO: 143533
  misc_feature 1..2178: note = Description of Artificial Sequence: Synthetic coding sequence
  source 1..2178: mol_type = other DNA

SEQ ID NO: 143540 - DNA, 222 bp, synthetic construct; identical to SEQ ID NO: 143538
  misc_feature 1..222: note = Description of Artificial Sequence: Synthetic coding sequence
  source 1..222: mol_type = other DNA

SEQ ID NO: 143541 - DNA, 288 bp, synthetic construct
  misc_feature 1..288: note = Description of Artificial Sequence: Synthetic coding sequence
  source 1..288: mol_type = other DNA
atggagcagagcaatgacagcctgcgggtgaaccacaatgatggagaggagagcaagaccagcgcccaggtgtttgagcacctgatctgcatggacagccgggacagcagctttggccagaatgacagccccaccgtgctgcccatcaccacccgggaggccaacaacagcctcatcagccagaacatccctggccccctgacccagacccagaccctgtctgctgagcagttccacctggtggaccagaatggccaggccatccagtatgagctgcagagcctgtag

SEQ ID NO: 143542 - DNA, 624 bp, synthetic construct
  misc_feature 1..624: note = Description of Artificial Sequence: Synthetic coding sequence
  source 1..624: mol_type = other DNA
atgctggaggcctggaacctgaacctgagccactacctgaagcacctgatctgcatggacagccgggacagcagctttggccagaatgacagccccaccgtgctgcccatcaccacccgggaggccaacaacagcctcatcagccagaacatccctggccccctgacccagacccagaccctgtctgctgagcagttccacctggtggaccagaatggccaggccatccagtatgagctgcagagcctgggggagagcaatgcccagatgatgattgtggccagccccacagaaaatggccaggtgctgcgggtcatcccccccacccagacaggcatggcccaggtgatcatcccccagggccagctggtggatgtgaacagccccagagatgtgcctgaggagaagcccagcaacagaaacctgcccaccgtgcgggtggacaccctggccgacaacaccagcaactacatcctgcacccccagaccagcttccccctgcccaagaagtctgtgacaggcatgctggaggagcccctgctgggccccctgcagcccctgagcagcaacacccccatctgggcctgccgcctgcggagctgtgaaggagtggagctgtggtag

SEQ ID NO: 143543 - DNA, 1914 bp, synthetic construct
  misc_feature 1..1914: note = Description of Artificial Sequence: Synthetic coding sequence
  source 1..1914: mol_type = other DNA
atgctggaggcctggaacctgaacctgagccactacctgaagatgattgtggccagccccacagaaaatggccaggtgctgcgggtcatcccccccacccagacaggcatggcccaggtgatcatcccccagggccagctggtggatgtgaacagccccagagatgtgcctgaggagaagcccagcaacagaaacctgcccaccgtgcgggtggacaccctggccgacaacaccagcaactacatcctgcacccccagaccagcttccccctgcccaagaagtctgtgacaggcatgctggaggagcccctgctgggccccctgcagcccctgagcagcaacacccccatctgggcctgccgcctgcggagctgtgagaagatcggggacagctaccggggctactgtgtgtctgaaacagagctggagagcgtgctgaccttccacaagcagcagacccagagcgtgtggggcacccggcagagccccagccctgccaagccagccacccggctgatgtggaagagccagtatgtgccctatgatggcatcccctttgtgaatgccggcagcagagctgtggtgatggagtgccagtatggccccaggaggaagggcttccagctgaagaaggtgtctgagcaggagagccgcagctgccagctgtacaaggccacctgcccagcccgcatctacatcaagaaggtgcagaagtttcctgagtacagagtgcccacagaccccaagattgacaagaagatcatccgcatggagcaggagaaggccttcaacatgctgaagaagaacctggtggatgctggaggagtgctgcgctggtacgtgcagctgcccacccagcaggcccaccagtaccacgagctggagaccccctgcctgaccctgagccccagccccttccctgtgagcagcctggaggaggaggagacagctgtgagagatgagaactgtgccctgcccagccggctgcacccccaggtggcccacaagatccaggagctggtgtcccagggcatcgagcaggtgtatgctgtgaggaagcagctgaggaagtttgtggagcgggagctgttcaagccagatgaggtgcctgagcggcacaacctgtccttcttccccaccgtgaatgacatcaagaaccacatccacgaggtgcagaagagcctgagaaatggagacacagtgtacaacagcgagatcatcccagccaccctgcagtggaccacagattctggcaacatcctgaaggagaccatgacagtgacctttgctgagggcaacagccctggagagagcatcaccaccaaggtggagaccaaccagacccggggcagcctgagccctgagcccacccacctgctgagcagcctgagcagcttccagcccaagatcttcacccagctgcagggcctgcagctgcagccccgctacaccagcccagatgagagccctgctgtggtgtctgtgaacaaccagcccagcagcagccccagcggcctgctggacaccatcggcagcgctgtgatgaacaacaacagcctgctgctgggccagagccacagcctgcagagggacacctgcctgacccagaacaacagcacagccagcaccatgggcaacctgcctgagccagaccagaacctggtggccatggatgagctggtggaggtgggagatgtggaggacaccggcaacctggagggcaccgtgcaccgcatcctgctgggagatgtgcagaccatccccatccagatcatcgacaaccacagcgccctgattgaagaaaatcctgagagcaccatctctgtgtcccaggtgaagcaggagcccaaggagcccgccctgtccatggaggccaagaagacagtggactacaagaagctgagcgccacctag

SEQ ID NO: 143544 - DNA, 1950 bp, synthetic construct
  misc_feature 1..1950: note = Description of Artificial Sequence: Synthetic coding sequence
  source 1..1950: mol_type = other DNA
atggagcagagcaatgacagcctgcgggtgaaccacaatgatggagaggagagcaagaccagcgcccaggtgtttgagatgattgtggccagccccacagaaaatggccaggtgctgcgggtcatcccccccacccagacaggcatggcccaggtgatcatcccccagggccagctggtggatgtgaacagccccagagatgtgcctgaggagaagcccagcaacagaaacctgcccaccgtgcgggtggacaccctggccgacaacaccagcaactacatcctgcacccccagaccagcttccccctgcccaagaagtctgtgacaggcatgctggaggagcccctgctgggccccctgcagcccctgagcagcaacacccccatctgggcctgccgcctgcggagctgtgagaagatcggggacagctaccggggctactgtgtgtctgaaacagagctggagagcgtgctgaccttccacaagcagcagacccagagcgtgtggggcacccggcagagccccagccctgccaagccagccacccggctgatgtggaagagccagtatgtgccctatgatggcatcccctttgtgaatgccggcagcagagctgtggtgatggagtgccagtatggccccaggaggaagggcttccagctgaagaaggtgtctgagcaggagagccgcagctgccagctgtacaaggccacctgcccagcccgcatctacatcaagaaggtgcagaagtttcctgagtacagagtgcccacagaccccaagattgacaagaagatcatccgcatggagcaggagaaggccttcaacatgctgaagaagaacctggtggatgctggaggagtgctgcgctggtacgtgcagctgcccacccagcaggcccaccagtaccacgagctggagaccccctgcctgaccctgagccccagccccttccctgtgagcagcctggaggaggaggagacagctgtgagagatgagaactgtgccctgcccagccggctgcacccccaggtggcccacaagatccaggagctggtgtcccagggcatcgagcaggtgtatgctgtgaggaagcagctgaggaagtttgtggagcgggagctgttcaagccagatgaggtgcctgagcggcacaacctgtccttcttccccaccgtgaatgacatcaagaaccacatccacgaggtgcagaagagcctgagaaatggagacacagtgtacaacagcgagatcatcccagccaccctgcagtggaccacagattctggcaacatcctgaaggagaccatgacagtgacctttgctgagggcaacagccctggagagagcatcaccaccaaggtggagaccaaccagacccggggcagcctgagccctgagcccacccacctgctgagcagcctgagcagcttccagcccaagatcttcacccagctgcagggcctgcagctgcagccccgctacaccagcccagatgagagccctgctgtggtgtctgtgaacaaccagcccagcagcagccccagcggcctgctggacaccatcggcagcgctgtgatgaacaacaacagcctgctgctgggccagagccacagcctgcagagggacacctgcctgacccagaacaacagcacagccagcaccatgggcaacctgcctgagccagaccagaacctggtggccatggatgagctggtggaggtgggagatgtggaggacaccggcaacctggagggcaccgtgcaccgcatcctgctgggagatgtgcagaccatccccatccagatcatcgacaaccacagcgccctgattgaagaaaatcctgagagcaccatctctgtgtcccaggtgaagcaggagcccaaggagcccgccctgtccatggaggccaagaagacagtggactacaagaagctgagcgccacctag

SEQ ID NO: 143545 - DNA, 558 bp, synthetic construct
  misc_feature 1..558: note = Description of Artificial Sequence: Synthetic coding sequence
  source 1..558: mol_type = other DNA
atgaccacccccaacaagaccccacctggagctgaccccaagcagctggagaggactggaacagtgcgggagatcggcagccaggccgtgtggagcctgagcagctgcaagccaggcttcggcgtggaccagctgagagatgacaacctggagacctactggcagagtgatggcagccagccccacctggtgaacatccagttccggaggaagaccaccgtgaagaccctgtgcatctatgctgactacaagagtgatgagagctacacccccagcaagatctctgtgcgggtgggcaacaacttccacaacctgcaggagatccggcagctggagctggtggagcccagcggctggattcatgtgcccctgacagacaaccacaagaagcccaccaggaccttcatgatccagattgctgtgctggccaaccaccagaatggccgggacacccacatgaggcagatcaagatctacacccctgtggaggagagcagcatcggcaagttcccccgctgcaccaccatcgacttcatgatgtaccgcagcatcagatag

SEQ ID NO: 143546 - DNA, 558 bp, synthetic construct; identical to SEQ ID NO: 143545
  misc_feature 1..558: note = Description of Artificial Sequence: Synthetic coding sequence
  source 1..558: mol_type = other DNA

SEQ ID NO: 143547 - DNA, 207 bp, synthetic construct
  misc_feature 1..207: note = Description of Artificial Sequence: Synthetic coding sequence
  source 1..207: mol_type = other DNA
atgaccacccccaacaagaccccacctggagctgaccccaagcagctggagaggactggaacagtgcgggagatcggcagccaggccgtgtggagcctgagcagctgcaagccaggcttcggcgtggaccagctgagagatgacaacctggagacctactggcagagtgatggcagccagccccacctggtgaacatccagttctag

SEQ ID NO: 143548 - DNA, 330 bp, synthetic construct
  misc_feature 1..330: note = Description of Artificial Sequence: Synthetic coding sequence
  source 1..330: mol_type = other DNA
atgaccacccccaacaagaccccacctggagctgaccccaagcagctggagaggactggaacagtgcgggagatcggcagccaggccgtgtggagcctgagcagctgcaagccaggcttcggcgtggaccagctgagagatgacaacctggagacctactggcagagtgatggcagccagccccacctggtgaacatccagttccggaggaagaccaccgtgaagaccctgtgcatctatgctgactacaagagtgatgagagctacacccccagcaagatctctgtgcgggtgggcaacaacttccacaacctgcaggagatcagatag

SEQ ID NO: 143549 - DNA, 558 bp, synthetic construct; identical to SEQ ID NO: 143545
  misc_feature 1..558: note = Description of Artificial Sequence: Synthetic coding sequence
  source 1..558: mol_type = other DNA

SEQ ID NO: 143550 - DNA, 477 bp, synthetic construct
  misc_feature 1..477: note = Description of Artificial Sequence: Synthetic coding sequence
  source 1..477: mol_type = other DNA
atgaccacccccaacaagaccccacctggagctgaccccaagcagctggagaggactggaacagtgcgggagatcggcagccaggccgtgtggagcctgagcagctgcaagccaggcttcggcgtggaccagctgagagatgacaacctggagacctactggcagagtgatggcagccagccccacctggtgaacatccagttccggaggaagaccaccgtgaagaccctgtgcatctatgctgactacaagagtgatgagagctacacccccagcaagatctctgtgcgggtgggcaacaacttccacaacctgcaggagatccggcagctggagctggtggagcccagcggctggattcatgtgcccctgacagacaaccacaagaagcccaccaggaccttcatgatccagattgctgtgctggccaaccaccagaatggccgggacacccacatgaggcagatcaagatctag

SEQ ID NO: 143551 - DNA, 477 bp, synthetic construct; identical to SEQ ID NO: 143550
  misc_feature 1..477: note = Description of Artificial Sequence: Synthetic coding sequence
  source 1..477: mol_type = other DNA

SEQ ID NO: 143552 - DNA, 333 bp, synthetic construct
  misc_feature 1..333: note = Description of Artificial Sequence: Synthetic coding sequence
  source 1..333: mol_type = other DNA
atggccgccagcagcagcagcagcagcgctgggggcgtgtctggcagctctgtgactggaagtggcttctctgtgtctgacctggccccacccaggaaggccctcttcacctaccccaagggggccggggagatgctggaggatggcagcgagcgcttcctgtgtgagagcgtcttctcctaccaggtggccagcaccctgaagcaggtgaagcatgaccagcaggtggccaggatggagaagctggccggcctggtggaggagctggaggctgatgagtggaggttcaagcccatcgagcagctgctgggcttcacccccagcagtggatag

SEQ ID NO: 143553 - DNA, 2427 bp, synthetic construct
  misc_feature 1..2427: note = Description of Artificial Sequence: Synthetic coding sequence
  source 1..2427: mol_type = other DNA
atgctgcgcttccccacctgcttccccagcttccgggtggtgggggagaagcagctgccccaggagatcatcttcctggtgtggagccccaagagggacctgattgccctggccaacacagctggggaggtgctgctgcaccggctggccagcttccaccgggtgtggagcttccccccaaatgaaaatacaggcaaggaggtgacctgcctggcctggaggccagatggcaagctgctggcctttgccctggccgacaccaagaagatcgtgctgtgtgatgtggagaagccagagagcctgcacagcttctctgtggaggcccctgtgtcctgcatgcactggatggaggtgacagtggagagctctgtgctgaccagcttctacaatgcagaagatgagagcaacctgctgctgcccaagctgcccaccctgcccaagaactacagcaacaccagcaagatcttctctgaagaaaattctgatgagatcatcaagctgctgggagatgtgcggctgaacatcctggtgctgggcggcagcagcggcttcatcgagctgtatgcctacggcatgttcaagatcgcccgggtgactggaattgctggcacctgcctggccctgtgcctgagcagtgacctgaagagcctgtctgtggtgacagaggtgtccaccaacggggccagcgaggtgtcctacttccagctggagaccaacctgctgtacagcttcctgcctgaggtgaccaggatggccaggaagttcacccacatcagcgccctgctgcagtacatcaacctgagcctgacctgcatgtgtgaggcctgggaggagatcctgatgcagatggacagccggctgaccaagtttgtgcaggagaagaacaccaccacctctgtgcaggatgagttcatgcacctgctgctgtggggcaaggccagcgctgagctgcagaccctgctgatgaaccagctgactgtgaagggcctgaagaagctgggccagagcattgagagcagctacagcagcatccagaagctggtgatcagccacctgcagagcggcagcgagagcctgctgtaccacctgtctgagctgaagggcatggcctcctggaagcagaagtatgagcccctgggcctggatgctgctggcatcgaggaggccatcacagctgtgggcagcttcatcctgaaggccaatgagctgctgcaggtgattgacagctccatgaagaacttcaaggccttcttccgctggctgtatgtggccatgctgaggatgacagaggaccacgtgctgcctgagctgaacaagatgacccagaaggacatcacctttgtggccgagttcctgacagagcacttcaatgaggccccagacctgtacaacaggaagggcaagtacttcaacgtggagcgggtgggccagtacctgaaggatgaagatgatgacctggtgtccccacccaacacagagggcaaccagtggtatgacttcctgcagaacagcagccacctgaaggagagccccctgctcttcccctactaccccaggaagagcctgcactttgtgaagaggaggatggagaacatcatcgaccagtgcctgcagaagccagcagatgtgattggcaagtccatgaaccaggccatctgcatccccctgtacagagacaccaggtctgaggacagcaccaggaggctcttcaagttccccttcctgtggaacaacaagaccagcaacctgcactacctgctcttcaccatcctggaggacagcctgtacaagatgtgcatcctgcggcggcacacagacatcagccagagcgtgtccaatggcctcatcgccatcaagtttggcagcttcacctacgccaccacagagaaggtgcggcgcagcatctacagctgcctggatgcccagttctatgatgatgagaccgtgacagtggtgctgaaggacacagtgggccgggagggccgggaccggctgctggtgcagctgcccctgagcctggtgtacaacagcgaggacagcgctgagtaccagttcaccggcacctacagcacccggctggatgagcagtgcagcgccatccccaccaggaccatgcactttgagaagcactggaggctgctggagagcatgaaggcccagtatgtggccggaaatggcttcaggaaggtgtcctgtgtgctgagcagcaacctgcggcacgtgcgggtgtttgagatggacattgatgatgagtgggagctggatgagagcagtgatgaggaggaggaggccagcaacaagcctgtgaagatcaaggaggaggtgctgtctgagagcgaggccgagaaccagcaggccggggctgctgccctggcccctgagatcgtcatcaaggtggagaagctggaccctgagctggacagctag

SEQ ID NO: 143554 - DNA, 489 bp, synthetic construct
  misc_feature 1..489: note = Description of Artificial Sequence: Synthetic coding sequence
  source 1..489: mol_type = other DNA
atgctgcgcttccccacctgcttccccagcttccgggtggtgggggagaagcagctgccccaggagatcatcttcctggtgtggagccccaagagggacctgattgccctggccaacacagctggggaggtgctgctgcaccggctggccagcttccaccgggtgtggagcttccccccaaatgaaaatacaggcaaggaggtgacctgcctggcctggaggccagatggcaagctgctggcctttgccctggccgacaccaagaagatcgtgctgtgtgatgtggagaagccagagagcctgcacagcttctctgtggaggcccctgtgtcctgcatgcactggatggaggtgacagtggagagctctgtgctgaccagcttctacaatgcagaagatgagagcaacctgctgctgcccaagctgcccaccctgcccaagaactacagcaacaccagcaagatcttctctgaagaaaattctgactag

SEQ ID NO: 143555 - DNA, 2430 bp, synthetic construct
  misc_feature 1..2430: note = Description of Artificial Sequence: Synthetic coding sequence
  source 1..2430: mol_type = other DNA
atgctgcgcttccccacctgcttccccagcttccgggtggtgggggagaagcagctgccccaggagatcatcttcctggtgtggagccccaagagggacctgattgccctggccaacacagctggggaggtgctgctgcaccggctggccagcttccaccgggtgtggagcttccccccaaatgaaaatacaggcaaggaggtgacctgcctggcctggaggccagatggcaagctgctggcctttgccctggccgacaccaagaagatcgtgctgtgtgatgtggagaagccagagagcctgcacagcttctctgtggaggcccctgtgtcctgcatgcactggatggaggtgacagtggagagctctgtgctgaccagcttctacaatgcagaagatgagagcaacctgctgctgcccaagctgcccaccctgcccaagaactacagcaacaccagcaagatcttctctgaagaaaattctgatgagatcatcaagctgctgggagatgtgcggctgaacatcctggtgctgggcggcagcagcggcttcatcgagctgtatgcctacggcatgttcaagatcgcccgggtgactggaattgctggcacctgcctggccctgtgcctgagcagtgacctgaagagcctgtctgtggtgacagaggtgtccaccaacggggccagcgaggtgtcctacttccagctggagaccaacctgctgtacagcttcctgcctgaggtgaccaggatggccaggaagttcacccacatcagcgccctgctgcagtacatcaacctgagcctgacctgcatgtgtgaggcctgggaggagatcctgatgcagatggacagccggctgaccaagtttgtgcaggagaagaacaccaccacctctgtgcaggatgagttcatgcacctgctgctgtggggcaaggccagcgctgagctgcagaccctgctgatgaaccagctgactgtgaagggcctgaagaagctgggccagagcattgagagcagctacagcagcatccagaagctggtgatcagccacctgcagagcggcagcgagagcctgctgtaccacctgtctgagctgaagggcatggcctcctggaagcagaagtatgagcccctgggcctggatgctgctggcatcgaggaggccatcacagctgtgggcagcttcatcctgaaggccaatgagctgctgcaggtgattgacagctccatgaagaacttcaaggccttcttccgctggctgtatgtggccatgctgaggatgacagaggaccacgtgctgcctgagctgaacaaggtgatgacccagaaggacatcacctttgtggccgagttcctgacagagcacttcaatgaggccccagacctgtacaacaggaagggcaagtacttcaacgtggagcgggtgggccagtacctgaaggatgaagatgatgacctggtgagcccccccaacacagagggcaaccagtggtatgacttcctgcagaacagcagccacctgaaggagagccccctgctcttcccctactaccccaggaagagcctgcactttgtgaagaggaggatggagaacatcatcgaccagtgcctgcagaagccagcagatgtgattggcaagtccatgaaccaggccatctgcatccccctgtacagagacaccaggtctgaggacagcacccggcggctcttcaagttccccttcctgtggaacaacaagaccagcaacctgcactacctgctcttcaccatcctggaggacagcctgtacaagatgtgcatcctgcggcggcacacagacatcagccagagcgtgtccaatggcctgattgccatcaagtttggcagcttcacctacgccaccacagagaaggtgagaagaagcatctacagctgcctggatgcccagttctatgatgatgaaacagtgacagtggtgctgaaggacacagtgggccgggagggccgggaccggctgctggtgcagctgcccctgagcctggtgtacaacagtgaagattctgctgagtaccagttcaccggcacctacagcacccggctggatgagcagtgcagcgccatccccaccaggaccatgcactttgagaagcactggaggctgctggagagcatgaaggcccagtatgtggccggaaatggcttcaggaaggtgtcctgtgtgctgagcagcaacctgcggcacgtgcgggtgtttgagatggacattgatgatgagtgggagctggatgagagcagtgatgaggaggaggaggccagcaacaagcctgtgaagatcaaggaggaggtgctgtctgagagcgaggccgagaaccagcaggccggggccgccgccctggcccctgagatcgtcatcaaggtggagaagctggaccctgagctggacagctag

SEQ ID NO: 143556 - DNA, 2268 bp, synthetic construct
  misc_feature 1..2268: note = Description of Artificial Sequence: Synthetic coding sequence
  source 1..2268: mol_type = other DNA
atggcctctgtgcatgagagcctgtacttcaaccccatgatgaccaacggggtggtgcacgccaacgtgtttggcatcaaggactgggtgaccccctacaagattgctgtgctggtgctgctgaatgagatgagcaggactggagagggcgctgtgtccctgatggagcggcggcggctgaaccagctgctgctgcccctgctgcagggccctgacatcaccctgagcaagctgtacaagctgattgaggagagctgcccccagctggccaacagcgtgcagatccgcatcaagctgatggccgagggggagctgaaggacatggagcagttctttgatgacctgagtgacagcttcagcggcacagagcctgaggtgcacaagacctctgtggtgggcctcttcctgcggcacatgatcctggcctacagcaagctgtccttcagccaggtgttcaagctgtacacagccctgcagcagtacttccagaatggagagaagaagacagtggaggatgctgacatggagctgaccagcagagatgaaggagagaggaagatggagaaggaggagctggatgtgtctgtgcgggaggaggaggtgtcctgcagcggccccctgagccagaagcaggccgagttcttcctgagccagcaggccagcctgctgaagaatgatgagaccaaggccctgaccccagccagcctgcagaaggagctgaacaacctgctgaagttcaacccagactttgctgaggcccactacctgagctacctgaacaacctgcgggtgcaggatgtgttcagcagcacccacagcctgctgcactactttgacaggctcatcctgaccggggctgagagcaagagcaatggagaggagggctacggccgcagcctgcgctatgctgccctgaacctggccgccctgcactgccgcttcggccactaccagcaggccgagctggccctgcaggaggccatccgcatcgcccaggagagcaatgaccacgtgtgcctgcagcactgcctgtcctggctgtatgtgctgggccagaagagaagtgacagctatgtgctgctggagcacagcgtgaagaaggctgtgcacttcggcctgccctacctggccagcctgggcatccagagcctggtgcagcagagggcctttgctgggaagacagccaacaagctgatggatgccctgaaggacagcgacctgctgcactggaagcacagcctgtctgagctgattgacatcagcatcgcccagaagacagccatctggaggctgtatggccgcagcaccatggccctgcagcaggcccagatgctgctgtccatgaacagcctggaggccgtgaatgctggggtgcagcagaacaacacagagagctttgctgtggccctgtgccacctggccgagctgcacgccgagcagggctgctttgctgctgccagcgaggtgctgaagcacctgaaggagcgcttcccccccaacagccagcacgcccagctgtggatgctgtgtgaccagaagatccagtttgaccgggccatgaatgatggcaagtaccacctggccgacagcctggtgacaggcatcacagccctgaacagcattgaaggagtgtacaggaaggctgtggtgctgcaggcccagaaccagatgtctgaggcccacaagctgctgcagaagctgctggtgcactgccagaagctgaagaacacagagatggtgatctctgtgctgctgtctgtggccgagctgtactggaggagcagcagccccaccatcgccctgcccatgctgctgcaggccctggccctgagcaaggagtaccgcctgcagtacctggccagcgagaccgtgctgaacctggcctttgcccagctgatcctgggcatccctgagcaggccctgagcctgctgcacatggccatcgagcccatcctggctgatggagccatcctggacaagggccgggccatgttcctggtggccaagtgccaggtggccagcgctgccagctatgaccagcccaagaaggccgaggccctggaggccgccatcgagaacctgaatgaggccaagaactactttgccaaggtggactgcaaggagcgcatcagagatgtggtgtacttccaggcccggctgtaccacaccctgggcaagacccaggagaggaacagatgtgccatgctgttccggcagctgcaccaggagctgcccagccatggagtgcccctcatcaaccacctgtag

SEQ ID NO: 143557 - DNA, 1932 bp, synthetic construct
  misc_feature 1..1932: note = Description of Artificial Sequence: Synthetic coding sequence
  source 1..1932: mol_type = other DNA
atggccgagggggagctgaaggacatggagcagttctttgatgacctgagtgacagcttctctggaacagagcctgaggtgcacaagacctctgtggtgggcctcttcctgcggcacatgatcctggcctacagcaagctgtccttcagccaggtgttcaagctgtacacagccctgcagcagtacttccagaatggagagaagaagacagtggaggatgctgacatggagctgaccagcagagatgaaggagagaggaagatggagaaggaggagctggatgtgtctgtgcgggaggaggaggtgtcctgcagcggccccctgagccagaagcaggccgagttcttcctgagccagcaggccagcctgctgaagaatgatgagaccaaggccctgaccccagccagcctgcagaaggagctgaacaacctgctgaagttcaacccagactttgctgaggcccactacctgagctacctgaacaacctgcgggtgcaggatgtgttcagcagcacccacagcctgctgcactactttgacaggctcatcctgactggagctgagagcaagagcaatggagaggagggctacggccgcagcctgcgctatgctgccctgaacctggccgccctgcactgccgcttcggccactaccagcaggccgagctggccctgcaggaggccatcagaattgcccaggagagcaatgaccacgtgtgcctgcagcactgcctgtcctggctgtatgtgctgggccagaagagaagtgacagctatgtgctgctggagcacagcgtgaagaaggctgtgcacttcggcctgccccgggcctttgctgggaagacagccaacaagctgatggatgccctgaaggacagcgacctgctgcactggaagcacagcctgtctgagctgattgacatcagcatcgcccagaagacagccatctggaggctgtatggccgcagcaccatggccctgcagcaggcccagatgctgctgtccatgaacagcctggaggccgtgaatgctggggtgcagcagaacaacacagagagctttgctgtggccctgtgccacctggccgagctgcacgccgagcagggctgctttgctgctgccagcgaggtgctgaagcacctgaaggagcgcttcccccccaacagccagcacgcccagctgtggatgctgtgtgaccagaagatccagtttgaccgggccatgaatgatggcaagtaccacctggccgacagcctggtgacaggcatcacagccctgaacagcattgaaggagtgtacaggaaggctgtggtgctgcaggcccagaaccagatgtctgaggcccacaagctgctgcagaagctgctggtgcactgccagaagctgaagaacacagagatggtgatctctgtgctgctgtctgtggccgagctgtactggaggagcagcagccccaccatcgccctgcccatgctgctgcaggccctggccctgagcaaggagtaccgcctgcagtacctggccagcgagaccgtgctgaacctggcctttgcccagctgatcctgggcatccctgagcaggccctgagcctgctgcacatggccatcgagcccatcctggctgatggagccatcctggacaagggccgggccatgttcctggtggccaagtgccaggtggccagcgctgccagctatgaccagcccaagaaggccgaggccctggaggccgccatcgagaacctgaatgaggccaagaactactttgccaaggtggactgcaaggagcgcatcagagatgtggtgtacttccaggcccggctgtaccacaccctgggcaagacccaggagaggaacagatgtgccatgctgttccggcagctgcaccaggagctgcccagccatggagtgcccctcatcaaccacctgtag

SEQ ID NO: 143558 - DNA, 1932 bp, synthetic construct; identical to SEQ ID NO: 143557
  misc_feature 1..1932: note = Description of Artificial Sequence: Synthetic coding sequence
  source 1..1932: mol_type = other DNA

SEQ ID NO: 143559 - DNA, 660 bp, synthetic construct
  misc_feature 1..660: note = Description of Artificial Sequence: Synthetic coding sequence
  source 1..660: mol_type = other DNA
atgctgagcccctgcctgagcagctactttgtgggcctcttcctgcggcacatgatcctggcctacagcaagctgtccttcagccaggtgttcaagctgtacacagccctgcagcagtacttccagaatggagagaagaagacagtggaggatgctgacatggagctgaccagcagagatgaaggagagaggaagatggagaaggaggagctggatgtgtctgtgcgggaggaggaggtgtcctgcagcggccccctgagccagaagcaggccgagttcttcctgagccagcaggccagcctgctgaagaatgatgagaccaaggccctgaccccagccagcctgcagaaggagctgaacaacctgctgaagttcaacccagactttgctgaggcccactacctgagctacctgaacaacctgcgggtgcaggatgtgttcagcagcacccacagcctgctgcactactttgacaggctcatcctgactggagctgagagcaagagcaatggagaggagggctacggccgcagcctgcgctatgctgccctgaacctggccgccctgcactgccgcttcggccactacaccagccccccctgggagtacagccccctcttcaaccgggagctgctgctgggccggcggcagaccagctag

SEQ ID NO: 143560 - DNA, 135 bp, synthetic construct
  misc_feature 1..135: note = Description of Artificial Sequence: Synthetic coding sequence
  source 1..135: mol_type = other DNA
atggccgagggggagctgaaggacatggagcagttctttgatgacctgagtgacagcttctctggaacagagcctgaggtgcacaagacctctgtggtgggcctcttcctgcggcacatgatcctggcctactag

SEQ ID NO: 143561 - DNA, 1074 bp, synthetic construct
  misc_feature 1..1074: note = Description of Artificial Sequence: Synthetic coding sequence
  source 1..1074: mol_type = other DNA
atggatgccctgaaggacagcgacctgctgcactggaagcacagcctgtctgagctgattgacatcagcatcgcccagaagacagccatctggaggctgtatggccgcagcaccatggccctgcagcaggcccagatgctgctgtccatgaacagcctggaggccgtgaatgctggggtgcagcagaacaacacagagagctttgctgtggccctgtgccacctggccgagctgcacgccgagcagggctgctttgctgctgccagcgaggtgctgaagcacctgaaggagcgcttcccccccaacagccagcacgcccagctgtggatgctgtgtgaccagaagatccagtttgaccgggccatgaatgatggcaagtaccacctggccgacagcctggtgacaggcatcacagccctgaacagcattgaaggagtgtacaggaaggctgtggtgctgcaggcccagaaccagatgtctgaggcccacaagctgctgcagaagctgctggtgcactgccagaagctgaagaacacagagatggtgatctctgtgctgctgtctgtggccgagctgtactggaggagcagcagccccaccatcgccctgcccatgctgctgcaggccctggccctgagcaaggagtaccgcctgcagtacctggccagcgagaccgtgctgaacctggcctttgcccagctgatcctgggcatccctgagcaggccctgagcctgctgcacatggccatcgagcccatcctggctgatggagccatcctggacaagggccgggccatgttcctggtggccaagtgccaggtggccagcgctgccagctatgaccagcccaagaaggccgaggccctggaggccgccatcgagaacctgaatgaggccaagaactactttgccaaggtggactgcaaggagcgcatcagagatgtggtgtacttccaggcccggctgtaccacaccctgggcaagacccaggagaggaacagatgtgccatgctgttccggcagctgcaccaggagctgcccagccatggagtgcccctcatcaaccacctgtag

SEQ ID NO: 143562 - DNA, 2229 bp, synthetic construct
  misc_feature 1..2229: note = Description of Artificial Sequence: Synthetic coding sequence
  source 1..2229: mol_type = other DNA
atggcctctgtgcatgagagcctgtacttcaaccccatgatgaccaacggggtggtgcacgccaacgtgtttggcatcaaggactgggtgaccccctacaagattgctgtgctggtgctgctgaatgagatgagcaggactggagagggcgctgtgtccctgatggagcggcggcggctgaaccagctgctgctgcccctgctgcagggccctgacatcaccctgagcaagctgtacaagctgattgaggagagctgcccccagctggccaacagcgtgcagatccgcatcaagctgatggccgagggggagctgaaggacatggagcagttctttgatgacctgagtgacagcttcagcggcacagagcctgaggtgcacaagacctctgtggtgggcctcttcctgcggcacatgatcctggcctacagcaagctgtccttcagccaggtgttcaagctgtacacagccctgcagcagtacttccagaatggagagaagaagacagtggaggatgctgacatggagctgaccagcagagatgaaggagagaggaagatggagaaggaggagctggatgtgtctgtgcgggaggaggaggtgtcctgcagcggccccctgagccagaagcaggccgagttcttcctgagccagcaggccagcctgctgaagaatgatgagaccaaggccctgaccccagccagcctgcagaaggagctgaacaacctgctgaagttcaacccagactttgctgaggcccactacctgagctacctgaacaacctgcgggtgcaggatgtgttcagcagcacccacagcctgctgcactactttgacaggctcatcctgaccggggctgagagcaagagcaatggagaggagggctacggccgcagcctgcgctatgctgccctgaacctggccgccctgcactgccgcttcggccactaccagcaggccgagctggccctgcaggaggccatccgcatcgcccaggagagcaatgaccacgtgtgcctgcagcactgcctgtcctggctgtatgtgctgggccagaagagaagtgacagctatgtgctgctggagcacagcgtgaagaaggctgtgcacttcggcctgccccgggcctttgctgggaagacagccaacaagctgatggatgccctgaaggacagcgacctgctgcactggaagcacagcctgtctgagctgattgacatcagcatcgcccagaagacagccatctggaggctgtatggccgcagcaccatggccctgcagcaggcccagatgctgctgtccatgaacagcctggaggccgtgaatgccggcgtgcagcagaacaacacagagagctttgctgtggccctgtgccacctggccgagctgcatgctgagcagggctgctttgctgctgccagcgaggtgctgaagcacctgaaggagcgcttcccccccaacagccagcacgcccagctgtggatgctgtgtgaccagaagatccagtttgaccgggccatgaatgatggcaagtaccacctggccgacagcctggtgacaggcatcacagccctgaacagcattgagggcgtgtacaggaaggctgtggtgctgcaggcccagaaccagatgtctgaggcccacaagctgctgcagaagctgctggtgcactgccagaagctgaagaacacagagatggtgatctctgtgctgctgtctgtggccgagctgtactggaggagcagcagccccaccatcgccctgcccatgctgctgcaggccctggccctgagcaaggagtaccgcctgcagtacctggccagcgagaccgtgctgaacctggcctttgcccagctgatcctgggcatccctgagcaggccctgagcctgctgcacatggccatcgagcccatcctggctgatggagccatcctggacaagggccgggccatgttcctggtggccaagtgccaggtggccagcgctgccagctatgaccagcccaagaaggccgaggccctggaggccgccatcgagaacctgaatgaggccaagaactactttgccaaggtggactgcaaggagcgcatcagagatgtggtgtacttccaggcccggctgtaccacaccctgggcaagacccaggagaggaacagatgtgccatgctgttccggcagctgcaccaggagctgcccagccacggcgtgcccctcatcaaccacctgtag

SEQ ID NO: 143563 - DNA, 1425 bp, synthetic construct
  misc_feature 1..1425: note = Description of Artificial Sequence: Synthetic coding sequence
  source 1..1425: mol_type = other DNA
atggagctgcccagcggccctggccctgagcggctgtttgacagccaccggctgcccggggactgcttcctgctgctggtgctgctgctgtatgcccctgtgggcttctgcctgctggtgctgcggctcttcctgggcatccacgtgttcctggtgtcctgtgccctgcctgattctgtgctgcggagatttgtggtgaggaccatgtgtgctgtgctgggcctggtggcccggcaggaggacagcggcctgcgggaccacagcgtgcgggtgctgatcagcaaccacgtgaccccatttgaccacaacatcgtgaacctgctgaccacctgcagcacagtgtctgagagcgaggccgagagcgccaccggccgcttccctggggcccagctgaaggcccccctgagccccctggccttccccatggaggacacagagctgcccctgacccccatcctgtaccccacctgccagttcttcttcatcttcctgaacatcttcctgctggccttcagcagccctggcagccagcccctgctgaacagccccccatcctttgtgtgctggagccggggcttcatggagatgaatggccgcggggagctggtggagagcctgaagcgcttctgtgccagcacccggctgccccccacccccctgctgctcttccctgaggaggaggccaccaacggccgggagggcctgctgcgcttcagctcctggcccttcagcatccaggatgtggtgcagcccctgaccctgcaggtgcagaggcccctggtgtctgtgacagtgtctgatgcctcctgggtgtctgagctgctgtggagcctgtttgtgcccttcaccgtgtaccaggtgcgctggctgcggcctgtgcaccggcagctgggggaggccaatgaggagtttgccctgcgggtgcagcagctggtggccaaggagctgggccagacaggcacccggctgaccccagctgacaaggccgagcacatgaagaggcagaggcacccccggctgcggccccagagcgcccagagcagcttcccccccagccctggccccagcccagatgtgcagctggccaccctggcccagagggtgaaggaggtgctgccccacgtgcccctgggcgtcatccagagggacctggccaagacaggctgtgtggacctgaccatcaccaacctgctggagggcgctgtggccttcatgcctgaggacatcaccaagggcacccagagcctgcccacagccagcgccagcaagttccccagcagcggccctgtgaccccccagcccacagccctgacctttgccaagagctcctgggcccggcaggagagcctgcaggagaggaagcaggccctgtatgaatatgcccggcggcgcttcacagagcggcgggcccaggaggccgactag

SEQ ID NO: 143564 - DNA, 1233 bp, synthetic construct
  misc_feature 1..1233: note = Description of Artificial Sequence: Synthetic coding sequence
  source 1..1233: mol_type = other DNA
atggagctgcccagcggccctggccctgagcggctgtttgacagccaccggctgcccggggactgcttcctgctgctggtgctgctgctgtatgcccctgtgggcttctgcctgctggtgctgcggctcttcctgggcatccacgtgttcctggtgtcctgtgccctgcctgattctgtgctgcggagatttgtggtgaggaccatgtgtgctgtgctgggcctggtggcccggcaggaggacagcggcctgcgggaccacagcgtgcgggtgctgatcagcaaccacgtgaccccatttgaccacaacatcgtgaacctgctgaccacctgcagcacccccctgctgaacagccccccatcctttgtgtgctggagccggggcttcatggagatgaatggccgcggggagctggtggagagcctgaagcgcttctgtgccagcacccggctgccccccacccccctgctgctcttccctgaggaggaggccaccaacggccgggagggcctgctgcgcttcagctcctggcccttcagcatccaggatgtggtgcagcccctgaccctgcaggtgcagaggcccctggtgtctgtgacagtgtctgatgcctcctgggtgtctgagctgctgtggagcctgtttgtgcccttcaccgtgtaccaggtgcgctggctgcggcctgtgcaccggcagctgggggaggccaatgaggagtttgccctgcgggtgcagcagctggtggccaaggagctgggccagacaggcacccggctgaccccagctgacaaggccgagcacatgaagaggcagaggcacccccggctgcggccccagagcgcccagagcagcttcccccccagccctggccccagcccagatgtgcagctggccaccctggcccagagggtgaaggaggtgctgccccacgtgcccctgggcgtcatccagagggacctggccaagacaggctgtgtggacctgaccatcaccaacctgctggagggcgctgtggccttcatgcctgaggacatcaccaagggcacccagagcctgcccacagccagcgccagcaagttccccagcagcggccctgtgaccccccagcccacagccctgacctttgccaagagctcctgggcccggcaggagagcctgcaggagaggaagcaggccctgtatgaatatgcccggcggcgcttcacagagcggcgggcccaggaggccgactag

SEQ ID NO: 143565 - DNA, 1128 bp, synthetic construct
  misc_feature 1..1128: note = Description of Artificial Sequence: Synthetic coding sequence
  source 1..1128: mol_type = other DNA
atggagctgcccagcggccctggccctgagcggctgtttgacagccaccggctgcccggggactgcttcctgctgctggtgctgctgctgtatgcccctgtgggcttctgcctgctggtgctgcggctcttcctgggcatccacgtgttcctggtgtcctgtgccctgcctgattctgtgctgcggcgcttccgctttgtggtgaggaccatgtgtgctgtgctgggcctggtggcccggcaggaggacagcggcctgcgggaccacagcgtgcgggtgctgatcagcaaccacgtgaccccatttgaccacaacatcgtgaacctgctgaccacctgcagcacccccctgctgaacagccccccatcctttgtgtgctggagccggggcttcatggagatgaatggccgcggggagctggtggagagcctgaagcgcttctgtgccagcacccggctgccccccacccccctgctgctcttccctgaggaggaggccaccaacggccgggagggcctgctgcgcttcagctcctggcccttcagcatccaggatgtggtgcagcccctgaccctgcaggtgcagaggcccctggtgtctgtgacagtgtctgatgcctcctgggtgtctgagctgctgtggagcctgtttgtgcccttcaccgtgtaccaggtgcgctggctgcggcctgtgcaccggcagctgggggaggccaatgaggagtttgccctgcgggtgcagcagctggtggccaaggagctgggccagacaggcacccggctgaccccagctgacaaggccgagcacatgaagaggcagaggcacccccggctgcggccccagagcgcccagagcagcttcccccccagccctggccccagcccagatgtgcagctggccaccctggcccagagggtgaaggaggtgctgccccacgtgcccctgggcgtcatccagagggacctggccaagacaggctgtgtggacctgaccatcaccaacctgctggagggcgctgtggccttcatgcctgaggacatcaccaagggcacccagagcctgcccacagccagcgccagcaaggcctttgatgcctgcctgatgatgatgaccccccaggccctgtag

SEQ ID NO: 143566 - DNA, 2145 bp, synthetic construct
  misc_feature 1..2145: note = Description of Artificial Sequence: Synthetic coding sequence
  source 1..2145: mol_type = other DNA
atggccagcgaggcccccagcccccccaggagccccccaccacccaccagccctgagcctgagctggcccagctgcggaggaaggtggagaagctggagcgggagctgcggagctgcaagaggcaggtgcgggagattgagaagctgctgcaccacacagagcggctgtaccagaatgctgagagcaacaaccaggagctgcggacccaggtggaggagctgagcaagatcctgcagagaggaagaaatgaagacaacaagaagagtgatgtggaggtgcagacagagaaccacgccccctggagcatcagtgactacttctaccagacctactacaatgatgtgtccctgcccaacaaggtgacagagctgagtgaccagcaggaccaggccatcgagaccagcatcctgaacagcaaggaccacctgcaggtggagaatgatgcctacccaggcacagacagaacagaaaatgtgaagtaccggcaggtggaccactttgccagcaacagccaggagcccgccagcgccctggccacagaggacaccagcctggagggcagcagcctggccgagagcctgcgggctgctgctgaggccgctgtgtcccagacaggcttctcctatgatgaaaatacaggcctgtactttgaccacagcacaggcttctactatgattctgagaaccagctgtactatgaccccagcacaggcatctactactactgtgatgtggagagcggccgctaccagttccacagccgggtggacctgcagccctaccccaccagcagcaccaagcagagcaaggacaagaagctgaagaagaagaggaaggaccctgacagcagcgccaccaatgaggagaaggacctgaacagcgaggaccagaaggccttctctgtggagcacaccagctgcaatgaggaggagaactttgccaacatgaagaagaaggccaagattggcatccaccacaagaacagcccccccaaggtgacagtgcccaccagcggcaacaccatcgagagccccctgcacgagaacatcagcaacagcaccagcttcaaggatgagaagatcatggagacagacagcgagcctgaggagggggagatcacagacagccagacagaagattcctatgatgaggccatcaccagcgagggcaatgtgacagcagaagattctgaagatgaagatgaggacaagatctggccaccctgcatccgggtgattgtcatccgcagccctgtgctgcagatcggcagcctcttcatcatcacagctgtgaacccagccaccatcggccgggagaaggacatggagcacaccctgcgcatccctgaggtgggcgtgtccaagttccacgccgagatctactttgaccatgacctgcagagctatgtgctggtggaccagggcagccagaatggcaccatcgtgaatggcaagcagatcctgcagcccaagaccaagtgtgacccctacgtgctggagcacggagatgaggtgaagattggagagaccgtgctgtccttccacatccaccctggcagtgacacctgtgatggctgtgagcccggccaggtgcgggcccacctgcggctggacaagaaggatgagagctttgtgggccccaccctgagcaaggaggagaaggagctggagaggaggaaggagctgaagaagatccgggtgaagtatggcctgcagaacacagaatatgaagatgagaagaccctgaagaaccccaagtacaaggacagagctgggaagaggcgggagcaggtgggcagcgagggcaccttccagagagatgatgccccagcctctgtgcacagcgagatcacagacagcaacaagggcaggaagatgctggagaagatgggctggaagaagggggagggcctgggcaaggatggcggcggcatgaagacccccatccagctgcagctgcggaggacccacgccggcctgggcaccgggaagcccagcagctttgaagatgtgcacctgctgcagaacaagaacaagaagaactgggacaaggcccgggagcgcttcacagagaacttccctgagaccaagccccagaaggatgatcctggcaccatgccctgggtgaagggcaccctggagtag

SEQ ID NO: 143567 - DNA, 531 bp, synthetic construct
  misc_feature 1..531: note = Description of Artificial Sequence: Synthetic coding sequence
  source 1..531: mol_type = other DNA
atggccagcgaggcccccagcccccccaggagccccccaccacccaccagccctgagcctgagctggcccagctgcggaggaaggtggagaagctggagcgggagctgcggagctgcaagaggcaggtgcgggagattgagaagctgctgcaccacacagagcggctgtaccagaatgctgagagcaacaaccaggagctgcggacccaggtggaggagctgagcaagatcctgcagagaggaagaaatgaagacaacaagaagagtgatgtggaggtgcagacagagaaccacgccccctggagcatcagtgactacttctaccagacctactacaatgatgtgtccctgcccaacaaggtgacagagctgagtgaccagcaggaccaggccatcgagaccagcatcctgaacagcaaggaccacctgcaggtggagaatgatgcctacccaggcacagacagaacagaaaatgtgaagtaccggcaggtggaccactttgccagcaacagccaggtgatcaagtgctag

SEQ ID NO: 143568 - DNA, 2028 bp, synthetic construct
  misc_feature 1..2028: note = Description of Artificial Sequence: Synthetic coding sequence
  source 1..2028: mol_type = other DNA
atgccccgggcccagcccagcagcgccagctaccagcctgtgcctgctgacccctttgccatcgtgtcccgggcccagcagatggtggagatcctgagtgatgaaaatagaaacctgcggcaggagctggagggctgctatgagaaggtggcccggctgcagaaggtggagacagagatccagagggtgtctgaggcctatgagaacctggtgaagagcagcagcaagcgggaggccctggagaaggccatgaggaacaagctggagggggagatccggaggatgcatgacttcaacagagacctgcgggagcggctggagacagccaacaagcagctggccgagaaggagtatgagggcagcgaggacaccaggaagaccatcagccagctgtttgccaagaacaaggagagccagcgggagaaggagaagctggaggccgagctggccacagcccggagcaccaatgaagaccagaggaggcacatcgagatccgggaccaggccctgagcaatgcccaggccaaggtggtgaagctggaggaggagctgaagaagaagcaggtgtatgtggacaaggtggagaagatgcagcaggccctggtgcagctgcaggccgcctgtgagaagcgggagcagctggagcaccggctgcggacccggctggagcgggagctggagagcctgcgcatccagcagaggcagggcaactgccagcccaccaacgtgtctgagtacaatgctgctgccctgatggagctgctgcgggagaaggaggagcgcatcctggccctggaggccgacatgaccaagtgggagcagaagtacctggaggagaatgtgatgaggcactttgccctggatgctgctgccaccgtggccgcccagagggacaccaccgtcatcagccacagccccaacaccagctatgacacagccctggaggcccgcatccagaaggaggaggaggagatcctgatggccaacaagcgctgcctggacatggagggccgcatcaagaccctgcacgcccagatcatcgagaaggatgccatgatcaaggtgctgcagcagaggagcaggaaggagcccagcaagacagagcagctgagctgcatgaggcctgccaagagcctgatgagcatcagcaatgccggcagcggcctgctgagccacagcagcaccctgaccggcagccccatcatggaggagaagagagatgacaagtcctggaagggcagcctgggcatcctgctgggcggggactacagagcagaatatgtgcccagcacccccagccctgtgccccccagcacccccctgctgagcgcccacagcaagacaggcagccgggactgcagcacccagacagagcggggcacagagagcaacaagacagctgctgtggcccccatctctgtgcctgcccctgtggccgctgctgccacagctgctgccatcacagccacagctgccaccatcaccaccaccatggtggccgccgcccctgtggccgtggccgctgctgctgccccagctgctgctgctgcccccagccctgccacagctgctgccacagctgctgctgtgtccccagctgctgctggccagatcccagctgctgcctctgtggccagcgctgctgctgtggcccccagcgctgctgctgctgctgctgtgcaggtggccccagctgccccagcccctgtgcctgccccagccctggtgcctgtgcctgccccagctgctgcccaggccagcgccccagcccagacccaggcccccaccagcgccccagctgtggcccccaccccagcccccacccccaccccagctgtggcccaggccgaggtgcctgccagccctgccaccggccctggcccccaccggctgagcatccccagcctgacctgcaacccagacaagacagatggccctgtgttccacagcaacaccctggagaggaagacccccatccagatcctgggccaggagccagatgctgagatggtggagtacctgatctag

SEQ ID NO: 143569 - DNA, 1794 bp, synthetic construct
  misc_feature 1..1794: note = Description of Artificial Sequence: Synthetic coding sequence
  source 1..1794: mol_type = other DNA
atggagcaccggggccccccacctgagtaccccttcaagggcatgccaccccagagcgtggtgtgcaagccccaggagcccggccacttctacagcgagcaccggctgaaccagcccggccgcacagagggccagctgatgagataccagcaccccccagaatatggagctgcccggcctgcccaggacatcagcctgcccctgagcgccaggaacagccagccccacagccccaccagcagcctgaccagcggcggcagcctgcccctgctgcagagcccccccagcacccggctgagccctgcccggcaccccctggtgcccaaccagggcgaccacagcgcccacctgccccggccccagcagcacttcctgcccaaccaggcccaccagggcgaccactaccgcctgagccagcccggcctgagccagcagcagcagcagcagcagcagcagcaccaccaccaccaccaccaccagcagcagcagcagcagcagccccagcagcagcctggagaggcctacagcgccatgccccgggcccagcccagcagcgccagctaccagcctgtgcctgctgacccctttgccatcgtgtcccgggcccagcagatggtggagatcctgagtgatgagaacagaaacctgcggcaggagctggagggctgctatgagaaggtggcccggctgcagaaggtggagacagagatccagagggtgtctgaggcctatgagaacctggtgaagagcagcagcaagcgggaggccctggagaaggccatgaggaacaagctggagggggagatccggaggatgcatgacttcaacagagacctgcgggagcggctggagacagccaacaagcagctggccgagaaggagtatgagggcagcgaggacaccaggaagaccatcagccagctgtttgccaagaacaaggagagccagcgggagaaggagaagctggaggccgagctggccacagcccggagcaccaatgaagaccagaggaggcacatcgagatccgggaccaggccctgagcaatgcccaggccaaggtggtgaagctggaggaggagctgaagaagaagcaggtgtatgtggacaaggtggagaagatgcagcaggccctggtgcagctgcaggccgcctgtgagaagcgggagcagctggagcaccggctgcggacccggctggagcgggagctggagagcctgcgcatccagcagaggcagggcaactgccagcccaccaacgtgtctgagtacaatgctgctgccctgatggagctgctgcgggagaaggaggagcgcatcctggccctggaggccgacatgaccaagtgggagcagaagtacctggaggagaatgtgatgaggcactttgccctggatgctgctgccaccgtggccgcccagagggacaccaccgtcatcagccacagccccaacaccagctatgacacagccctggaggcccgcatccagaaggaggaggaggagatcctgatggccaacaagcgctgcctggacatggagggccgcatcaagaccctgcacgcccagatcatcgagaaggatgccatgatcaaggtgctgcagcagaggagcaggaaggagcccagcaagacagagcagctgagctgcatgaggcctgccaagagcctgatgagcatcagcaatgccggcagcggcctgctgagccacagcagcaccctgaccggcagccccatcatggaggagaagagagatgacaagtcctggaagggcagcctgggcaatgacagcaagtag

SEQ ID NO: 143570 - DNA, 3255 bp, synthetic construct
  misc_feature 1..3255: note = Description of Artificial Sequence: Synthetic coding sequence
  source 1..3255: mol_type = other DNA
atgaggaacagcgaggagcagcccagcggcggcaccaccgtgctgcagaggctgctgcaggagcagctgcgctatggcaaccccagcgagaacagaagcctgctggccatccaccagcaggccactggaaatggcccccccttccccagcggcagcggcaaccctggcccccagagtgatgtgctgagcccccaggaccaccaccagcagctggtggcccatgctgcccggcaggagccccagggccaggagatccagagcgagaacctgatcatggagaagcagctgagccccaggatgcagaacaatgaggagctgcccacctatgaggaggccaaggtgcagagccagtacttccggggccagcagcacgcctctgtgggcgccgccttctacgtgactggagtgaccaaccagaagatgaggacagagggccggcccagcgtgcagaggctgaaccctgggaagatgcaccaggatgagggcctgcgggacctgaagcagggccacgtgcgcagcctgtctgagcggctgatgcagatgagcctggccaccagcggcgtgaaggcccacccccctgtgaccagcgcccccctgagccccccccagcccaatgacctgtacaagaaccccaccagcagcagcgagttctacaaggcccagggccccctgcccaaccagcacagcctgaagggcatggagcaccggggccccccacctgagtaccccttcaagggcatgccaccccagagcgtggtgtgcaagccccaggagcccggccacttctacagcgagcaccggctgaaccagcccggccgcacagagggccagctgatgagataccagcaccccccagaatatggagctgcccggcctgcccaggacatcagcctgcccctgagcgccaggaacagccagccccacagccccaccagcagcctgaccagcggcggcagcctgcccctgctgcagagcccccccagcacccggctgagccctgcccggcaccccctggtgcccaaccagggcgaccacagcgcccacctgccccggccccagcagcacttcctgcccaaccaggcccaccagggcgaccactaccgcctgagccagcccggcctgagccagcagcagcagcagcagcagcagcagcaccaccaccaccaccaccaccagcagcagcagcagcagcagccccagcagcagcctggagaggcctacagcgccatgccccgggcccagcccagcagcgccagctaccagcctgtgcctgctgacccctttgccatcgtgtcccgggcccagcagatggtggagatcctgagtgatgagaacagaaacctgcggcaggagctggagggctgctatgagaaggtggcccggctgcagaaggtggagacagagatccagagggtgtctgaggcctatgagaacctggtgaagagcagcagcaagcgggaggccctggagaaggccatgaggaacaagctggagggggagatccggaggatgcatgacttcaacagagacctgcgggagcggctggagacagccaacaagcagctggccgagaaggagtatgagggcagcgaggacaccaggaagaccatcagccagctgtttgccaagaacaaggagagccagcgggagaaggagaagctggaggccgagctggccacagcccggagcaccaatgaagaccagaggaggcacatcgagatccgggaccaggccctgagcaatgcccaggccaaggtggtgaagctggaggaggagctgaagaagaagcaggtgtatgtggacaaggtggagaagatgcagcaggccctggtgcagctgcaggccgcctgtgagaagcgggagcagctggagcaccggctgcggacccggctggagcgggagctggagagcctgcgcatccagcagaggcagggcaactgccagcccaccaacgtgtctgagtacaatgctgctgccctgatggagctgctgcgggagaaggaggagcgcatcctggccctggaggccgacatgaccaagtgggagcagaagtacctggaggagaatgtgatgaggcactttgccctggatgctgctgccaccgtggccgcccagagggacaccaccgtcatcagccacagccccaacaccagctatgacacagccctggaggcccgcatccagaaggaggaggaggagatcctgatggccaacaagcgctgcctggacatggagggccgcatcaagaccctgcacgcccagatcatcgagaaggatgccatgatcaaggtgctgcagcagaggagcaggaaggagcccagcaagacagagcagctgagctgcatgaggcctgccaagagcctgatgagcatcagcaatgccggcagcggcctgctgagccacagcagcaccctgaccggcagccccatcatggaggagaagagagatgacaagtcctggaagggcagcctgggcatcctgctgggcggggactacagagcagaatatgtgcccagcacccccagccctgtgccccccagcacccccctgctgagcgcccacagcaagacaggcagccgggactgcagcacccagacagagcggggcacagagagcaacaagacagctgctgtggcccccatctctgtgcctgcccctgtggccgccgccgccacagctgctgccatcacagccacagctgccaccatcaccaccaccatggtggccgccgcccctgtggccgtggccgctgctgctgccccagctgctgctgctgcccccagccctgccacagctgctgccacagctgctgctgtgtccccagctgctgctggccagatcccagctgctgcctctgtggccagcgctgctgctgtggcccccagcgctgctgctgctgctgctgtgcaggtggccccagctgccccagcccctgtgcctgccccagccctggtgcctgtgcctgccccagctgctgcccaggccagcgccccagcccagacccaggcccccaccagcgccccagctgtggcccccaccccagcccccacccccaccccagctgtggcccaggccgaggtgcctgccagccctgccactggacctggcccccaccggctgagcatccccagcctgacctgcaacccagacaagacagatggccctgtgttccacagcaacaccctggagaggaagacccccatccagatcctgggccaggagccagatgctgagatggtggagtacctgatctag

SEQ ID NO: 143571 - DNA, 2559 bp, synthetic construct
  misc_feature 1..2559: note = Description of Artificial Sequence: Synthetic coding sequence
  source 1..2559: mol_type = other DNA
atggagcaccggggccccccacctgagtaccccttcaagggcatgccaccccagagcgtggtgtgcaagccccaggagcccggccacttctacagcgagcaccggctgaaccagcccggccgcacagagggccagctgatgagataccagcaccccccagaatatggagctgcccggcctgcccaggacatcagcctgcccctgagcgccaggaacagccagccccacagccccaccagcagcctgaccagcggcggcagcctgcccctgctgcagagcccccccagcacccggctgagccctgcccggcaccccctggtgcccaaccagggcgaccacagcgcccacctgccccggccccagcagcacttcctgcccaaccaggcccaccagggcgaccactaccgcctgagccagcccggcctgagccagcagcagcagcagcagcagcagcagcaccaccaccaccaccaccaccagcagcagcagcagcagcagccccagcagcagcctggagaggcctacagcgccatgccccgggcccagcccagcagcgccagctaccagcctgtgcctgctgacccctttgccatcgtgtcccgggcccagcagatggtggagatcctgagtgatgagaacagaaacctgcggcaggagctggagggctgctatgagaaggtggcccggctgcagaaggtggagacagagatccagagggtgtctgaggcctatgagaacctggtgaagagcagcagcaagcgggaggccctggagaaggccatgaggaacaagctggagggggagatccggaggatgcatgacttcaacagagacctgcgggagcggctggagacagccaacaagcagctggccgagaaggagtatgagggcagcgaggacaccaggaagaccatcagccagctgtttgccaagaacaaggagagccagcgggagaaggagaagctggaggccgagctggccacagcccggagcaccaatgaagaccagaggaggcacatcgagatccgggaccaggccctgagcaatgcccaggccaaggtggtgaagctggaggaggagctgaagaagaagcaggtgtatgtggacaaggtggagaagatgcagcaggccctggtgcagctgcaggccgcctgtgagaagcgggagcagctggagcaccggctgcggacccggctggagcgggagctggagagcctgcgcatccagcagaggcagggcaactgccagcccaccaacgtgtctgagtacaatgctgctgccctgatggagctgctgcgggagaaggaggagcgcatcctggccctggaggccgacatgaccaagtgggagcagaagtacctggaggagaatgtgatgaggcactttgccctggatgctgctgccaccgtggccgcccagagggacaccaccgtcatcagccacagccccaacaccagctatgacacagccctggaggcccgcatccagaaggaggaggaggagatcctgatggccaacaagcgctgcctggacatggagggccgcatcaagaccctgcacgcccagatcatcgagaaggatgccatgatcaaggtgctgcagcagaggagcaggaaggagcccagcaagacagagcagctgagctgcatgaggcctgccaagagcctgatgagcatcagcaatgccggcagcggcctgctgagccacagcagcaccctgaccggcagccccatcatggaggagaagagagatgacaagtcctggaagggcagcctgggcatcctgctgggcggggactacagagcagaatatgtgcccagcacccccagccctgtgccccccagcacccccctgctgagcgcccacagcaagacaggcagccgggactgcagcacccagacagagcggggcacagagagcaacaagacagctgctgtggcccccatctctgtgcctgcccctgtggccgccgccgccacagctgctgccatcacagccacagctgccaccatcaccaccaccatggtggccgccgcccctgtggccgtggccgctgctgctgccccagctgctgctgctgcccccagccctgccacagctgctgccacagctgctgctgtgtccccagctgctgctggccagatcccagctgctgcctctgtggccagcgctgctgctgtggcccccagcgctgctgctgctgctgctgtgcaggtggccccagctgccccagcccctgtgcctgccccagccctggtgcctgtgcctgccccagctgctgcccaggccagcgccccagcccagacccaggcccccaccagcgccccagctgtggcccccaccccagcccccacccccaccccagctgtggcccaggccgaggtgcctgccagccctgccactggacctggcccccaccggctgagcatccccagcctgacctgcaacccagacaagacagatggccctgtgttccacagcaacaccctggagaggaagacccccatccagatcctgggccaggagccagatgctgagatggtggagtacctgatctag

SEQ ID NO: 143572 - DNA, 549 bp, synthetic construct
  misc_feature 1..549: note = Description of Artificial Sequence: Synthetic coding sequence
  source 1..549: mol_type = other DNA
atgatcaaggtgctgcagcagaggagcaggaaggagcccagcaagacagagcagctgagctgcatgaggcctgccaagagcctgatgagcatcagcaatgccggcagcggcctgctgagccacagcagcaccctgaccggcagccccatcatggaggagaagagagatgacaagtcctggaagggcagcctgggcatcctgctgggcggggactacagagcagaatatgtgcccagcacccccagccctgtgccccccagcacccccctgctgagcgcccacagcaagacaggcagccgggactgcagcacccagacagagcggggcacagagagcaacaagacagctgctgtggcccccatctctgtgcctgcccctgtggccgccgccgccacagctgctgccatcacagccacagctgccaccatcaccaccaccatggctgctgctgctgcccccagccctgccacagctgctgccacagctgctgctgtgtccccagctgctgctggccagatcccagctgctgcctctgtggccagcgcctag

SEQ ID NO: 143573 - DNA, 3255 bp, synthetic construct; identical to SEQ ID NO: 143570
  misc_feature 1..3255: note = Description of Artificial Sequence: Synthetic coding sequence
  source 1..3255: mol_type = other DNA

SEQ ID NO: 143574 - DNA, 1512 bp, synthetic construct
  misc_feature 1..1512: note = Description of Artificial Sequence: Synthetic coding sequence
  source 1..1512: mol_type = other DNA
atgctgagccagctggccatgctgcagggcagcctgctgctggtggtggccaccatgtctgtggcccagcagacccggcaggaggccgaccggggctgtgagaccctggtggtgcagcacggccactgcagctacaccttcctgctgcccaagtctgagccctgccccccaggccctgaggtgtcccgggacagcaacaccctgcagcgggagagcctggccaaccccctgcacctgggcaagctgcccacccagcaggtgaagcagctggagcaggccctgcagaacaacacccagtggctgaagaagctggagcgggccatcaagaccatcctgcggagcaagctggagcaggtgcagcagcagatggcccagaaccagacagcccccatgctggagctgggcaccagcctgctgaaccagaccacagcccagatcaggaagctgacagacatggaggcccagctgctgaaccagaccagcaggatggatgcccagatgcctgagaccttcctgagcaccaacaagctggagaaccagctgctgctgcagaggcagaagctgcagcagctgcagggccagaacagcgccctggagaagaggctgcaggccctggagaccaagcagcaggaggagctggccagcatcctgagcaagaaggccaagctgctgaacaccctgagccggcagagcgctgccctgaccaacatcgagcggggcctgcggggcgtgcgccacaacagcagcctgctgcaggaccagcagcacagcctgcggcagctgctggtgctgctgcggcacctggtgcaggagcgggccaatgccagcgccccagccttcatcatggccggggagcaggtgttccaggactgtgccgagatccagaggtctggggccagcgccagcggcgtgtacaccatccaggtgtccaatgccaccaagcccaggaaggtgttctgtgacctgcagagcagcggcggccgctggaccctcatccagaggcgggagaatggaacagtgaacttccagaggaactggaaggactacaagcagggctttggagaccctgctggggagcactggctgggcaatgaggtggtgcaccagctgacccggcgggccgcctacagcctgcgggtggagctgcaggactgggagggccacgaggcctatgcccagtatgagcacttccacctgggcagcgagaaccagctgtaccgcctgtctgtggtgggctacagcggcagcgctggccggcagagcagcctggtgctgcagaacaccagcttcagcaccctggacagcgacaatgaccactgcctgtgcaagtgtgcccaggtgatgtctgggggctggtggtttgatgcctgtggcctgagcaacctgaatggagtgtactaccacgccccagacaacaagtacaagatggatggcatccgctggcactacttcaagggccccagctacagcctgcgggccagcaggatgatgatccggcccctggacatctag

SEQ ID NO: 143575 - DNA, 1233 bp, synthetic construct
  misc_feature 1..1233: note = Description of Artificial Sequence: Synthetic coding sequence
  source 1..1233: mol_type = other DNA
atgctgagccagctggccatgctgcagggcagcctgctgctggtggtggccaccatgtctgtggcccagcagacccggcaggaggccgaccggggctgtgagaccctggtggtgcagcacggccactgcagctacaccttcctgctgcccaagtctgagccctgccccccaggccctgaggtgtcccgggacagcaacaccctgcagcgggagagcctggccaaccccctgcacctgggcaagctgcccacccagcaggtgaagcagctggagcaggccctgcagaacaacacccagtggctgaagaagctggagcgggccatcaagaccatcctgcggagcaagctggagcaggtgcagcagcagatggcccagaaccagacagcccccatgctggagctgggcaccagcctgctgaaccagaccacagcccagatcaggaagctgacagacatggaggcccagctgctgaaccagaccagcaggatggatgcccagatgcctgagaccttcctgagcaccaacaagctggagaaccagctgctgctgcagaggcagaagctgcagcagctgcagggccagaacagcgccctggagaagaggctgcaggccctggagaccaagcagcaggaggagctggccagcatcctgagcaagaaggccaagctgctgaacaccctgagccggcagagcgctgccctgaccaacatcgagcggggcctgcggggcgtgcgccacaacagcagcctgctgcaggaccagcagcacagcctgcggcagctgctggtgctgctgcggcacctggtgcaggagcgggccaatgccagcgccccagccttcatcatggccggggagcaggtgttccaggactgtgccgagatccagaggtctggggccagcgccagcggcgtgtacaccatccaggtgtccaatgccaccaagcccaggaaggtgttctgtgacctgcagagcagcggcggccgctggaccctcatccagaggcgggagaatggaacagtgaacttccagaggaactggaaggactacaagcagggctttggagaccctgctggggagcactggctgggcaatgaggtggtgcaccagctgacccggcgggccgcctacagcctgcgggtggagctgcaggactgggagggccacgaggcctatgcccagtatgagcacttccacctgggcagcgagaaccagctgtacagagtggtggtgtag

SEQ ID NO: 143576 - DNA, 1383 bp, synthetic construct
  misc_feature 1..1383: note = Description of Artificial Sequence: Synthetic coding sequence
  source 1..1383: mol_type = other DNA
atgttcaccatcaagctgctgctcttcatcgtgcccctggtgatcagcagcagaattgaccaggacaacagcagctttgacagcctgagccctgagcccaagagcagatttgccatgctggatgatgtgaagatcctggccaacggcctgctgcagctgggccacggcctgaaggactttgtgcacaagaccaagggccagatcaatgacatcttccagaagctgaacatctttgaccagagcttctatgacctgagcctgcagaccagcgagatcaaggaggaggagaaggagctgcggaggaccacctacaagctgcaggtgaagaatgaggaggtgaagaacatgagcctggagctgaacagcaagctggagagcctgctggaggagaagatcctgctgcagcagaaggtgaagtacctggaggagcagctgaccaacctgatccagaaccagcctgagaccccagagcaccctgaggtgaccagcctgaagacctttgtggagaagcaggacaacagcatcaaggacctgctgcagacagtggaggaccagtacaagcagctgaaccagcagcacagccagatcaaggagattgagaaccagctgcggaggaccagcatccaggagcccacagagatcagcctgagcagcaagccccgggcccccaggaccacccccttcctgcagctgaatgagatcagaaatgtgaagcatgatggcatcccagcagaatgtaccaccatctacaacagaggagagcacaccagcggcatgtatgccatccggcccagcaacagccaggtgttccacgtgtactgtgatgtgatcagcggcagcccctggaccctcatccagcacagaattgatggcagccagaacttcaatgagacctgggagaactacaagtatggcttcggccgcctggatggagagttctggctgggcctggagaagatctacagcatcgtgaagcagagcaactacgtgctgagaattgagctggaggactggaaggacaacaagcactacatcgagtacagcttctacctgggcaaccacgagaccaactacaccctgcacctggtggccatcactggaaatgtgcccaatgccatccctgagaacaaggacctggtgttcagcacctgggaccacaaggccaagggccacttcaactgcccagagggctacagcggcggctggtggtggcatgatgaatgtggggagaacaacctgaatggcaagtacaacaagccccgggccaagagcaagccagagaggagaagaggcctgtcctggaagagccagaatggccgcctgtacagcatcaagagcaccaagatgctgatccaccccacagacagcgagagctttgaatag

SEQ ID NO: 143577 - DNA, 1167 bp, synthetic construct
  misc_feature 1..1167: note = Description of Artificial Sequence: Synthetic coding sequence
  source 1..1167: mol_type = other DNA
atgatgagccccagccaggccagcctgctcttcctgaatgtgtgcatcttcatctgtggggaggccgtgcagggcaactgtgtgcaccacagcacagacagctctgtggtgaacatcgtggaggatggcagcaatgccaaggatgagagcaagagcaatgacacagtgtgcaaggaggactgtgaggagagctgtgatgtgaagaccaagatcacccgggaggagaagcacttcatgtgcaggaacctgcagaacagcatcgtgtcctacaccaggagcaccaagaagctgctgaggaacatgatggatgagcagcaggccagcctggactacctgagcaaccaggtgaatgagctgatgaacagagtgctgctgctgaccacagaggtgttcaggaagcagctggaccccttcccccacaggcctgtgcagagccacggcctggactgcacagacatcaaggacaccatcggctctgtgaccaagaccccatctggcctgtacatcatccaccctgagggcagcagctacccctttgaggtgatgtgtgacatggactacagaggaggcggccgcaccgtcatccagaagagaattgatggcatcatcgacttccagaggctgtggtgtgactacctggatggctttggagacctgctgggggagttctggctgggcctgaagaagatcttctacatcgtgaaccagaagaacaccagcttcatgctgtatgtggccctggagagtgaagatgacaccctggcctatgccagctatgacaacttctggctggaggatgagacccgcttcttcaagatgcacctgggccgctacagcggaaatgctggagatgccttccggggcctgaagaaggaggacaaccagaatgccatgcccttcagcaccagtgatgtggacaatgatggctgcaggcctgcctgcctggtgaatggccagagcgtgaagagctgcagccacctgcacaacaagacaggctggtggttcaatgaatgtggcctggccaacctgaatggcatccaccacttcagcggcaagctgctggccaccggcatccagtggggcacctggaccaagaacaacagccctgtgaagatcaagtctgtgtccatgaagatccggaggatgtacaacccctacttcaagtag

SEQ ID NO: 143578 - DNA, 1413 bp, synthetic construct
  misc_feature 1..1413: note = Description of Artificial Sequence: Synthetic coding sequence
  source 1..1413: mol_type = other DNA
atgggcaagccctggctgcgggccctgcagctgctgctgctgctgggcgcctcctgggcccgggccggggccccccgctgcacctacacctttgtgctgcccccccagaagttcaccggggctgtgtgctggagcggccctgccagcacccgggccaccccagaggccgccaatgccagcgagctggccgccctgaggatgagggtgggcagacatgaggagctgctgcgggagctgcagaggctggccgctgctgatggagctgtggccggggaggtgcgggccctgaggaaggagagccggggcctgagcgcccggctgggccagctgcgggcccagctgcagcacgaggccggccctggggccggccctggagctgacctgggcgctgagcctgctgctgccctggccctgctgggggagcgggtgctgaatgccagcgctgaggcccagagagctgctgcccgcttccaccagctggatgtgaagttccgggagctggcccagctggtgacccagcagagcagcctcatcgcccggctggagcggctgtgccctgggggcgccggcggccagcagcaggtgctgcccccaccacccctggtgcctgtggtgcctgtgcggctggtgggcagcaccagtgacaccagcaggatgctggaccctgcccctgagccccagagggaccagacccagaggcagcaggagcccatggccagccccatgcctgctggccaccctgctgtgcccaccaagcctgtgggcccctggcaggactgtgccgaggcccggcaggccggccacgagcagagcggcgtgtatgagctgcgggtgggcagacatgtggtgtctgtgtggtgtgagcagcagctggagggcggcggctggacagtcatccagaggcggcaggacggctctgtgaacttcttcaccacctggcagcactacaaggccggcttcggccgcccagatggagagtactggctgggcctggagcctgtgtaccagctgaccagcagaggagaccacgagctgctggtgctgctggaggactggggcggccgcggggcccgggcccactatgatggcttcagcctggagcctgagagtgaccactaccgcctgcggctgggccagtaccatggagatgctggggacagcctgtcctggcacaatgacaagcccttcagcacagtggaccgggaccgggacagctacagcggcaactgtgccctgtaccagaggggcggctggtggtaccacgcctgtgcccacagcaacctgaatggagtgtggcaccacggcggccactaccgcagccgctaccaggatggagtgtactgggccgagttccggggcggggcctacagcctgaggaaggccgccatgctgatccggcccctgaagctgtag

SEQ ID NO: 143579 - DNA, 2199 bp, synthetic construct
  misc_feature 1..2199: note = Description of Artificial Sequence: Synthetic coding sequence
  source 1..2199: mol_type = other DNA
atgggccagggctgggccacagctggcctgcccagcctgctcttcctgctgctgtgctacggccaccccctgctggtgcccagccaggaggccagccagcaggtgacagtgacccacggcaccagcagccaggccaccaccagcagccagaccaccacccaccaggccacagcccaccagaccagcgcccagagccccaacctggtgacagatgaagctgaggccagcaagtttgtggaggagtatgacaggaccagccaggtggtgtggaatgaatatgcagaggccaactggaactacaacaccaacatcaccacagagaccagcaagatcctgctgcagaagaacatgcagatcgccaaccacaccctgaagtatggcacccaggccaggaagtttgatgtgaaccagctgcagaacaccaccatcaagaggatcatcaagaaggtgcaggacctggagcgggccgccctgcctgcccaggagctggaggagtacaacaagatcctgctggacatggagaccacctacagcgtggccaccgtgtgccaccccaacggcagctgcctgcagctggagccagacctgaccaacgtgatggccaccagcaggaaatatgaggacctgctgtgggcctgggagggctggagggacaaggccggccgggccatcctgcagttctaccccaagtatgtggagctgatcaaccaggccgcccggctgaatggctacgtggatgctggggacagctggaggtccatgtatgagacccccagcctggagcaggacctggagcggctcttccaggagctgcagcccctgtacctgaacctgcacgcctacgtgagaagagccctgcaccgccactacggggcccagcacatcaacctggagggccccatcccagcccacctgctgggcaacatgtgggcccagacctggagcaacatctatgacctggtggtgcccttccccagcgcccccagcatggacaccacagaggccatgctgaagcagggctggacccccaggaggatgttcaaggaggctgatgacttcttcaccagcctgggcctgctgcctgtgcccccagagttctggaacaagtccatgctggagaagcccacagatggccgggaggtggtgtgccacgccagcgcctgggacttctacaacgggaaggacttccgcatcaagcagtgcaccaccgtgaacctggaggacctggtggtggcccaccacgagatgggccacatccagtacttcatgcagtacaaggacctgcctgtggccctgcgggagggcgccaaccctggcttccacgaggccatcggagatgtgctggccctgtctgtgtccacccccaagcacctgcacagcctgaacctgctgagcagcgagggcggcagtgatgaacatgacatcaacttcctgatgaagatggccctggacaagatcgccttcatccccttctcctacctggtggaccagtggcgctggagggtgtttgatggcagcatcaccaaggagaactacaaccaggagtggtggagcctgcggctgaagtaccagggcctgtgcccccctgtgcccaggacccagggcgactttgatcctggggccaagttccacatccccagctctgtgccctacatccgctactttgtgtccttcatcatccagttccagttccacgaggccctgtgccaggccgccggccacacaggccccctgcacaagtgtgacatctaccagagcaaggaggccggccagaggctggccacagccatgaagctgggcttcagccggccctggccagaggccatgcagctgatcaccggccagcccaacatgtctgccagcgccatgctgagctacttcaagcccctgctggactggctgaggacagaaaatgagctgcatggagagaagctgggctggccccagtacaactggacccccaacagcgcccggtctgagggccccctgcctgacagcggccgggtgtccttcctgggcctggacctggatgcccagcaggcccgggtgggccagtggctgctgctcttcctgggcatcgccctgctggtggccaccctgggcctgagccagaggctcttcagcatccgccacaggagcctgcaccgccacagccacggcccccagtttggaagtgaggtggagctgcggcacagctag

SEQ ID NO: 143580 - DNA, 3921 bp, synthetic construct
  misc_feature 1..3921: note = Description of Artificial Sequence: Synthetic coding sequence
  source 1..3921: mol_type = other DNA
atgggcgccgccagcggcagaagaggccctggcctgctgctgcccctgcccctgctgctgctgctgcccccccagcctgccctggccctggaccccggcctgcagcccggcaacttcagcgcagatgaggccggggcccagctgtttgcccagagctacaacagcagcgctgagcaggtgctcttccagagcgtggccgcctcctgggcccatgacaccaacatcacagcagaaaatgcccggcggcaggaggaggccgccctgctgagccaggagtttgctgaggcctggggccagaaggccaaggagctgtatgagcccatctggcagaacttcacagacccccagctgcggcgcatcattggagctgtgaggaccctgggcagcgccaacctgcccctggccaagaggcagcagtacaatgccctgctgagcaacatgagccgcatctacagcacagccaaggtgtgcctgcccaacaagacagccacctgctggagcctggaccctgacctgaccaacatcctggccagcagccgctcctatgccatgctgctgtttgcctgggagggctggcacaatgctgctggcatccccctgaagcccctgtatgaggacttcaccgccctgagcaatgaggcctacaagcaggacggcttcacagacacaggagcctactggaggtcctggtacaacagccccacctttgaagatgacctggagcacctgtaccagcagctggagcccctgtacctgaacctgcacgcctttgtgagaagagccctgcaccggcgctacggggaccgctacatcaacctgcggggccccatcccagcccacctgctgggggacatgtgggcccagagctgggagaacatctatgacatggtggtgcccttcccagacaagcccaacctggatgtgaccagcaccatgctgcagcagggctggaatgccacccacatgttccgggtggccgaggagttcttcaccagcctggagctgagccccatgcctcctgagttctgggagggctccatgctggagaagccagcagatggccgggaggtggtgtgccacgccagcgcctgggacttctacaacaggaaggacttccgcatcaagcagtgcaccagggtgaccatggaccagctgagcacagtgcaccacgagatgggccacatccagtactacctgcagtacaaggacctgcctgtgtccctgcggcggggggccaaccctggcttccacgaggccatcggagatgtgctggccctgtctgtgtccaccccagagcacctgcacaagattggcctgctggacagagtgaccaatgacacagaaagtgacatcaactacctgctgaagatggccctggagaagatcgccttcctgcccttcggctacctggtggaccagtggcgctggggcgtcttcagcggccgcaccccacccagccgctacaactttgactggtggtacctgcggaccaagtaccagggcatctgcccccctgtgaccagaaatgagacccactttgatgctggggccaagttccacgtgcccaacgtgaccccctacatccgctactttgtgtcctttgtgctgcagttccagttccacgaggccctgtgcaaggaggccggctatgagggccccctgcaccagtgtgacatctaccgcagcaccaaggccggggccaagctgaggaaggtgctgcaggccggcagcagccggccctggcaggaggtgctgaaggacatggtgggcctggatgccctggatgcccagcccctgctgaagtacttccagcctgtgacccagtggctgcaggagcagaaccagcagaatggagaggtgctgggctggccagagtaccagtggcacccccccctgcctgacaactacccagagggcatcgacctggtgacagatgaagctgaggccagcaagtttgtggaggagtatgacaggaccagccaggtggtgtggaatgaatatgcagaggccaactggaactacaacaccaacatcaccacagagaccagcaagatcctgctgcagaagaacatgcagatcgccaaccacaccctgaagtatggcacccaggccaggaagtttgatgtgaaccagctgcagaacaccaccatcaagaggatcatcaagaaggtgcaggacctggagcgggccgccctgcctgcccaggagctggaggagtacaacaagatcctgctggacatggagaccacctacagcgtggccaccgtgtgccaccccaacggcagctgcctgcagctggagccagacctgaccaacgtgatggccaccagcaggaaatatgaggacctgctgtgggcctgggagggctggagggacaaggccggccgggccatcctgcagttctaccccaagtatgtggagctgatcaaccaggccgcccggctgaatggctacgtggatgctggggacagctggaggtccatgtatgagacccccagcctggagcaggacctggagcggctcttccaggagctgcagcccctgtacctgaacctgcacgcctacgtgagaagagccctgcaccgccactacggggcccagcacatcaacctggagggccccatcccagcccacctgctgggcaacatgtgggcccagacctggagcaacatctatgacctggtggtgcccttccccagcgcccccagcatggacaccacagaggccatgctgaagcagggctggacccccaggaggatgttcaaggaggctgatgacttcttcaccagcctgggcctgctgcctgtgcccccagagttctggaacaagtccatgctggagaagcccacagatggccgggaggtggtgtgccacgccagcgcctgggacttctacaacgggaaggacttccgcatcaagcagtgcaccaccgtgaacctggaggacctggtggtggcccaccacgagatgggccacatccagtacttcatgcagtacaaggacctgcctgtggccctgcgggagggcgccaaccctggcttccacgaggccatcggagatgtgctggccctgtctgtgtccacccccaagcacctgcacagcctgaacctgctgagcagcgagggcggcagtgatgaacatgacatcaacttcctgatgaagatggccctggacaagatcgccttcatccccttctcctacctggtggaccagtggcgctggagggtgtttgatggcagcatcaccaaggagaactacaaccaggagtggtggagcctgcggctgaagtaccagggcctgtgcccccctgtgcccaggacccagggcgactttgatcctggggccaagttccacatccccagctctgtgccctacatccgctactttgtgtccttcatcatccagttccagttccacgaggccctgtgccaggccgccggccacacaggccccctgcacaagtgtgacatctaccagagcaaggaggccggccagaggctggccacagccatgaagctgggcttcagccggccctggccagaggccatgcagctgatcaccggccagcccaacatgtctgccagcgccatgctgagctacttcaagcccctgctggactggctgaggacagaaaatgagctgcatggagagaagctgggctggccccagtacaactggacccccaacagcgcccggtctgagggccccctgcctgacagcggccgggtgtccttcctgggcctggacctggatgcccagcaggcccgggtgggccagtggctgctgctcttcctgggcatcgccctgctggtggccaccctgggcctgagccagaggctcttcagcatccgccacaggagcctgcaccgccacagccacggcccccagtttggaagtgaggtggagctgcggcacagctag

SEQ ID NO: 143581 - DNA, 2076 bp, synthetic construct
  misc_feature 1..2076: note = Description of Artificial Sequence: Synthetic coding sequence
  source 1..2076: mol_type = other DNA
atgggccagggctgggccacagctggcctgcccagcctgctcttcctgctgctgtgctacggccaccccctgctggtgcccagccaggaggccagccagcaggtgacagtgacccacggcaccagcagccaggccaccaccagcagccagaccaccacccaccaggccacagcccaccagaccagcgcccagagccccaacctggtgacagatgaagctgaggccagcaagtttgtggaggagtatgacaggaccagccaggtggtgtggaatgaatatgcagaggccaactggaactacaacaccaacatcaccacagagaccagcaagatcctgctgcagaagaacatgcagatcgccaaccacaccctgaagtatggcacccaggccaggaagtttgatgtgaaccagctgcagaacaccaccatcaagaggatcatcaagaaggtgcaggacctggagcgggccgccctgcctgcccaggagctggaggagtacaacaagatcctgctggacatggagaccacctacagcgtggccaccgtgtgccaccccaacggcagctgcctgcagctggagccagacctgaccaacgtgatggccaccagcaggaaatatgaggacctgctgtgggcctgggagggctggagggacaaggccggccgggccatcctgcagttctaccccaagtatgtggagctgatcaaccaggccgcccggctgaatggctacgtggatgctggggacagctggaggtccatgtatgagacccccagcctggagcaggacctggagcggctcttccaggagctgcagcccctgtacctgaacctgcacgcctacgtgagaagagccctgcaccgccactacggggcccagcacatcaacctggagggccccatcccagcccacctgctgggcaacatgtgggcccagacctggagcaacatctatgacctggtggtgcccttccccagcgcccccagcatggacaccacagaggccatgctgaagcagggctggacccccaggaggatgttcaaggaggctgatgacttcttcaccagcctgggcctgctgcctgtgcccccagagttctggaacaagtccatgctggagaagcccacagatggccgggaggtggtgtgccacgccagcgcctgggacttctacaacgggaaggacttccgcatcaagcagtgcaccaccgtgaacctggaggacctggtggtggcccaccacgagatgggccacatccagtacttcatgcagtacaaggacctgcctgtggccctgcgggagggcgccaaccctggcttccacgaggccatcggagatgtgctggccctgtctgtgtccacccccaagcacctgcacagcctgaacctgctgagcagcgagggcggcagtgatgaacatgacatcaacttcctgatgaagatggccctggacaagatcgccttcatccccttctcctacctggtggaccagtggcgctggagggtgtttgatggcagcatcaccaaggagaactacaaccaggagtggtggagcctgcggctgaagtaccagggcctgtgcccccctgtgcccaggacccagggcgactttgatcctggggccaagttccacatccccagctctgtgccctacatcagaacagccatgaagctgggcttcagccggccctggccagaggccatgcagctgatcaccggccagcccaacatgtctgccagcgccatgctgagctacttcaagcccctgctggactggctgaggacagaaaatgagctgcacggggagaagctgggctggccccagtacaactggacccccaacagcgcccggtctgagggccccctgcctgattctggccgggtgtccttcctgggcctggacctggatgcccagcaggcccgggtgggccagtggctgctgctcttcctgggcatcgccctgctggtggccaccctgggcctgagccagaggctcttcagcatccgccacaggagcctgcaccgccacagccacggcccccagtttggcagcgaggtggagctgcggcacagctag

SEQ ID NO: 143582 - DNA, 1536 bp, synthetic construct
  misc_feature 1..1536: note = Description of Artificial Sequence: Synthetic coding sequence
  source 1..1536: mol_type = other DNA
atgcagatcgccaaccacaccctgaagtatggcacccaggccaggaagtttgatgtgaaccagctgcagaacaccaccatcaagaggatcatcaagaaggtgcaggacctggagcgggccgccctgcctgcccaggagctggaggagtacaacaagatcctgctggacatggagaccacctacagcgtggccaccgtgtgccaccccaacggcagctgcctgcagctggagccagacctgaccaacgtgatggccaccagcaggaaatatgaggacctgctgtgggcctgggagggctggagggacaaggccggccgggccatcctgcagttctaccccaagtatgtggagctgatcaaccaggccgcccggctgaatggaaacatgtgggcccagacctggagcaacatctatgacctggtggtgcccttccccagcgcccccagcatggacaccacagaggccatgctgaagcagggctggacccccaggaggatgttcaaggaggctgatgacttcttcaccagcctgggcctgctgcctgtgcccccagagttctggaacaagtccatgctggagaagcccacagatggccgggaggtggtgtgccacgccagcgcctgggacttctacaacgggaaggacttccgcatcaagcagtgcaccaccgtgaacctggaggacctggtggtggcccaccacgagatgggccacatccagtacttcatgcagtacaaggacctgcctgtggccctgcgggagggcgccaaccctggcttccacgaggccatcggagatgtgctggccctgtctgtgtccacccccaagcacctgcacagcctgaacctgctgagcagcgagggcggcagtgatgaacatgacatcaacttcctgatgaagatggccctggacaagatcgccttcatccccttctcctacctggtggaccagtggcgctggagggtgtttgatggcagcatcaccaaggagaactacaaccaggagtggtggagcctgcggctgaagtaccagggcctgtgcccccctgtgcccaggacccagggcgactttgatcctggggccaagttccacatccccagctctgtgccctacatcagaacagccatgaagctgggcttcagccggccctggccagaggccatgcagctgatcaccggccagcccaacatgtctgccagcgccatgctgagctacttcaagcccctgctggactggctgaggacagaaaatgagctgcacggggagaagctgggctggccccagtacaactggacccccaacagcgcccggtctgagggccccctgcctgattctggccgggtgtccttcctgggcctggacctggatgcccagcaggcccgggtgggccagtggctgctgctcttcctgggcatcgccctgctggtggccaccctgggcctgagccagaggctcttcagcatccgccacaggagcctgcaccgccacagccacggcccccagtttggcagcgaggtggagctgcggcacagctag

SEQ ID NO: 143583 - DNA, 3438 bp, synthetic construct
  misc_feature 1..3438: note = Description of Artificial Sequence: Synthetic coding sequence
  source 1..3438: mol_type = other DNA
atgggcgccgccagcggcagaagaggccctggcctgctgctgcccctgcccctgctgctgctgctgcccccccagcctgccctggccctggaccccggcctgcagcccggcaacttcagcgcagatgaggccggggcccagctgtttgcccagagctacaacagcagcgctgagcaggtgctcttccagagcgtggccgcctcctgggcccatgacaccaacatcacagcagaaaatgcccggcggcaggaggaggccgccctgctgagccaggagtttgctgaggcctggggccagaaggccaaggagctgtatgagcccatctggcagaacttcacagacccccagctgcggcgcatcattggagctgtgaggaccctgggcagcgccaacctgcccctggccaagaggcagcagtacaatgccctgctgagcaacatgagccgcatctacagcacagccaaggtgtgcctgcccaacaagacagccacctgctggagcctggaccctgacctgaccaacatcctggccagcagccgctcctatgccatgctgctgtttgcctgggagggctggcacaatgctgctggcatccccctgaagcccctgtatgaggacttcaccgccctgagcaatgaggcctacaagcaggacggcttcacagacacaggagcctactggaggtcctggtacaacagccccacctttgaagatgacctggagcacctgtaccagcagctggagcccctgtacctgaacctgcacgcctttgtgagaagagccctgcaccggcgctacggggaccgctacatcaacctgcggggccccatcccagcccacctgctgggggacatgtgggcccagagctgggagaacatctatgacatggtggtgcccttcccagacaagcccaacctggatgtgaccagcaccatgctgcagcagggctggaatgccacccacatgttccgggtggccgaggagttcttcaccagcctggagctgagccccatgcctcctgagttctgggagggctccatgctggagaagccagcagatggccgggaggtggtgtgccacgccagcgcctgggacttctacaacaggaaggacttccgcatcaagcagtgcaccagggtgaccatggaccagctgagcacagtgcaccacgagatgggccacatccagtactacctgcagtacaaggacctgcctgtgtccctgcggcggggggccaaccctggcttccacgaggccatcggagatgtgctggccctgtctgtgtccaccccagagcacctgcacaagattggcctgctggacagagtgaccaatgacacagaaagtgacatcaactacctgctgaagatggccctggagaagatcgccttcctgcccttcggctacctggtggaccagtggcgctggggcgtcttcagcggccgcaccccacccagccgctacaactttgactggtggtacctgcggaccaagtaccagggcatctgcccccctgtgaccagaaatgagacccactttgatgctggggccaagttccacgtgcccaacgtgaccccctacatccgctactttgtgtcctttgtgctgcagttccagttccacgaggccctgtgcaaggaggccggctatgagggccccctgcaccagtgtgacatctaccgcagcaccaaggccggggccaagctgaggaaggtgctgcaggccggcagcagccggccctggcaggaggtgctgaaggacatggtgggcctggatgccctggatgcccagcccctgctgaagtacttccagcctgtgacccagtggctgcaggagcagaaccagcagaatggagaggtgctgggctggccagagtaccagtggcacccccccctgcctgacaactacccagagggcatcgacctggtgacagatgaagctgaggccagcaagtttgtggaggagtatgacaggaccagccaggtggtgtggaatgaatatgcagaggccaactggaactacaacaccaacatcaccacagagaccagcaagatcctgctgcagaagaacatgcagatcgccaaccacaccctgaagtatggcacccaggccaggaagtttgatgtgaaccagctgcagaacaccaccatcaagaggatcatcaagaaggtgcaggacctggagcgggccgccctgcctgcccaggagctggaggagtacaacaagatcctgctggacatggagaccacctacagcgtggccaccgtgtgccaccccaacggcagctgcctgcagctggagccagacctgaccaacgtgatggccaccagcaggaaatatgaggacctgctgtgggcctgggagggctggagggacaaggccggccgggccatcctgcagttctaccccaagtatgtggagctgatcaaccaggccgcccggctgaatggctacgtggatgctggggacagctggaggtccatgtatgagacccccagcctggagcaggacctggagcggctcttccaggagctgcagcccctgtacctgaacctgcacgcctacgtgagaagagccctgcaccgccactacggggcccagcacatcaacctggagggccccatcccagcccacctgctgggcaacatgtgggcccagacctggagcaacatctatgacctggtggtgcccttccccagcgcccccagcatggacaccacagaggccatgctgaagcagggctggacccccaggaggatgttcaaggaggctgatgacttcttcaccagcctgggcctgctgcctgtgcccccagagttctggaacaagtccatgctggagaagcccacagatggccgggaggtggtgtgccacgccagcgcctgggacttctacaacgggaaggacttccgcatcaagcagtgcaccaccgtgaacctggaggacctggtggtggcccaccacgagatgggccacatccagtacttcatgcagtacaaggacctgcctgtggccctgcgggagggcgccaaccctggcttccacgaggccatcggagatgtgctggccctgtctgtgtccacccccaagcacctgcacagcctgaacctgctgagcagcgagggcggcagtgatgaacatgacatcaacttcctgatgaagatggccctggacaagatcgccttcatccccttctcctacctggtggaccagtggcgctggagggtgtttgatggcagcatcaccaaggagaactacaaccaggagtggtggagcctgcggctgaagtaccagggcctgtgcccccctgtgcccaggacccagggcgactttgatcctggggccaagttccacatccccagctctgtgccctacatccgctactttgtgtccttcatcatccagttccaccccttcagccagcacacagctgcctag

SEQ ID NO: 143584 - DNA, 1428 bp, synthetic construct
  misc_feature 1..1428: note = Description of Artificial Sequence: Synthetic coding sequence
  source 1..1428: mol_type = other DNA
atgggcgccgccagcggcagaagaggccctggcctgctgctgcccctgcccctgctgctgctgctgcccccccagcctgccctggccctggaccccggcctgcagcccggcaacttcagcgcagatgaggccggggcccagctgtttgcccagagctacaacagcagcgctgagcaggtgctcttccagagcgtggccgcctcctgggcccatgacaccaacatcacagcagaaaatgcccggcggcaggaggaggccgccctgctgagccaggagtttgctgaggcctggggccagaaggccaaggagctgtatgagcccatctggcagaacttcacagacccccagctgcggcgcatcattggagctgtgaggaccctgggcagcgccaacctgcccctggccaagaggcagcagtacaatgccctgctgagcaacatgagccgcatctacagcacagccaaggtgtgcctgcccaacaagacagccacctgctggagcctggaccctgacctgaccaacatcctggccagcagccgctcctatgccatgctgctgtttgcctgggagggctggcacaatgctgctggcatccccctgaagcccctgtatgaggacttcaccgccctgagcaatgaggcctacaagcaggacggcttcacagacacaggagcctactggaggtcctggtacaacagccccacctttgaagatgacctggagcacctgtaccagcagctggagcccctgtacctgaacctgcacgcctttgtgagaagagccctgcaccggcgctacggggaccgctacatcaacctgcggggccccatcccagcccacctgctgggggacatgtgggcccagagctgggagaacatctatgacatggtggtgcccttcccagacaagcccaacctggatgtgaccagcaccatgctgcagcagggctggaatgccacccacatgttccgggtggccgaggagttcttcaccagcctggagctgagccccatgcctcctgagttctgggagggctccatgctggagaagccagcagatggccgggaggtggtgtgccacgccagcgcctgggacttctacaacaggaaggacttccgcatcaagcagtgcaccagggtgaccatggaccagctgagcacagtgcaccacgagatgggccacatccagtactacctgcagtacaaggacctgcctgtgtccctgcggcggggggccaaccctggcttccacgaggccatcggagatgtgctggccctgtctgtgtccaccccagagcacctgcacaagattggcctgctggacagagtgaccaatgacacagagcccagcatccggggctctgtgctgctgctgcctgagaccaagcccaccctgatgctggagctgtccttcatgttccagatgtag

SEQ ID NO: 143585 - DNA, 1080 bp, synthetic construct
  misc_feature 1..1080: note = Description of Artificial Sequence: Synthetic coding sequence
  source 1..1080: mol_type = other DNA
atgatcctgaacagcagcacagaagatggcatcaagaggatccaggatgactgccccaaggccggccgccacaactacatctttgtgatgatccccaccctgtacagcatcatctttgtggtgggcatcttcggcaacagcctggtggtgattgtcatctacttctacatgaagctgaagacagtggccagcgtcttcctgctgaacctggccctggccgacctgtgcttcctgctgaccctgcccctgtgggccgtgtacacagccatggagtaccgctggcccttcggcaactacctgtgcaagatcgccagcgcctctgtgtccttcaacctgtatgcctctgtgttcctgctgacctgcctgagcattgaccgctacctggccatcgtgcaccccatgaagagccggctgcggaggaccatgctggtggccaaggtgacctgcatcatcatctggctgctggccggcctggccagcctgcctgccatcatccacagaaatgtgttcttcatcgagaacaccaacatcaccgtgtgtgccttccactatgagagccagaacagcaccctgcccatcggcctgggcctgaccaagaacatcctgggcttcctgttccccttcctgatcatcctgaccagctacaccctcatctggaaggccctgaagaaggcctatgagatccagaagaacaagcccagaaatgatgacatcttcaagatcatcatggccatcgtgctcttcttcttcttctcctggatcccccaccagatcttcaccttcctggatgtgctgatccagctgggcatcatccgggactgcagaattgctgacatcgtggacacagccatgcccatcaccatctgcatcgcctacttcaacaactgcctgaaccccctcttctacggcttcctgggcaagaagttcaagcgctacttcctgcagctgctgaagtacatcccccccaaggccaagagccacagcaacctgagcaccaagatgagcaccctgagctaccggcccagcgacaacgtgagcagcagcaccaagaagccagccccctgctttgaggtggagtag

SEQ ID NO: 143586 - DNA, 1080 bp, synthetic construct; identical to SEQ ID NO: 143585
  misc_feature 1..1080: note = Description of Artificial Sequence: Synthetic coding sequence
  source 1..1080: mol_type = other DNA

SEQ ID NO: 143587 - DNA, 1080 bp, synthetic construct; identical to SEQ ID NO: 143585
  misc_feature 1..1080: note = Description of Artificial Sequence: Synthetic coding sequence
  source 1..1080: mol_type = other DNA

SEQ ID NO: 143588 - DNA, 1080 bp, synthetic construct; identical to SEQ ID NO: 143585
  misc_feature 1..1080: note = Description of Artificial Sequence: Synthetic coding sequence
  source 1..1080: mol_type = other DNA

SEQ ID NO: 143589 - DNA, 1080 bp, synthetic construct; identical to SEQ ID NO: 143585
  misc_feature 1..1080: note = Description of Artificial Sequence: Synthetic coding sequence
  source 1..1080: mol_type = other DNA

SEQ ID NO: 143590 - DNA, 1080 bp, synthetic construct; identical to SEQ ID NO: 143585
  misc_feature 1..1080: note = Description of Artificial Sequence: Synthetic coding sequence
  source 1..1080: mol_type = other DNA

SEQ ID NO: 143591 - DNA, 1080 bp, synthetic construct; identical to SEQ ID NO: 143585
  misc_feature 1..1080: note = Description of Artificial Sequence: Synthetic coding sequence
  source 1..1080: mol_type = other DNA

SEQ ID NO: 143592 - DNA, 1080 bp, synthetic construct; identical to SEQ ID NO: 143585
  misc_feature 1..1080: note = Description of Artificial Sequence: Synthetic coding sequence
  source 1..1080: mol_type = other DNA

SEQ ID NO: 143593 - DNA, 1080 bp, synthetic construct; identical to SEQ ID NO: 143585
  misc_feature 1..1080: note = Description of Artificial Sequence: Synthetic coding sequence
  source 1..1080: mol_type = other DNA

SEQ ID NO: 143594 - DNA, 1092 bp, synthetic construct
  misc_feature 1..1092: note = Description of Artificial Sequence: Synthetic coding sequence
  source 1..1092: mol_type = other DNA
atgaagggcaacagcaccctggccaccaccagcaagaacatcaccagcggcctgcacttcggcctggtgaacatcagcggcaacaatgaaagcaccctgaactgcagccagaagcccagcgacaagcacctggatgccatccccatcctgtactacatcatctttgtgattggcttcctggtgaacatcgtggtggtgaccctcttctgctgccagaagggccccaagaaggtgagcagcatctacatcttcaacctggccgtggccgacctgctgctgctggccaccctgcccctgtgggccacctactacagctaccgctatgactggctgtttggacctgtgatgtgcaaggtgtttggcagcttcctgaccctgaacatgtttgccagcatcttcttcatcacctgcatgtctgtggaccgctaccagagcgtcatctaccccttcctgagccagaggaggaacccctggcaggccagctacatcgtgcccctggtgtggtgcatggcctgcctgagcagcctgcccaccttctacttcagagatgtgaggaccatcgagtacctgggcgtgaatgcctgcatcatggccttccccccagagaagtatgcccagtggagcgctggcatcgccctgatgaagaacatcctgggcttcatcatccccctcatcttcatcgccacctgctacttcggcatcaggaagcacctgctgaagaccaacagctatggcaagaaccgcatcacccgggaccaggtgctgaagatggctgctgctgtggtgctggccttcatcatctgctggctgcccttccacgtgctgaccttcctggatgccctggcctggatgggcgtcatcaacagctgtgaggtgattgctgtgattgacctggccctgccctttgccatcctgctgggcttcaccaacagctgtgtgaaccccttcctgtactgctttgtgggcaaccgcttccagcagaagctgcggtctgtgttccgggtgcccatcacctggctgcagggcaagcgggagagcatgagctgcaggaagagcagcagcctgcgggagatggagacctttgtgtcctag

SEQ ID NO: 143595 - DNA, 1458 bp, synthetic construct
  misc_feature 1..1458: note = Description of Artificial Sequence: Synthetic coding sequence
  source 1..1458: mol_type = other DNA
atgaggaagagggccccccagagcgagatggccccagctggggtgtccctgcgggccaccatcctgtgcctgctggcctgggccggcctggccgccggggacagagtgtacatccaccccttccacctggtgatccacaatgaaagcacctgtgagcagctggccaaggccaatgccggcaagcccaaggaccccaccttcatcccagcccccatccaggccaagaccagccctgtggatgagaaggccctgcaggaccagctggtgctggtggccgccaagctggacacagaggacaagctgcgggccgccatggtgggcatgctggccaacttcctgggcttccgcatctacggcatgcacagcgagctgtggggcgtggtgcatggagccaccgtgctgagccccacagctgtgtttggcaccctggccagcctgtacctgggcgccctggaccacacagctgaccggctgcaggccatcctgggcgtgccctggaaggacaagaactgcaccagccggctggatgcccacaaggtgctgagcgccctgcaggccgtgcagggcctgctggtggcccagggccgggctgacagccaggcccagctgctgctgagcacagtggtgggcgtcttcaccgcccctggcctgcacctgaagcagccctttgtgcagggcctggccctgtacacccctgtggtgctgcccaggagcctggacttcacagagctggatgtggccgctgagaagattgaccgcttcatgcaggccgtgacaggctggaagacaggctgcagcctgatgggcgcctctgtggacagcaccctggccttcaacacctacgtgcacttccagggcaagatgaagggcttcagcctgctggccgagccccaggagttctgggtggacaacagcacctctgtgtctgtgcccatgctgagcggcatgggcaccttccagcactggagcgacatccaggacaacttctctgtgacccaggtgcccttcacagaaagtgcctgcctgctgctgatccagccccactacgccagtgacctggacaaggtggagggcctgaccttccagcagaacagcctgaactggatgaagaagctgagccccaggaccatccacctgaccatgccccagctggtgctgcagggcagctatgacctgcaggacctgctggcccaggccgagctgcctgccatcctgcacacagagctgaacctgcagaagctgagcaatgaccgcatccgggtgggggaggtgctgaacagcatcttctttgagctggaggctgatgagcgggagcccacagagagcacccagcagctgaacaagccagaggtgctggaggtgaccctgaaccggcccttcctgtttgctgtgtatgaccagagcgccacagccctgcacttcctgggccgggtggccaaccccctgagcacagcctag

SEQ ID NO: 143596 - DNA, 1212 bp, synthetic construct
  misc_feature 1..1212: note = Description of Artificial Sequence: Synthetic coding sequence
  source 1..1212: mol_type = other DNA
atgaggaagagggccccccagagcgagatggccccagctggggtgtccctgcgggccaccatcctgtgcctgctggcctgggccggcctggccgccggggacagagtgtacatccaccccttccacctggtgatccacaatgaaagcacctgtgagcagctggccaaggccaatgccggcaagcccaaggaccccaccttcatcccagcccccatccaggccaagaccagccctgtggatgagaaggccctgcaggaccagctggtgctggtggccgccaagctggacacagaggacaagctgcgggccgccatggtgggcatgctggccaacttcctgggcttccgcatctacggcatgcacagcgagctgtggggcgtggtgcatggagccaccgtgctgagccccacagctgtgtttggcaccctggccagcctgtacctgggcgccctggaccacacagctgaccggctgcaggccatcctggatgtggccgctgagaagattgaccgcttcatgcaggccgtgacaggctggaagacaggctgcagcctgatgggcgcctctgtggacagcaccctggccttcaacacctacgtgcacttccagggcaagatgaagggcttcagcctgctggccgagccccaggagttctgggtggacaacagcacctctgtgtctgtgcccatgctgagcggcatgggcaccttccagcactggagcgacatccaggacaacttctctgtgacccaggtgcccttcacagaaagtgcctgcctgctgctgatccagccccactacgccagtgacctggacaaggtggagggcctgaccttccagcagaacagcctgaactggatgaagaagctgagccccaggaccatccacctgaccatgccccagctggtgctgcagggcagctatgacctgcaggacctgctggcccaggccgagctgcctgccatcctgcacacagagctgaacctgcagaagctgagcaatgaccgcatccgggtgggggaggtgctgaacagcatcttctttgagctggaggctgatgagcgggagcccacagagagcacccagcagctgaacaagccagaggtgctggaggtgaccctgaaccggcccttcctgtttgctgtgtatgaccagagcgccacagccctgcacttcctgggccgggtggccaaccccctgagcacagcctag

SEQ ID NO: 143597 - DNA, 1479 bp, synthetic construct
  misc_feature 1..1479: note = Description of Artificial Sequence: Synthetic coding sequence
  source 1..1479: mol_type = other DNA
atggtgaagtttcctgccctgacccactactggcccctcatccgcttcctggtgcccctgggcatcaccaacatcgccatcgactttggagagcaggccctgaacagaggaattgctgctgtgaaggaggatgctgtggagatgctggccagctatggcctggcctacagcctgatgaagttcttcaccggccccatgtctgacttcaagaatgtgggcctggtgtttgtgaacagcaagagggacaggaccaaggctgtgctgtgcatggtggtggccggggccatcgctgctgtgttccacaccctcatcgcctacagcgacctgggctactacatcatcaacaagctgcaccacgtggatgaatctgtgggcagcaagacccggcgggccttcctgtacctggccgccttccccttcatggatgccatggcctggacccatgctggcatcctgctgaagcacaagtacagcttcctggtgggctgtgccagcatcagtgatgtgattgcccaggtggtgtttgtggccatcctgctgcacagccacctggagtgccgggagcccctgctgatccccatcctgagcctgtacatgggcgccctggtgcgctgcaccaccctgtgcctgggctactacaagaacatccatgacatcatcccagacaggagcggccctgagctgggcggagatgccaccatcaggaagatgctgtccttctggtggcccctggccctgatcctggccacccagaggatcagccggcccatcgtgaacctgtttgtgtcccgggacctgggcggcagcagcgctgccacagaagctgtggccatcctgacagccacctaccctgtgggccacatgccctacggctggctgacagagatccgggctgtgtacccagcctttgacaagaacaaccccagcaacaagctggtgtccaccagcaacacagtgacagctgcccacatcaagaagttcacctttgtgtgcatggccctgagcctgaccctgtgctttgtgatgttctggaccccaaatgtgtctgagaagatcctgattgacatcattggagtggactttgcctttgctgagctgtgtgtggtgcccctgcgcatcttctccttcttccctgtgcctgtgacagtgcgggcccacctgaccggctggctgatgaccctgaagaagacctttgtgctggcccccagctctgtgctgcgcatcatcgtgctgattgccagcctggtggtgctgccctacctgggcgtgcacggggccaccctgggcgtgggcagcctgctggccggctttgtgggggagagcaccatggtggccatcgccgcctgctacgtgtacaggaagcagaagaagaagatggagaatgaaagtgccacagaaggagaggacagcgccatgacagacatgccacccacagaggaggtgacagacatcgtggagatgagggaggagaatgaatag

SEQ ID NO: 143598 - DNA, 885 bp, synthetic construct
  misc_feature 1..885: note = Description of Artificial Sequence: Synthetic coding sequence
  source 1..885: mol_type = other DNA
atgggcgccctggtgcgctgcaccaccctgtgcctgggctactacaagaacatccatgacatcatcccagacaggagcggccctgagctgggcggagatgccaccatcaggaagatgctgtccttctggtggcccctggccctgatcctggccacccagaggatcagccggcccatcgtgaacctgtttgtgtcccgggacctgggcggcagcagcgctgccacagaagctgtggccatcctgacagccacctaccctgtgggccacatgccctacggctggctgacagagatccgggctgtgtacccagcctttgacaagaacaaccccagcaacaagctggtgtccaccagcaacacagtgacagctgcccacatcaagaagttcacctttgtgtgcatggccctgagcctgaccctgtgctttgtgatgttctggaccccaaatgtgtctgagaagatcctgattgacatcattggagtggactttgcctttgctgagctgtgtgtggtgcccctgcgcatcttctccttcttccctgtgcctgtgacagtgcgggcccacctgaccggctggctgatgaccctgaagaagacctttgtgctggcccccagctctgtgctgcgcatcatcgtgctgattgccagcctggtggtgctgccctacctgggcgtgcacggggccaccctgggcgtgggcagcctgctggccggctttgtgggggagagcaccatggtggccatcgccgcctgctacgtgtacaggaagcagaagaagaagatggagaatgaaagtgccacagaaggagaggacagcgccatgacagacatgccacccacagaggaggtgacagacatcgtggagatgagggaggagaatgaatag

SEQ ID NO: 143599 - DNA, 471 bp, synthetic construct
  misc_feature 1..471: note = Description of Artificial Sequence: Synthetic coding sequence
  source 1..471: mol_type = other DNA
atgtggacctttgtgacccagctgctggtgaccctggtgctgctgtccttcttcctggtgtcctgccagaatgtgatgcacatcgtgcggggcagcctgtgctttgtgctgaagcacatccaccaggagctggacaaggagctgggggagagcgagggcctgagtgatgatgaggagaccatcagcaccagggtggtgagaagaagagtcttcctgaagggaaatgagttccagaacatccctggagagcaggtgacagaggagcagttcacagatgagcagggcaacatcgtgaccaagaagatcatcaggaaggtggtgcggcagattgacctgagcagcgcagatgctgcccaggagcacgaggaggtgacagtggagggccccctggaggaccccagcgagctggaggtggacatcgactacttcatgaagcacagcaaggaccacaccagcacccccaacccctag

SEQ ID NO: 143600 - DNA, 5694 bp, synthetic construct
  misc_feature 1..5694: note = Description of Artificial Sequence: Synthetic coding sequence
  source 1..5694: mol_type = other DNA
atggcccaggccgccaagcagctgaagaagatcaaggacatcgaggcccaggccctgcaggagcagaaggagaaggaggagagcaacaggaagagaagaaacagaagccgggacaggaagaagaaggcagatgctgccaccagcttcctgcgggccgcccggagcggcaacctggacaaggccctggaccacctgagaaatggagtggacatcaacacctgcaaccagaatggcctgaatggcctgcacctggccagcaaggagggccacgtgaagatggtggtggagctgctgcacaaggagatcatcctggagaccaccaccaagaagggcaacacagccctgcacatcgccgccctggccggccaggatgaggtggtgcgggagctggtgaactatggagccaacgtgaatgcccagagccagaagggcttcacccccctgtacatggccgcccaggagaaccacctggaggtggtgaagttcctgctggagaatggagccaaccagaatgtggccacagaagatggcttcacccccctggccgtggccctgcagcagggccatgaaaatgtggtggcccacctgatcaactacggcaccaagggcaaggtgcggctgcctgccctgcacatcgccgccagaaatgatgacaccaggacagctgctgtgctgctgcagaatgaccccaacccagatgtgctgagcaagacaggcttcacccccctgcacatcgccgcccactatgagaacctgaatgtggcccagctgctgctgaacagaggagcctctgtgaacttcaccccccagaatggcatcacccccctgcacatcgccagcagaagaggaaatgtcatcatggtgcggctgctgctggacagaggagcccagatcgagaccaagaccaaggatgagctgacccccctgcactgtgccgccagaaatggacatgtgcgcatcagcgagatcctgctggaccatggagcccccatccaggccaagaccaagaatggcctgagccccatccacatggccgcccagggcgaccacctggactgtgtgcggctgctgctgcagtatgatgctgagattgatgacatcaccctggaccacctgacccccctgcacgtggccgcccactgcggccaccaccgggtggccaaggtgctgctggacaagggggccaagcccaacagccgggccctgaatggcttcacccccctgcacatcgcctgcaagaagaaccacgtgcgggtgatggagctgctgctgaagacaggagccagcattgatgctgtgacagagagcggcctgacccccctgcacgtggccagcttcatgggccacctgcccatcgtgaagaacctgctgcagagaggagccagccccaacgtgtccaatgtgaaggtggagacccccctgcacatggccgcccgggccggccacacagaggtggccaagtacctgctgcagaacaaggccaaggtgaatgccaaggccaaggatgaccagacccccctgcactgtgccgccagaattggccacaccaacatggtgaagctgctgctggagaacaatgccaaccccaacctggccaccacagctggccacacccccctgcacatcgccgcccgggagggccacgtggagaccgtgctggccctgctggagaaggaggccagccaggcctgcatgaccaagaagggcttcacccccctgcacgtggccgccaagtatggcaaggtgcgggtggccgagctgctgctggagagagatgcccaccccaatgctgctgggaagaatggcctgacccccctgcacgtggccgtgcaccacaacaacctggacatcgtgaagctgctgctgccccggggcggcagcccccacagccctgcctggaatggctacacccccctgcacatcgccgccaagcagaaccaggtggaggtggcccggagcctgctgcagtatggaggcagcgccaatgctgagagcgtgcagggcgtgacccccctgcacctggccgcccaggagggccatgctgagatggtggccctgctgctgagcaagcaggccaatggaaacctgggcaacaagagcggcctgacccccctgcacctggtggcccaggagggccacgtgcctgtggctgatgtgctgatcaagcatggagtgatggtggatgccaccaccaggatgggctacacccccctgcacgtggccagccactacggcaacatcaagctggtgaagttcctgctgcagcaccaggctgatgtgaatgccaagaccaagctgggctacagccccctgcaccaggccgcccagcagggccacacagacatcgtgaccctgctgctgaagaatggagccagccccaatgaggtgtccagtgatggcaccacccccctggccatcgccaagaggctgggctacatctctgtgacagatgtgctgaaggtggtgacagatgagaccagctttgtgctggtgtctgacaagcacaggatgtccttccctgagaccgtggatgagatcctggatgtgtctgaagatgagggcacagcccacatcaccatcatgggagaggagctgatctccttcaaggccgagcggcgggacagcagagatgtggatgaggagaaggagctgctggactttgtgcccaagctggaccaggtggtggagagccctgccatcccccgcatcccctgtgccatgcctgagaccgtggtgatccgctctgaggagcaggagcaggccagcaaggagtatgatgaggacagcctcatccccagcagccctgccacagagaccagtgacaacatcagccctgtggccagccctgtgcacacaggcttcctggtgtccttcatggtggatgcccggggcggctccatgaggggcagccgccacaacggcctgcgggtggtgatcccccccaggacctgtgccgcccccacccgcatcacctgccgcctggtgaagccccagaagctgagcaccccaccacccctggccgaggaggagggcctggccagccgcatcatcgccctgggccccaccggggcccagttcctgagccctgtgattgtggagatcccccactttgccagccacggccgcggggaccgggagctggtggtgctgcggagtgaaaatggatctgtgtggaaggagcacaggagccgctatggagagagctacctggaccagatcctgaatggcatggatgaggagctgggcagcctggaggagctggagaagaagagggtgtgccgcatcatcaccacagacttccccctgtacttcgtcatcatgagccggctgtgccaggactatgacaccatcggccctgagggcggcagcctgaagagcaagctggtgcccctggtgcaggccaccttcccagaaaatgctgtgaccaagagggtgaagctggccctgcaggcccagcctgtgcctgatgagctggtgaccaagctgctgggcaaccaggccaccttcagccccatcgtgacagtggagcccaggaggaggaagttccaccggcccatcggcctgcgcatccccctgcccccatcctggacagacaacccccgggacagcggggagggggacaccaccagcctgcggctgctgtgcagcgtcatcggcggcacagaccaggcccagtgggaggacatcaccggcaccaccaagctggtgtatgccaatgaatgtgccaacttcaccaccaacgtgtctgcccgcttctggctgagtgactgccccaggacagctgaggccgtgaactttgccaccctgctgtacaaggagctgacagctgtgccctacatggccaagtttgtgatctttgccaagatgaatgacccccgggagggccgcctgcgctgctactgcatgacagatgacaaggtggacaagaccctggagcagcatgaaaattttgtggaggtggcccggagccgggacatcgaggtgctggagggcatgagcctgtttgctgagctgagcggcaacctggtgcctgtgaagaaggccgcccagcagaggagcttccacttccagagcttcagagaaaatcggctggccatgcctgtgaaggtgcgggacagcagccgggagcccggcggcagcctgtccttcctgaggaaggccatgaagtatgaggacacccagcacatcctgtgccacctgaacatcaccatgccaccctgtgccaagggcagcggggctgaggacagaagaaggacccccacccccctggccctgcgctacagcatcctgtctgagagcaccccaggcagcctgtctggaacagagcaggccgagatgaagatggctgtgatcagcgagcacctgggcctgtcctgggccgagctggcccgggagctgcagttctctgtggaggacatcaaccgcatccgggtggagaaccccaacagcctgctggagcagagcgtggccctgctgaacctgtgggtgatccgggagggccagaatgccaacatggagaacctgtacacagccctgcagagcattgacagaggagagatcgtgaacatgctggagggcagcggccggcagagcaggaacctgaagccagaccggcggcacacagaccgggactacagcctgagccccagccagatgaatggctacagcagcctgcaggatgagctgctgagccctgccagcctgggctgtgccctgagcagccccctgcgggctgaccagtactggaatgaggtggccgtgctggatgccatccccctggccgccacagaacatgacaccatgctggagatgtctgacatgcaggtgtggagcgctggcctgacccccagcctggtgacagctgaggacagcagcctggagtgcagcaaggccgaggacagtgatgccactggacatgagtggaagctggagggcgccctgtctgaggagccccggggccctgagctgggcagcctggagctggtggaggatgacacagtggacagtgatgccaccaacggcctgattgacctgctggagcaggaggagggccagaggtctgaggagaagctgcccggcagcaagaggcaggatgatgccactggagctggccaggacagtgaaaatgaggtgtccctggtgtctggccaccagaggggccaggcccgcatcacccacagccccaccgtgtcccaggtgacagagaggagccaggaccggctgcaggactgggatgctgatggcagcatcgtgtcctacctgcaggatgctgcccagggctcctggcaggaggaggtgacccagggcccccacagcttccagggcaccagcaccatgacagagggcctggagcccggcggcagccaggagtatgagaaggtgctggtgtctgtgtctgagcacacctggacagagcagcctgaggccgagagcagccaggccgaccgggaccggcggcagcagggccaggaggagcaggtgcaggaggccaagaacaccttcacccaggtggtgcagggcaatgagttccagaacatccctggagagcaggtgacagaggagcagttcacagatgagcagggcaacatcgtgaccaagaagatcatcaggaaggtggtgcggcagattgacctgagcagcgcagatgctgcccaggagcacgaggaggaccacaccagcacccccaacccctag

SEQ ID NO: 143601 - DNA, 5643 bp, synthetic construct
  misc_feature 1..5643: note = Description of Artificial Sequence: Synthetic coding sequence
  source 1..5643: mol_type = other DNA
atgccctacagcgtgggcttccgggaggctgatgctgccaccagcttcctgcgggccgcccggagcggcaacctggacaaggccctggaccacctgagaaatggagtggacatcaacacctgcaaccagaatggcctgaatggcctgcacctggccagcaaggagggccacgtgaagatggtggtggagctgctgcacaaggagatcatcctggagaccaccaccaagaagggcaacacagccctgcacatcgccgccctggccggccaggatgaggtggtgcgggagctggtgaactacggggccaacgtgaatgcccagagccagaagggcttcacccccctgtacatggccgcccaggagaaccacctggaggtggtgaagttcctgctggagaatggagccaaccagaatgtggccacagaagatggcttcacccccctggccgtggccctgcagcagggccatgaaaatgtggtggcccacctgatcaactacggcaccaagggcaaggtgcggctgcctgccctgcacatcgccgccagaaatgatgacaccaggacagctgctgtgctgctgcagaatgaccccaacccagatgtgctgagcaagacaggcttcacccccctgcacatcgccgcccactatgagaacctgaatgtggcccagctgctgctgaacagaggagcctctgtgaacttcaccccccagaatggcatcacccccctgcacatcgccagcagaagaggaaatgtcatcatggtgcggctgctgctggacagaggagcccagatcgagaccaagaccaaggatgagctgacccccctgcactgtgccgccagaaatggccacgtgcgcatcagcgagatcctgctggaccacggggcccccatccaggccaagaccaagaatggcctgagccccatccacatggccgcccagggcgaccacctggactgtgtgcggctgctgctgcagtatgatgctgagattgatgacatcaccctggaccacctgacccccctgcacgtggccgcccactgcggccaccaccgggtggccaaggtgctgctggacaagggggccaagcccaacagccgggccctgaatggcttcacccccctgcacatcgcctgcaagaagaaccacgtgcgggtgatggagctgctgctgaagacaggagccagcattgatgctgtgacagaaagtggcctgacccccctgcacgtggccagcttcatgggccacctgcccatcgtgaagaacctgctgcagagaggagccagccccaacgtgtccaatgtgaaggtggagacccccctgcacatggccgcccgggccggccacacagaggtggccaagtacctgctgcagaacaaggccaaggtgaatgccaaggccaaggatgaccagacccccctgcactgtgccgcccgcatcggccacaccaacatggtgaagctgctgctggagaacaatgccaaccccaacctggccaccacagctggccacacccccctgcacatcgccgcccgggagggccacgtggagaccgtgctggccctgctggagaaggaggccagccaggcctgcatgaccaagaagggcttcacccccctgcacgtggccgccaagtatggcaaggtgcgggtggccgagctgctgctggagagagatgcccaccccaatgctgctgggaagaatggcctgacccccctgcacgtggccgtgcaccacaacaacctggacatcgtgaagctgctgctgccccggggcggcagcccccacagccctgcctggaatggctacacccccctgcacatcgccgccaagcagaaccaggtggaggtggcccggagcctgctgcagtatggaggcagcgccaatgctgagagcgtgcagggcgtgacccccctgcacctggccgcccaggagggccacgccgagatggtggccctgctgctgagcaagcaggccaacggcaacctgggcaacaagagcggcctgacccccctgcacctggtggcccaggagggccacgtgcctgtggctgatgtgctgatcaagcacggcgtgatggtggatgccaccaccaggatgggctacacccccctgcacgtggccagccactacggcaacatcaagctggtgaagttcctgctgcagcaccaggctgatgtgaatgccaagaccaagctgggctacagccccctgcaccaggccgcccagcagggccacacagacatcgtgaccctgctgctgaagaatggagccagccccaatgaggtgtccagtgatggcaccacccccctggccatcgccaagaggctgggctacatctctgtgacagatgtgctgaaggtggtgacagatgagaccagctttgtgctggtgtctgacaagcacaggatgtccttccctgagaccgtggatgagatcctggatgtgtctgaagatgaaggagaggagctgatctccttcaaggccgagcggcgggacagcagagatgtggatgaggagaaggagctgctggactttgtgcccaagctggaccaggtggtggagagccctgccatcccccgcatcccctgtgccatgcctgagaccgtggtgatccgctctgaggagcaggagcaggccagcaaggagtatgatgaggacagcctcatccccagcagccctgccacagagaccagtgacaacatcagccctgtggccagccctgtgcacacaggcttcctggtgtccttcatggtggatgcccggggcggctccatgaggggcagccgccacaacggcctgcgggtggtgattcctcccaggacctgtgccgcccccacccgcatcacctgccgcctggtgaagccccagaagctgagcaccccaccacccctggccgaggaggagggcctggccagccgcatcatcgccctgggccccactggagcccagttcctgagccctgtgattgtggagatcccccactttgccagccacggccgcggggaccgggagctggtggtgctgcggagtgaaaatggatctgtgtggaaggagcacaggagccgctacggggagagctacctggaccagatcctgaatggcatggatgaggagctgggcagcctggaggagctggagaagaagagggtgtgccgcatcatcaccacagacttccccctgtactttgtgatcatgagccggctgtgccaggactatgacaccatcggccctgagggcggcagcctgaagagcaagctggtgcccctggtgcaggccaccttcccagaaaatgctgtgaccaagagggtgaagctggccctgcaggcccagcctgtgcctgatgagctggtgaccaagctgctgggcaaccaggccaccttcagccccatcgtgacagtggagcccaggaggaggaagttccaccggcccatcggcctgcgcatccccctgccccccagctggacagacaacccccgggacagcggggagggggacaccaccagcctgcggctgctgtgcagcgtgattggaggaacagaccaggcccagtgggaggacatcaccggcaccaccaagctggtgtatgccaatgaatgtgccaacttcaccaccaacgtgtctgcccgcttctggctgagtgactgccccaggacagctgaggccgtgaactttgccaccctgctgtacaaggagctgacagctgtgccctacatggccaagtttgtgatctttgccaagatgaatgacccccgggagggccgcctgcgctgctactgcatgacagatgacaaggtggacaagaccctggagcagcacgagaactttgtggaggtggcccggagccgggacatcgaggtgctggagggcatgagcctgtttgctgagctgagcggcaacctggtgcctgtgaagaaggccgcccagcagaggagcttccacttccagagcttccgggagaaccggctggccatgcctgtgaaggtgcgggacagcagccgggagcccggcggcagcctgtccttcctgaggaaggccatgaagtatgaggacacccagcacatcctgtgccacctgaacatcaccatgccaccctgtgccaagggcagcggggctgaagatagaagaaggacccccacccccctggccctgcgctacagcatcctgtctgagagcaccccaggcagcctgagcggcacagagcaggccgagatgaagatggccgtcatcagcgagcacctgggcctgtcctgggccgagctggcccgggagctgcagttctctgtggaggacatcaaccgcatccgggtggagaaccccaacagcctgctggagcagagcgtggccctgctgaacctgtgggtgatccgggagggccagaatgccaacatggagaacctgtacacagccctgcagagcattgacagaggagaaattgtgaacatgctggagggcagcggccggcagagcaggaacctgaagccagacagaagacacacagaccgggactacagcctgagccccagccagatgaatggctacagcagcctgcaggatgagctgctgagccctgccagcctgggctgtgccctgagcagccccctgcgggctgaccagtactggaatgaggtggccgtgctggatgccatccccctggccgccacagaacatgacaccatgctggagatgtctgacatgcaggtgtggagcgctggcctgacccccagcctggtgacagctgaggacagcagcctggagtgcagcaaggcagaagattctgatgccaccggccacgagtggaagctggagggcgccctgtctgaggagccccggggccctgagctgggcagcctggagctggtggaggatgacacagtggacagtgatgccaccaacggcctgattgacctgctggagcaggaggagggccagaggtctgaggagaagctgcccggcagcaagaggcaggatgatgccaccggggccggccaggacagtgaaaatgaggtgtccctggtgtctggccaccagaggggccaggcccgcatcacccacagccccaccgtgtcccaggtgacagagaggagccaggaccggctgcaggactgggatgctgatggcagcatcgtgtcctacctgcaggatgctgcccagggctcctggcaggaggaggtgacccagggcccccacagcttccagggcaccagcaccatgacagagggcctggagcccggcggcagccaggagtatgagaaggtgctggtgtctgtgtctgagcacacctggacagagcagcctgaggccgagagcagccaggccgaccgggaccggcggcagcagggccaggaggagcaggtgcaggaggccaagaacaccttcacccaggtggtgcagggcaatgagttccagaacatccctggagagcaggtgacagaggagcagttcacagatgagcagggcaacatcgtgaccaagaagatcatcaggaaggtggtgcggcagattgacctgagcagcgcagatgctgcccaggagcacgaggaggtggagctgcggggcagcggcctgcagcctgacctgattgagggcaggaaaggagcccagatcgtgaagagggccagcctgaagaggggcaagcagtag

SEQ ID NO: 143602 - DNA, 468 bp, synthetic construct
  misc_feature 1..468: note = Description of Artificial Sequence: Synthetic coding sequence
  source 1..468: mol_type = other DNA
atgtggacctttgtgacccagctgctggtgaccctggtgctgctgtccttcttcctggtgtcctgccagaatgtgatgcacatcgtgcggggcagcctgtgctttgtgctgaagcacatccaccaggagctggacaaggagctgggggagagcgagggcctgagtgatgatgaggagaccatcagcaccagggtggtgagaagaagagtcttcctgaagggaaatgagttccagaacatccctggagagcaggtgacagaggagcagttcacagatgagcagggcaacatcgtgaccaagaagatcatcaggaaggtggtgcggcagattgacctgagcagcgcagatgctgcccaggagcacgaggaggtggagctgcggggcagcggcctgcagcctgacctgattgagggcaggaagggggcccagatcgtgaagagggccagcctgaagaggggcaagcagtag

SEQ ID NO: 143603 - DNA, 5646 bp, synthetic construct
  misc_feature 1..5646: note = Description of Artificial Sequence: Synthetic coding sequence
  source 1..5646: mol_type = other DNA
atgccctacagcgtgggcttccgggaggctgatgctgccaccagcttcctgcgggccgcccggagcggcaacctggacaaggccctggaccacctgagaaatggagtggacatcaacacctgcaaccagaatggcctgaatggcctgcacctggccagcaaggagggccacgtgaagatggtggtggagctgctgcacaaggagatcatcctggagaccaccaccaagaagggcaacacagccctgcacatcgccgccctggccggccaggatgaggtggtgcgggagctggtgaactacggggccaacgtgaatgcccagagccagaagggcttcacccccctgtacatggccgcccaggagaaccacctggaggtggtgaagttcctgctggagaatggagccaaccagaatgtggccacagaagatggcttcacccccctggccgtggccctgcagcagggccatgaaaatgtggtggcccacctgatcaactacggcaccaagggcaaggtgcggctgcctgccctgcacatcgccgccagaaatgatgacaccaggacagctgctgtgctgctgcagaatgaccccaacccagatgtgctgagcaagacaggcttcacccccctgcacatcgccgcccactatgagaacctgaatgtggcccagctgctgctgaacagaggagcctctgtgaacttcaccccccagaatggcatcacccccctgcacatcgccagcagaagaggaaatgtcatcatggtgcggctgctgctggacagaggagcccagatcgagaccaagaccaaggatgagctgacccccctgcactgtgccgccagaaatggccacgtgcgcatcagcgagatcctgctggaccacggggcccccatccaggccaagaccaagaatggcctgagccccatccacatggccgcccagggcgaccacctggactgtgtgcggctgctgctgcagtatgatgctgagattgatgacatcaccctggaccacctgacccccctgcacgtggccgcccactgcggccaccaccgggtggccaaggtgctgctggacaagggggccaagcccaacagccgggccctgaatggcttcacccccctgcacatcgcctgcaagaagaaccacgtgcgggtgatggagctgctgctgaagacaggagccagcattgatgctgtgacagaaagtggcctgacccccctgcacgtggccagcttcatgggccacctgcccatcgtgaagaacctgctgcagagaggagccagccccaacgtgtccaatgtgaaggtggagacccccctgcacatggccgcccgggccggccacacagaggtggccaagtacctgctgcagaacaaggccaaggtgaatgccaaggccaaggatgaccagacccccctgcactgtgccgcccgcatcggccacaccaacatggtgaagctgctgctggagaacaatgccaaccccaacctggccaccacagctggccacacccccctgcacatcgccgcccgggagggccacgtggagaccgtgctggccctgctggagaaggaggccagccaggcctgcatgaccaagaagggcttcacccccctgcacgtggccgccaagtatggcaaggtgcgggtggccgagctgctgctggagagagatgcccaccccaatgctgctgggaagaatggcctgacccccctgcacgtggccgtgcaccacaacaacctggacatcgtgaagctgctgctgccccggggcggcagcccccacagccctgcctggaatggctacacccccctgcacatcgccgccaagcagaaccaggtggaggtggcccggagcctgctgcagtatggaggcagcgccaatgctgagagcgtgcagggcgtgacccccctgcacctggccgcccaggagggccacgccgagatggtggccctgctgctgagcaagcaggccaacggcaacctgggcaacaagagcggcctgacccccctgcacctggtggcccaggagggccacgtgcctgtggctgatgtgctgatcaagcacggcgtgatggtggatgccaccaccaggatgggctacacccccctgcacgtggccagccactacggcaacatcaagctggtgaagttcctgctgcagcaccaggctgatgtgaatgccaagaccaagctgggctacagccccctgcaccaggccgcccagcagggccacacagacatcgtgaccctgctgctgaagaatggagccagccccaatgaggtgtccagtgatggcaccacccccctggccatcgccaagaggctgggctacatctctgtgacagatgtgctgaaggtggtgacagatgagaccagctttgtgctggtgtctgacaagcacaggatgtccttccctgagaccgtggatgagatcctggatgtgtctgaagatgaaggagaggagctgatctccttcaaggccgagcggcgggacagcagagatgtggatgaggagaaggagctgctggactttgtgcccaagctggaccaggtggtggagagccctgccatcccccgcatcccctgtgccatgcctgagaccgtggtgatccgctctgaggagcaggagcaggccagcaaggagtatgatgaggacagcctcatccccagcagccctgccacagagaccagtgacaacatcagccctgtggccagccctgtgcacacaggcttcctggtgtccttcatggtggatgcccggggcggctccatgaggggcagccgccacaacggcctgcgggtggtgattcctcccaggacctgtgccgcccccacccgcatcacctgccgcctggtgaagccccagaagctgagcaccccaccacccctggccgaggaggagggcctggccagccgcatcatcgccctgggccccactggagcccagttcctgagccctgtgattgtggagatcccccactttgccagccacggccgcggggaccgggagctggtggtgctgcggagtgaaaatggatctgtgtggaaggagcacaggagccgctacggggagagctacctggaccagatcctgaatggcatggatgaggagctgggcagcctggaggagctggagaagaagagggtgtgccgcatcatcaccacagacttccccctgtactttgtgatcatgagccggctgtgccaggactatgacaccatcggccctgagggcggcagcctgaagagcaagctggtgcccctggtgcaggccaccttcccagaaaatgctgtgaccaagagggtgaagctggccctgcaggcccagcctgtgcctgatgagctggtgaccaagctgctgggcaaccaggccaccttcagccccatcgtgacagtggagcccaggaggaggaagttccaccggcccatcggcctgcgcatccccctgccccccagctggacagacaacccccgggacagcggggagggggacaccaccagcctgcggctgctgtgcagcgtgattggaggaacagaccaggcccagtgggaggacatcaccggcaccaccaagctggtgtatgccaatgaatgtgccaacttcaccaccaacgtgtctgcccgcttctggctgagtgactgccccaggacagctgaggccgtgaactttgccaccctgctgtacaaggagctgacagctgtgccctacatggccaagtttgtgatctttgccaagatgaatgacccccgggagggccgcctgcgctgctactgcatgacagatgacaaggtggacaagaccctggagcagcacgagaactttgtggaggtggcccggagccgggacatcgaggtgctggagggcatgagcctgtttgctgagctgagcggcaacctggtgcctgtgaagaaggccgcccagcagaggagcttccacttccagagcttccgggagaaccggctggccatgcctgtgaaggtgcgggacagcagccgggagcccggcggcagcctgtccttcctgaggaaggccatgaagtatgaggacacccagcacatcctgtgccacctgaacatcaccatgccaccctgtgccaagggcagcggggctgaagatagaagaaggacccccacccccctggccctgcgctacagcatcctgtctgagagcaccccaggcagcctgagcggcacagagcaggccgagatgaagatggccgtcatcagcgagcacctgggcctgtcctgggccgagctggcccgggagctgcagttctctgtggaggacatcaaccgcatccgggtggagaaccccaacagcctgctggagcagagcgtggccctgctgaacctgtgggtgatccgggagggccagaatgccaacatggagaacctgtacacagccctgcagagcattgacagaggagaaattgtgaacatgctggagggcagcggccggcagagcaggaacctgaagccagacagaagacacacagaccgggactacagcctgagccccagccagatgaatggctacagcagcctgcaggatgagctgctgagccctgccagcctgggctgtgccctgagcagccccctgcgggctgaccagtactggaatgaggtggccgtgctggatgccatccccctggccgccacagaacatgacaccatgctggagatgtctgacatgcaggtgtggagcgctggcctgacccccagcctggtgacagctgaggacagcagcctggagtgcagcaaggcagaagattctgatgccaccggccacgagtggaagctggagggcgccctgtctgaggagccccggggccctgagctgggcagcctggagctggtggaggatgacacagtggacagtgatgccaccaacggcctgattgacctgctggagcaggaggagggccagaggtctgaggagaagctgcccggcagcaagaggcaggatgatgccaccggggccggccaggacagtgaaaatgaggtgtccctggtgtctggccaccagaggggccaggcccgcatcacccacagccccaccgtgtcccaggtgacagagaggagccaggaccggctgcaggactgggatgctgatggcagcatcgtgtcctacctgcaggatgctgcccagggctcctggcaggaggaggtgacccagggcccccacagcttccagggcaccagcaccatgacagagggcctggagcccggcggcagccaggagtatgagaaggtgctggtgtctgtgtctgagcacacctggacagagcagcctgaggccgagagcagccaggccgaccgggaccggcggcagcagggccaggaggagcaggtgcaggaggccaagaacaccttcacccaggtggtgcagggcaatgagttccagaacatccctggagagcaggtgacagaggagcagttcacagatgagcagggcaacatcgtgaccaagaagatcatcaggaaggtggtgcggcagattgacctgagcagcgcagatgctgcccaggagcacgaggaggtgacagtggagggccccctggaggaccccagcgagctggaggtggacatcgactacttcatgaagcacagcaaggaccacaccagcacccccaacccctag

SEQ ID NO: 143604 - DNA, 330 bp, synthetic construct
  misc_feature 1..330: note = Description of Artificial Sequence: Synthetic coding sequence
  source 1..330: mol_type = other DNA
atgtggacctttgtgacccagctgctggtgaccctggtgctgctgtccttcttcctggtgtcctgccagaatgtgatgcacatcgtgcggggcagcctgtgctttgtgctgaagcacatccaccaggagctggacaaggagctgggggagagcgagggcctgagtgatgatgaggagaccatcagcaccagggtggtgagaagaagagtcttcctgaagggaaatgagttccagaacatccctggagagcaggtgacagaggagcagttcacagatgagcagggcaacatcgtgaccaagaaggaccacaccagcacccccaacccctag

SEQ ID NO: 143605 - DNA, 5577 bp, synthetic construct
  misc_feature 1..5577: note = Description of Artificial Sequence: Synthetic coding sequence
  source 1..5577: mol_type = other DNA
atgccctacagcgtgggcttccgggaggctgatgctgccaccagcttcctgcgggccgcccggagcggcaacctggacaaggccctggaccacctgagaaatggagtggacatcaacacctgcaaccagaatggcctgaatggcctgcacctggccagcaaggagggccacgtgaagatggtggtggagctgctgcacaaggagatcatcctggagaccaccaccaagaagggcaacacagccctgcacatcgccgccctggccggccaggatgaggtggtgcgggagctggtgaactacggggccaacgtgaatgcccagagccagaagggcttcacccccctgtacatggccgcccaggagaaccacctggaggtggtgaagttcctgctggagaatggagccaaccagaatgtggccacagaagatggcttcacccccctggccgtggccctgcagcagggccatgaaaatgtggtggcccacctgatcaactacggcaccaagggcaaggtgcggctgcctgccctgcacatcgccgccagaaatgatgacaccaggacagctgctgtgctgctgcagaatgaccccaacccagatgtgctgagcaagacaggcttcacccccctgcacatcgccgcccactatgagaacctgaatgtggcccagctgctgctgaacagaggagcctctgtgaacttcaccccccagaatggcatcacccccctgcacatcgccagcagaagaggaaatgtcatcatggtgcggctgctgctggacagaggagcccagatcgagaccaagaccaaggatgagctgacccccctgcactgtgccgccagaaatggccacgtgcgcatcagcgagatcctgctggaccacggggcccccatccaggccaagaccaagaatggcctgagccccatccacatggccgcccagggcgaccacctggactgtgtgcggctgctgctgcagtatgatgctgagattgatgacatcaccctggaccacctgacccccctgcacgtggccgcccactgcggccaccaccgggtggccaaggtgctgctggacaagggggccaagcccaacagccgggccctgaatggcttcacccccctgcacatcgcctgcaagaagaaccacgtgcgggtgatggagctgctgctgaagacaggagccagcattgatgctgtgacagaaagtggcctgacccccctgcacgtggccagcttcatgggccacctgcccatcgtgaagaacctgctgcagagaggagccagccccaacgtgtccaatgtgaaggtggagacccccctgcacatggccgcccgggccggccacacagaggtggccaagtacctgctgcagaacaaggccaaggtgaatgccaaggccaaggatgaccagacccccctgcactgtgccgcccgcatcggccacaccaacatggtgaagctgctgctggagaacaatgccaaccccaacctggccaccacagctggccacacccccctgcacatcgccgcccgggagggccacgtggagaccgtgctggccctgctggagaaggaggccagccaggcctgcatgaccaagaagggcttcacccccctgcacgtggccgccaagtatggcaaggtgcgggtggccgagctgctgctggagagagatgcccaccccaatgctgctgggaagaatggcctgacccccctgcacgtggccgtgcaccacaacaacctggacatcgtgaagctgctgctgccccggggcggcagcccccacagccctgcctggaatggctacacccccctgcacatcgccgccaagcagaaccaggtggaggtggcccggagcctgctgcagtatggaggcagcgccaatgctgagagcgtgcagggcgtgacccccctgcacctggccgcccaggagggccacgccgagatggtggccctgctgctgagcaagcaggccaacggcaacctgggcaacaagagcggcctgacccccctgcacctggtggcccaggagggccacgtgcctgtggctgatgtgctgatcaagcacggcgtgatggtggatgccaccaccaggatgggctacacccccctgcacgtggccagccactacggcaacatcaagctggtgaagttcctgctgcagcaccaggctgatgtgaatgccaagaccaagctgggctacagccccctgcaccaggccgcccagcagggccacacagacatcgtgaccctgctgctgaagaatggagccagccccaatgaggtgtccagtgatggcaccacccccctggccatcgccaagaggctgggctacatctctgtgacagatgtgctgaaggtggtgacagatgagaccagctttgtgctggtgtctgacaagcacaggatgtccttccctgagaccgtggatgagatcctggatgtgtctgaagatgaaggagaggagctgatctccttcaaggccgagcggcgggacagcagagatgtggatgaggagaaggagctgctggactttgtgcccaagctggaccaggtggtggagagccctgccatcccccgcatcccctgtgccatgcctgagaccgtggtgatccgctctgaggagcaggagcaggccagcaaggagtatgatgaggacagcctcatccccagcagccctgccacagagaccagtgacaacatcagccctgtggccagccctgtgcacacaggcttcctggtgtccttcatggtggatgcccggggcggctccatgaggggcagccgccacaacggcctgcgggtggtgattcctcccaggacctgtgccgcccccacccgcatcacctgccgcctggtgaagccccagaagctgagcaccccaccacccctggccgaggaggagggcctggccagccgcatcatcgccctgggccccactggagcccagttcctgagccctgtgattgtggagatcccccactttgccagccacggccgcggggaccgggagctggtggtgctgcggagtgaaaatggatctgtgtggaaggagcacaggagccgctacggggagagctacctggaccagatcctgaatggcatggatgaggagctgggcagcctggaggagctggagaagaagagggtgtgccgcatcatcaccacagacttccccctgtactttgtgatcatgagccggctgtgccaggactatgacaccatcggccctgagggcggcagcctgaagagcaagctggtgcccctggtgcaggccaccttcccagaaaatgctgtgaccaagagggtgaagctggccctgcaggcccagcctgtgcctgatgagctggtgaccaagctgctgggcaaccaggccaccttcagccccatcgtgacagtggagcccaggaggaggaagttccaccggcccatcggcctgcgcatccccctgccccccagctggacagacaacccccgggacagcggggagggggacaccaccagcctgcggctgctgtgcagcgtgattggaggaacagaccaggcccagtgggaggacatcaccggcaccaccaagctggtgtatgccaatgaatgtgccaacttcaccaccaacgtgtctgcccgcttctggctgagtgactgccccaggacagctgaggccgtgaactttgccaccctgctgtacaaggagctgacagctgtgccctacatggccaagtttgtgatctttgccaagatgaatgacccccgggagggccgcctgcgctgctactgcatgacagatgacaaggtggacaagaccctggagcagcacgagaactttgtggaggtggcccggagccgggacatcgaggtgctggagggcatgagcctgtttgctgagctgagcggcaacctggtgcctgtgaagaaggccgcccagcagaggagcttccacttccagagcttccgggagaaccggctggccatgcctgtgaaggtgcgggacagcagccgggagcccggcggcagcctgtccttcctgaggaaggccatgaagtatgaggacacccagcacatcctgtgccacctgaacatcaccatgccaccctgtgccaagggcagcggggctgaagatagaagaaggacccccacccccctggccctgcgctacagcatcctgtctgagagcaccccaggcagcctgagcggcacagagcaggccgagatgaagatggccgtcatcagcgagcacctgggcctgtcctgggccgagctggcccgggagctgcagttctctgtggaggacatcaaccgcatccgggtggagaaccccaacagcctgctggagcagagcgtggccctgctgaacctgtgggtgatccgggagggccagaatgccaacatggagaacctgtacacagccctgcagagcattgacagaggagaaattgtgaacatgctggagggcagcggccggcagagcaggaacctgaagccagacagaagacacacagaccgggactacagcctgagccccagccagatgaatggctacagcagcctgcaggatgagctgctgagccctgccagcctgggctgtgccctgagcagccccctgcgggctgaccagtactggaatgaggtggccgtgctggatgccatccccctggccgccacagaacatgacaccatgctggagatgtctgacatgcaggtgtggagcgctggcctgacccccagcctggtgacagctgaggacagcagcctggagtgcagcaaggcagaagattctgatgccaccggccacgagtggaagctggagggcgccctgtctgaggagccccggggccctgagctgggcagcctggagctggtggaggatgacacagtggacagtgatgccaccaacggcctgattgacctgctggagcaggaggagggccagaggtctgaggagaagctgcccggcagcaagaggcaggatgatgccaccggggccggccaggacagtgaaaatgaggtgtccctggtgtctggccaccagaggggccaggcccgcatcacccacagccccaccgtgtcccaggtgacagagaggagccaggaccggctgcaggactgggatgctgatggcagcatcgtgtcctacctgcaggatgctgcccagggctcctggcaggaggaggtgacccagggcccccacagcttccagggcaccagcaccatgacagagggcctggagcccggcggcagccaggagtatgagaaggtgctggtgtctgtgtctgagcacacctggacagagcagcctgaggccgagagcagccaggccgaccgggaccggcggcagcagggccaggaggagcaggtgcaggaggccaagaacaccttcacccaggtggtgcagggcaatgagttccagaacatccctggagagcaggtgacagaggagcagttcacagatgagcagggcaacatcgtgaccaagaaggtggagctgcggggcagcggcctgcagcctgacctgattgagggcaggaaaggagcccagatcgtgaagagggccagcctgaagaggggcaagcagtag

SEQ ID NO: 143606 - DNA, 4560 bp, synthetic construct
  misc_feature 1..4560: note = Description of Artificial Sequence: Synthetic coding sequence
  source 1..4560: mol_type = other DNA
atgccctacagcgtgggcttccgggaggctgatgctgccaccagcttcctgcgggccgcccggagcggcaacctggacaaggccctggaccacctgagaaatggagtggacatcaacacctgcaaccagaatggcctgaatggcctgcacctggccagcaaggagggccacgtgaagatggtggtggagctgctgcacaaggagatcatcctggagaccaccaccaagaagggcaacacagccctgcacatcgccgccctggccggccaggatgaggtggtgcgggagctggtgaactacggggccaacgtgaatgcccagagccagaagggcttcacccccctgtacatggccgcccaggagaaccacctggaggtggtgaagttcctgctggagaatggagccaaccagaatgtggccacagaagatggcttcacccccctggccgtggccctgcagcagggccatgaaaatgtggtggcccacctgatcaactacggcaccaagggcaaggtgcggctgcctgccctgcacatcgccgccagaaatgatgacaccaggacagctgctgtgctgctgcagaatgaccccaacccagatgtgctgagcaagacaggcttcacccccctgcacatcgccgcccactatgagaacctgaatgtggcccagctgctgctgaacagaggagcctctgtgaacttcaccccccagaatggcatcacccccctgcacatcgccagcagaagaggaaatgtcatcatggtgcggctgctgctggacagaggagcccagatcgagaccaagaccaaggatgagctgacccccctgcactgtgccgccagaaatggccacgtgcgcatcagcgagatcctgctggaccacggggcccccatccaggccaagaccaagaatggcctgagccccatccacatggccgcccagggcgaccacctggactgtgtgcggctgctgctgcagtatgatgctgagattgatgacatcaccctggaccacctgacccccctgcacgtggccgcccactgcggccaccaccgggtggccaaggtgctgctggacaagggggccaagcccaacagccgggccctgaatggcttcacccccctgcacatcgcctgcaagaagaaccacgtgcgggtgatggagctgctgctgaagacaggagccagcattgatgctgtgacagaaagtggcctgacccccctgcacgtggccagcttcatgggccacctgcccatcgtgaagaacctgctgcagagaggagccagccccaacgtgtccaatgtgaaggtggagacccccctgcacatggccgcccgggccggccacacagaggtggccaagtacctgctgcagaacaaggccaaggtgaatgccaaggccaaggatgaccagacccccctgcactgtgccgcccgcatcggccacaccaacatggtgaagctgctgctggagaacaatgccaaccccaacctggccaccacagctggccacacccccctgcacatcgccgcccgggagggccacgtggagaccgtgctggccctgctggagaaggaggccagccaggcctgcatgaccaagaagggcttcacccccctgcacgtggccgccaagtatggcaaggtgcgggtggccgagctgctgctggagagagatgcccaccccaatgctgctgggaagaatggcctgacccccctgcacgtggccgtgcaccacaacaacctggacatcgtgaagctgctgctgccccggggcggcagcccccacagccctgcctggaatggctacacccccctgcacatcgccgccaagcagaaccaggtggaggtggcccggagcctgctgcagtatggaggcagcgccaatgctgagagcgtgcagggcgtgacccccctgcacctggccgcccaggagggccacgccgagatggtggccctgctgctgagcaagcaggccaacggcaacctgggcaacaagagcggcctgacccccctgcacctggtggcccaggagggccacgtgcctgtggctgatgtgctgatcaagcacggcgtgatggtggatgccaccaccaggatgggctacacccccctgcacgtggccagccactacggcaacatcaagctggtgaagttcctgctgcagcaccaggctgatgtgaatgccaagaccaagctgggctacagccccctgcaccaggccgcccagcagggccacacagacatcgtgaccctgctgctgaagaatggagccagccccaatgaggtgtccagtgatggcaccacccccctggccatcgccaagaggctgggctacatctctgtgacagatgtgctgaaggtggtgacagatgagaccagctttgtgctggtgtctgacaagcacaggatgtccttccctgagaccgtggatgagatcctggatgtgtctgaagatgaaggagaggagctgatctccttcaaggccgagcggcgggacagcagagatgtggatgaggagaaggagctgctggactttgtgcccaagctggaccaggtggtggagagccctgccatcccccgcatcccctgtgccatgcctgagaccgtggtgatccgctctgaggagcaggagcaggccagcaaggagtatgatgaggacagcctcatccccagcagccctgccacagagaccagtgacaacatcagccctgtggccagccctgtgcacacaggcttcctggtgtccttcatggtggatgcccggggcggctccatgaggggcagccgccacaacggcctgcgggtggtgattcctcccaggacctgtgccgcccccacccgcatcacctgccgcctggtgaagccccagaagctgagcaccccaccacccctggccgaggaggagggcctggccagccgcatcatcgccctgggccccactggagcccagttcctgagccctgtgattgtggagatcccccactttgccagccacggccgcggggaccgggagctggtggtgctgcggagtgaaaatggatctgtgtggaaggagcacaggagccgctacggggagagctacctggaccagatcctgaatggcatggatgaggagctgggcagcctggaggagctggagaagaagagggtgtgccgcatcatcaccacagacttccccctgtactttgtgatcatgagccggctgtgccaggactatgacaccatcggccctgagggcggcagcctgaagagcaagctggtgcccctggtgcaggccaccttcccagaaaatgctgtgaccaagagggtgaagctggccctgcaggcccagcctgtgcctgatgagctggtgaccaagctgctgggcaaccaggccaccttcagccccatcgtgacagtggagcccaggaggaggaagttccaccggcccatcggcctgcgcatccccctgccccccagctggacagacaacccccgggacagcggggagggggacaccaccagcctgcggctgctgtgcagcgtgattggaggaacagaccaggcccagtgggaggacatcaccggcaccaccaagctggtgtatgccaatgaatgtgccaacttcaccaccaacgtgtctgcccgcttctggctgagtgactgccccaggacagctgaggccgtgaactttgccaccctgctgtacaaggagctgacagctgtgccctacatggccaagtttgtgatctttgccaagatgaatgacccccgggagggccgcctgcgctgctactgcatgacagatgacaaggtggacaagaccctggagcagcacgagaactttgtggaggtggcccggagccgggacatcgaggtgctggagggcatgagcctgtttgctgagctgagcggcaacctggtgcctgtgaagaaggccgcccagcagaggagcttccacttccagagcttccgggagaaccggctggccatgcctgtgaaggtgcgggacagcagccgggagcccggcggcagcctgtccttcctgaggaaggccatgaagtatgaggacacccagcacatcctgtgccacctgaacatcaccatgccaccctgtgccaagggcagcggggctgaagatagaagaaggacccccacccccctggccctgcgctacagcatcctgtctgagagcaccccaggcagcctgagcggcacagagcaggccgagatgaagatggccgtcatcagcgagcacctgggcctgtcctgggccgagctggcccgggagctgcagttctctgtggaggacatcaaccgcatccgggtggagaaccccaacagcctgctggagcagagcgtggccctgctgaacctgtgggtgatccgggagggccagaatgccaacatggagaacctgtacacagccctgcagagcattgacagaggagaaattgtgaacatgctggagggcagcggccggcagagcaggaacctgaagccagacagaagacacacagaccgggactacagcctgagccccagccagatgaatggcatcagcaccaacaacccctag

SEQ ID NO: 143607 - DNA, 5505 bp, synthetic construct
  misc_feature 1..5505: note = Description of Artificial Sequence: Synthetic coding sequence
  source 1..5505: mol_type = other DNA
atgccctacagcgtgggcttccgggaggctgatgctgccaccagcttcctgcgggccgcccggagcggcaacctggacaaggccctggaccacctgagaaatggagtggacatcaacacctgcaaccagaatggcctgaatggcctgcacctggccagcaaggagggccacgtgaagatggtggtggagctgctgcacaaggagatcatcctggagaccaccaccaagaagggcaacacagccctgcacatcgccgccctggccggccaggatgaggtggtgcgggagctggtgaactacggggccaacgtgaatgcccagagccagaagggcttcacccccctgtacatggccgcccaggagaaccacctggaggtggtgaagttcctgctggagaatggagccaaccagaatgtggccacagaagatggcttcacccccctggccgtggccctgcagcagggccatgaaaatgtggtggcccacctgatcaactacggcaccaagggcaaggtgcggctgcctgccctgcacatcgccgccagaaatgatgacaccaggacagctgctgtgctgctgcagaatgaccccaacccagatgtgctgagcaagacaggcttcacccccctgcacatcgccgcccactatgagaacctgaatgtggcccagctgctgctgaacagaggagcctctgtgaacttcaccccccagaatggcatcacccccctgcacatcgccagcagaagaggaaatgtcatcatggtgcggctgctgctggacagaggagcccagatcgagaccaagaccaaggatgagctgacccccctgcactgtgccgccagaaatggccacgtgcgcatcagcgagatcctgctggaccacggggcccccatccaggccaagaccaagaatggcctgagccccatccacatggccgcccagggcgaccacctggactgtgtgcggctgctgctgcagtatgatgctgagattgatgacatcaccctggaccacctgacccccctgcacgtggccgcccactgcggccaccaccgggtggccaaggtgctgctggacaagggggccaagcccaacagccgggccctgaatggcttcacccccctgcacatcgcctgcaagaagaaccacgtgcgggtgatggagctgctgctgaagacaggagccagcattgatgctgtgacagaaagtggcctgacccccctgcacgtggccagcttcatgggccacctgcccatcgtgaagaacctgctgcagagaggagccagccccaacgtgtccaatgtgaaggtggagacccccctgcacatggccgcccgggccggccacacagaggtggccaagtacctgctgcagaacaaggccaaggtgaatgccaaggccaaggatgaccagacccccctgcactgtgccgcccgcatcggccacaccaacatggtgaagctgctgctggagaacaatgccaaccccaacctggccaccacagctggccacacccccctgcacatcgccgcccgggagggccacgtggagaccgtgctggccctgctggagaaggaggccagccaggcctgcatgaccaagaagggcttcacccccctgcacgtggccgccaagtatggcaaggtgcgggtggccgagctgctgctggagagagatgcccaccccaatgctgctgggaagaatggcctgacccccctgcacgtggccgtgcaccacaacaacctggacatcgtgaagctgctgctgccccggggcggcagcccccacagccctgcctggaatggctacacccccctgcacatcgccgccaagcagaaccaggtggaggtggcccggagcctgctgcagtatggaggcagcgccaatgctgagagcgtgcagggcgtgacccccctgcacctggccgcccaggagggccacgccgagatggtggccctgctgctgagcaagcaggccaacggcaacctgggcaacaagagcggcctgacccccctgcacctggtggcccaggagggccacgtgcctgtggctgatgtgctgatcaagcacggcgtgatggtggatgccaccaccaggatgggctacacccccctgcacgtggccagccactacggcaacatcaagctggtgaagttcctgctgcagcaccaggctgatgtgaatgccaagaccaagctgggctacagccccctgcaccaggccgcccagcagggccacacagacatcgtgaccctgctgctgaagaatggagccagccccaatgaggtgtccagtgatggcaccacccccctggccatcgccaagaggctgggctacatctctgtgacagatgtgctgaaggtggtgacagatgagaccagctttgtgctggtgtctgacaagcacaggatgtccttccctgagaccgtggatgagatcctggatgtgtctgaagatgaaggagaggagctgatctccttcaaggccgagcggcgggacagcagagatgtggatgaggagaaggagctgctggactttgtgcccaagctggaccaggtggtggagagccctgccatcccccgcatcccctgtgccatgcctgagaccgtggtgatccgctctgaggagcaggagcaggccagcaaggagtatgatgaggacagcctcatccccagcagccctgccacagagaccagtgacaacatcagccctgtggccagccctgtgcacacaggcttcctggtgtccttcatggtggatgcccggggcggctccatgaggggcagccgccacaacggcctgcgggtggtgattcctcccaggacctgtgccgcccccacccgcatcacctgccgcctggtgaagccccagaagctgagcaccccaccacccctggccgaggaggagggcctggccagccgcatcatcgccctgggccccactggagcccagttcctgagccctgtgattgtggagatcccccactttgccagccacggccgcggggaccgggagctggtggtgctgcggagtgaaaatggatctgtgtggaaggagcacaggagccgctacggggagagctacctggaccagatcctgaatggcatggatgaggagctgggcagcctggaggagctggagaagaagagggtgtgccgcatcatcaccacagacttccccctgtactttgtgatcatgagccggctgtgccaggactatgacaccatcggccctgagggcggcagcctgaagagcaagctggtgcccctggtgcaggccaccttcccagaaaatgctgtgaccaagagggtgaagctggccctgcaggcccagcctgtgcctgatgagctggtgaccaagctgctgggcaaccaggccaccttcagccccatcgtgacagtggagcccaggaggaggaagttccaccggcccatcggcctgcgcatccccctgccccccagctggacagacaacccccgggacagcggggagggggacaccaccagcctgcggctgctgtgcagcgtgattggaggaacagaccaggcccagtgggaggacatcaccggcaccaccaagctggtgtatgccaatgaatgtgccaacttcaccaccaacgtgtctgcccgcttctggctgagtgactgccccaggacagctgaggccgtgaactttgccaccctgctgtacaaggagctgacagctgtgccctacatggccaagtttgtgatctttgccaagatgaatgacccccgggagggccgcctgcgctgctactgcatgacagatgacaaggtggacaagaccctggagcagcacgagaactttgtggaggtggcccggagccgggacatcgaggtgctggagggcatgagcctgtttgctgagctgagcggcaacctggtgcctgtgaagaaggccgcccagcagaggagcttccacttccagagcttccgggagaaccggctggccatgcctgtgaaggtgcgggacagcagccgggagcccggcggcagcctgtccttcctgaggaaggccatgaagtatgaggacacccagcacatcctgtgccacctgaacatcaccatgccaccctgtgccaagggcagcggggctgaagatagaagaaggacccccacccccctggccctgcgctacagcatcctgtctgagagcaccccaggcagcctgagcggcacagagcaggccgagatgaagatggccgtcatcagcgagcacctgggcctgtcctgggccgagctggcccgggagctgcagttctctgtggaggacatcaaccgcatccgggtggagaaccccaacagcctgctggagcagagcgtggccctgctgaacctgtgggtgatccgggagggccagaatgccaacatggagaacctgtacacagccctgcagagcattgacagaggagaaattgtgaacatgctggagggcagcggccggcagagcaggaacctgaagccagacagaagacacacagaccgggactacagcctgagccccagccagatgaatggctacagcagcctgcaggatgagctgctgagccctgccagcctgggctgtgccctgagcagccccctgcgggctgaccagtactggaatgaggtggccgtgctggatgccatccccctggccgccacagaacatgacaccatgctggagatgtctgacatgcaggtgtggagcgctggcctgacccccagcctggtgacagctgaggacagcagcctggagtgcagcaaggcagaagattctgatgccaccggccacgagtggaagctggagggcgccctgtctgaggagccccggggccctgagctgggcagcctggagctggtggaggatgacacagtggacagtgatgccaccaacggcctgattgacctgctggagcaggaggagggccagaggtctgaggagaagctgcccggcagcaagaggcaggatgatgccaccggggccggccaggacagtgaaaatgaggtgtccctggtgtctggccaccagaggggccaggcccgcatcacccacagccccaccgtgtcccaggtgacagagaggagccaggaccggctgcaggactgggatgctgatggcagcatcgtgtcctacctgcaggatgctgcccagggctcctggcaggaggaggtgacccagggcccccacagcttccagggcaccagcaccatgacagagggcctggagcccggcggcagccaggagtatgagaaggtgctggtgtctgtgtctgagcacacctggacagagcagcctgaggccgagagcagccaggccgaccgggaccggcggcagcagggccaggaggagcaggtgcaggaggccaagaacaccttcacccaggtggtgcagggcaatgagttccagaacatccctggagagcaggtgacagaggagcagttcacagatgagcagggcaacatcgtgaccaagaaggaccacaccagcacccccaacccctag

SEQ ID NO: 143608 - DNA, 5718 bp, synthetic construct
  misc_feature 1..5718: note = Description of Artificial Sequence: Synthetic coding sequence
  source 1..5718: mol_type = other DNA
atgccctacagcgtgggcttccgggaggctgatgctgccaccagcttcctgcgggccgcccggagcggcaacctggacaaggccctggaccacctgagaaatggagtggacatcaacacctgcaaccagaatggcctgaatggcctgcacctggccagcaaggagggccacgtgaagatggtggtggagctgctgcacaaggagatcatcctggagaccaccaccaagaagggcaacacagccctgcacatcgccgccctggccggccaggatgaggtggtgcgggagctggtgaactacggggccaacgtgaatgcccagagccagaagggcttcacccccctgtacatggccgcccaggagaaccacctggaggtggtgaagttcctgctggagaatggagccaaccagaatgtggccacagaagatggcttcacccccctggccgtggccctgcagcagggccatgaaaatgtggtggcccacctgatcaactacggcaccaagggcaaggtgcggctgcctgccctgcacatcgccgccagaaatgatgacaccaggacagctgctgtgctgctgcagaatgaccccaacccagatgtgctgagcaagacaggcttcacccccctgcacatcgccgcccactatgagaacctgaatgtggcccagctgctgctgaacagaggagcctctgtgaacttcaccccccagaatggcatcacccccctgcacatcgccagcagaagaggaaatgtcatcatggtgcggctgctgctggacagaggagcccagatcgagaccaagaccaaggatgagctgacccccctgcactgtgccgccagaaatggccacgtgcgcatcagcgagatcctgctggaccacggggcccccatccaggccaagaccaagaatggcctgagccccatccacatggccgcccagggcgaccacctggactgtgtgcggctgctgctgcagtatgatgctgagattgatgacatcaccctggaccacctgacccccctgcacgtggccgcccactgcggccaccaccgggtggccaaggtgctgctggacaagggggccaagcccaacagccgggccctgaatggcttcacccccctgcacatcgcctgcaagaagaaccacgtgcgggtgatggagctgctgctgaagacaggagccagcattgatgctgtgacagaaagtggcctgacccccctgcacgtggccagcttcatgggccacctgcccatcgtgaagaacctgctgcagagaggagccagccccaacgtgtccaatgtgaaggtggagacccccctgcacatggccgcccgggccggccacacagaggtggccaagtacctgctgcagaacaaggccaaggtgaatgccaaggccaaggatgaccagacccccctgcactgtgccgcccgcatcggccacaccaacatggtgaagctgctgctggagaacaatgccaaccccaacctggccaccacagctggccacacccccctgcacatcgccgcccgggagggccacgtggagaccgtgctggccctgctggagaaggaggccagccaggcctgcatgaccaagaagggcttcacccccctgcacgtggccgccaagtatggcaaggtgcgggtggccgagctgctgctggagagagatgcccaccccaatgctgctgggaagaatggcctgacccccctgcacgtggccgtgcaccacaacaacctggacatcgtgaagctgctgctgccccggggcggcagcccccacagccctgcctggaatggctacacccccctgcacatcgccgccaagcagaaccaggtggaggtggcccggagcctgctgcagtatggaggcagcgccaatgctgagagcgtgcagggcgtgacccccctgcacctggccgcccaggagggccacgccgagatggtggccctgctgctgagcaagcaggccaacggcaacctgggcaacaagagcggcctgacccccctgcacctggtggcccaggagggccacgtgcctgtggctgatgtgctgatcaagcacggcgtgatggtggatgccaccaccaggatgggctacacccccctgcacgtggccagccactacggcaacatcaagctggtgaagttcctgctgcagcaccaggctgatgtgaatgccaagaccaagctgggctacagccccctgcaccaggccgcccagcagggccacacagacatcgtgaccctgctgctgaagaatggagccagccccaatgaggtgtccagtgatggcaccacccccctggccatcgccaagaggctgggctacatctctgtgacagatgtgctgaaggtggtgacagatgagaccagctttgtgctggtgtctgacaagcacaggatgtccttccctgagaccgtggatgagatcctggatgtgtctgaagatgaaggagaggagctgatctccttcaaggccgagcggcgggacagcagagatgtggatgaggagaaggagctgctggactttgtgcccaagctggaccaggtggtggagagccctgccatcccccgcatcccctgtgccatgcctgagaccgtggtgatccgctctgaggagcaggagcaggccagcaaggagtatgatgaggacagcctcatccccagcagccctgccacagagaccagtgacaacatcagccctgtggccagccctgtgcacacaggcttcctggtgtccttcatggtggatgcccggggcggctccatgaggggcagccgccacaacggcctgcgggtggtgattcctcccaggacctgtgccgcccccacccgcatcacctgccgcctggtgaagccccagaagctgagcaccccaccacccctggccgaggaggagggcctggccagccgcatcatcgccctgggccccactggagcccagttcctgagccctgtgattgtggagatcccccactttgccagccacggccgcggggaccgggagctggtggtgctgcggagtgaaaatggatctgtgtggaaggagcacaggagccgctacggggagagctacctggaccagatcctgaatggcatggatgaggagctgggcagcctggaggagctggagaagaagagggtgtgccgcatcatcaccacagacttccccctgtactttgtgatcatgagccggctgtgccaggactatgacaccatcggccctgagggcggcagcctgaagagcaagctggtgcccctggtgcaggccaccttcccagaaaatgctgtgaccaagagggtgaagctggccctgcaggcccagcctgtgcctgatgagctggtgaccaagctgctgggcaaccaggccaccttcagccccatcgtgacagtggagcccaggaggaggaagttccaccggcccatcggcctgcgcatccccctgccccccagctggacagacaacccccgggacagcggggagggggacaccaccagcctgcggctgctgtgcagcgtgattggaggaacagaccaggcccagtgggaggacatcaccggcaccaccaagctggtgtatgccaatgaatgtgccaacttcaccaccaacgtgtctgcccgcttctggctgagtgactgccccaggacagctgaggccgtgaactttgccaccctgctgtacaaggagctgacagctgtgccctacatggccaagtttgtgatctttgccaagatgaatgacccccgggagggccgcctgcgctgctactgcatgacagatgacaaggtggacaagaccctggagcagcacgagaactttgtggaggtggcccggagccgggacatcgaggtgctggagggcatgagcctgtttgctgagctgagcggcaacctggtgcctgtgaagaaggccgcccagcagaggagcttccacttccagagcttccgggagaaccggctggccatgcctgtgaaggtgcgggacagcagccgggagcccggcggcagcctgtccttcctgaggaaggccatgaagtatgaggacacccagcacatcctgtgccacctgaacatcaccatgccaccctgtgccaagggcagcggggctgaagatagaagaaggacccccacccccctggccctgcgctacagcatcctgtctgagagcaccccaggcagcctgagcggcacagagcaggccgagatgaagatggccgtcatcagcgagcacctgggcctgtcctgggccgagctggcccgggagctgcagttctctgtggaggacatcaaccgcatccgggtggagaaccccaacagcctgctggagcagagcgtggccctgctgaacctgtgggtgatccgggagggccagaatgccaacatggagaacctgtacacagccctgcagagcattgacagaggagaaattgtgaacatgctggagggcagcggccggcagagcaggaacctgaagccagacagaagacacacagaccgggactacagcctgagccccagccagatgaatggctacagcagcctgcaggatgagctgctgagccctgccagcctgggctgtgccctgagcagccccctgcgggctgaccagtactggaatgaggtggccgtgctggatgccatccccctggccgccacagaacatgacaccatgctggagatgtctgacatgcaggtgtggagcgctggcctgacccccagcctggtgacagctgaggacagcagcctggagtgcagcaaggcagaagattctgatgccaccggccacgagtggaagctggagggcgccctgtctgaggagccccggggccctgagctgggcagcctggagctggtggaggatgacacagtggacagtgatgccaccaacggcctgattgacctgctggagcaggaggagggccagaggtctgaggagaagctgcccggcagcaagaggcaggatgatgccaccggggccggccaggacagtgaaaatgaggtgtccctggtgtctggccaccagaggggccaggcccgcatcacccacagccccaccgtgtcccaggtgacagagaggagccaggaccggctgcaggactgggatgctgatggcagcatcgtgtcctacctgcaggatgctgcccagggctcctggcaggaggaggtgacccagggcccccacagcttccagggcaccagcaccatgacagagggcctggagcccggcggcagccaggagtatgagaaggtgctggtgtctgtgtctgagcacacctggacagagcagcctgaggccgagagcagccaggccgaccgggaccggcggcagcagggccaggaggagcaggtgcaggaggccaagaacaccttcacccaggtggtgcagggcaatgagttccagaacatccctggagagcaggtgacagaggagcagttcacagatgagcagggcaacatcgtgaccaagaagatcatcaggaaggtggtgcggcagattgacctgagcagcgcagatgctgcccaggagcacgaggaggtgacagtggagggccccctggaggaccccagcgagctggaggtggacatcgactacttcatgaagcacagcaaggtggagctgcggggcagcggcctgcagcctgacctgattgagggcaggaagggggcccagatcgtgaagagggccagcctgaagaggggcaagcagtag

SEQ ID NO: 143609 - DNA, 5421 bp, synthetic construct
  misc_feature 1..5421: note = Description of Artificial Sequence: Synthetic coding sequence
  source 1..5421: mol_type = other DNA
atgccctacagcgtgggcttccgggaggctgatgctgccaccagcttcctgcgggccgcccggagcggcaacctggacaaggccctggaccacctgagaaatggagtggacatcaacacctgcaaccagaatggcctgaatggcctgcacctggccagcaaggagggccacgtgaagatggtggtggagctgctgcacaaggagatcatcctggagaccaccaccaagaagggcaacacagccctgcacatcgccgccctggccggccaggatgaggtggtgcgggagctggtgaactacggggccaacgtgaatgcccagagccagaagggcttcacccccctgtacatggccgcccaggagaaccacctggaggtggtgaagttcctgctggagaatggagccaaccagaatgtggccacagaagatggcttcacccccctggccgtggccctgcagcagggccatgaaaatgtggtggcccacctgatcaactacggcaccaagggcaaggtgcggctgcctgccctgcacatcgccgccagaaatgatgacaccaggacagctgctgtgctgctgcagaatgaccccaacccagatgtgctgagcaagacaggcttcacccccctgcacatcgccgcccactatgagaacctgaatgtggcccagctgctgctgaacagaggagcctctgtgaacttcaccccccagaatggcatcacccccctgcacatcgccagcagaagaggaaatgtcatcatggtgcggctgctgctggacagaggagcccagatcgagaccaagaccaaggatgagctgacccccctgcactgtgccgccagaaatggccacgtgcgcatcagcgagatcctgctggaccacggggcccccatccaggccaagaccaagaatggcctgagccccatccacatggccgcccagggcgaccacctggactgtgtgcggctgctgctgcagtatgatgctgagattgatgacatcaccctggaccacctgacccccctgcacgtggccgcccactgcggccaccaccgggtggccaaggtgctgctggacaagggggccaagcccaacagccgggccctgaatggcttcacccccctgcacatcgcctgcaagaagaaccacgtgcgggtgatggagctgctgctgaagacaggagccagcattgatgctgtgacagaaagtggcctgacccccctgcacgtggccagcttcatgggccacctgcccatcgtgaagaacctgctgcagagaggagccagccccaacgtgtccaatgtgaaggtggagacccccctgcacatggccgcccgggccggccacacagaggtggccaagtacctgctgcagaacaaggccaaggtgaatgccaaggccaaggatgaccagacccccctgcactgtgccgcccgcatcggccacaccaacatggtgaagctgctgctggagaacaatgccaaccccaacctggccaccacagctggccacacccccctgcacatcgccgcccgggagggccacgtggagaccgtgctggccctgctggagaaggaggccagccaggcctgcatgaccaagaagggcttcacccccctgcacgtggccgccaagtatggcaaggtgcgggtggccgagctgctgctggagagagatgcccaccccaatgctgctgggaagaatggcctgacccccctgcacgtggccgtgcaccacaacaacctggacatcgtgaagctgctgctgccccggggcggcagcccccacagccctgcctggaatggctacacccccctgcacatcgccgccaagcagaaccaggtggaggtggcccggagcctgctgcagtatggaggcagcgccaatgctgagagcgtgcagggcgtgacccccctgcacctggccgcccaggagggccacgccgagatggtggccctgctgctgagcaagcaggccaacggcaacctgggcaacaagagcggcctgacccccctgcacctggtggcccaggagggccacgtgcctgtggctgatgtgctgatcaagcacggcgtgatggtggatgccaccaccaggatgggctacacccccctgcacgtggccagccactacggcaacatcaagctggtgaagttcctgctgcagcaccaggctgatgtgaatgccaagaccaagctgggctacagccccctgcaccaggccgcccagcagggccacacagacatcgtgaccctgctgctgaagaatggagccagccccaatgaggtgtccagtgatggcaccacccccctggccatcgccaagaggctgggctacatctctgtgacagatgtgctgaaggtggtgacagatgagaccagctttgtgctggtgtctgacaagcacaggatgtccttccctgagaccgtggatgagatcctggatgtgtctgaagatgaaggagaggagctgatctccttcaaggccgagcggcgggacagcagagatgtggatgaggagaaggagctgctggactttgtgcccaagctggaccaggtggtggagagccctgccatcccccgcatcccctgtgccatgcctgagaccgtggtgatccgctctgaggagcaggagcaggccagcaaggagtatgatgaggacagcctcatccccagcagccctgccacagagaccagtgacaacatcagccctgtggccagccctgtgcacacaggcttcctggtgtccttcatggtggatgcccggggcggctccatgaggggcagccgccacaacggcctgcgggtggtgattcctcccaggacctgtgccgcccccacccgcatcacctgccgcctggtgaagccccagaagctgagcaccccaccacccctggccgaggaggagggcctggccagccgcatcatcgccctgggccccactggagcccagttcctgagccctgtgattgtggagatcccccactttgccagccacggccgcggggaccgggagctggtggtgctgcggagtgaaaatggatctgtgtggaaggagcacaggagccgctacggggagagctacctggaccagatcctgaatggcatggatgaggagctgggcagcctggaggagctggagaagaagagggtgtgccgcatcatcaccacagacttccccctgtactttgtgatcatgagccggctgtgccaggactatgacaccatcggccctgagggcggcagcctgaagagcaagctggtgcccctggtgcaggccaccttcccagaaaatgctgtgaccaagagggtgaagctggccctgcaggcccagcctgtgcctgatgagctggtgaccaagctgctgggcaaccaggccaccttcagccccatcgtgacagtggagcccaggaggaggaagttccaccggcccatcggcctgcgcatccccctgccccccagctggacagacaacccccgggacagcggggagggggacaccaccagcctgcggctgctgtgcagcgtgattggaggaacagaccaggcccagtgggaggacatcaccggcaccaccaagctggtgtatgccaatgaatgtgccaacttcaccaccaacgtgtctgcccgcttctggctgagtgactgccccaggacagctgaggccgtgaactttgccaccctgctgtacaaggagctgacagctgtgccctacatggccaagtttgtgatctttgccaagatgaatgacccccgggagggccgcctgcgctgctactgcatgacagatgacaaggtggacaagaccctggagcagcacgagaactttgtggaggtggcccggagccgggacatcgaggtgctggagggcatgagcctgtttgctgagctgagcggcaacctggtgcctgtgaagaaggccgcccagcagaggagcttccacttccagagcttccgggagaaccggctggccatgcctgtgaaggtgcgggacagcagccgggagcccggcggcagcctgtccttcctgaggaaggccatgaagtatgaggacacccagcacatcctgtgccacctgaacatcaccatgccaccctgtgccaagggcagcggggctgaagatagaagaaggacccccacccccctggccctgcgctacagcatcctgtctgagagcaccccaggcagcctgagcggcacagagcaggccgagatgaagatggccgtcatcagcgagcacctgggcctgtcctgggccgagctggcccgggagctgcagttctctgtggaggacatcaaccgcatccgggtggagaaccccaacagcctgctggagcagagcgtggccctgctgaacctgtgggtgatccgggagggccagaatgccaacatggagaacctgtacacagccctgcagagcattgacagaggagaaattgtgaacatgctggagggcagcggccggcagagcaggaacctgaagccagacagaagacacacagaccgggactacagcctgagccccagccagatgaatggctacagcagcctgcaggatgagctgctgagccctgccagcctgggctgtgccctgagcagccccctgcgggctgaccagtactggaatgaggtggccgtgctggatgccatccccctggccgccacagaacatgacaccatgctggagatgtctgacatgcaggtgtggagcgctggcctgacccccagcctggtgacagctgaggacagcagcctggagtgcagcaaggcagaagattctgatgccaccggccacgagtggaagctggagggcgccctgtctgaggagccccggggccctgagctgggcagcctggagctggtggaggatgacacagtggacagtgatgccaccaacggcctgattgacctgctggagcaggaggagggccagaggtctgaggagaagctgcccggcagcaagaggcaggatgatgccaccggggccggccaggacagtgaaaatgaggtgtccctggtgtctggccaccagaggggccaggcccgcatcacccacagccccaccgtgtcccaggtgacagagaggagccaggaccggctgcaggactgggatgctgatggcagcatcgtgtcctacctgcaggatgctgcccagggctcctggcaggaggaggtgacccagggcccccacagcttccagggcaccagcaccatgacagagggcctggagcccggcggcagccaggagtatgagaaggtgctggtgtctgtgtctgagcacacctggacagagcagcctgaggccgagagcagccaggccgaccgggaccggcggcagcagggccaggaggagcaggtgcaggaggccaagaacaccttcacccaggtggtgcaggaccacaccagcacccccaacccctag

SEQ ID NO: 143610 - DNA, 330 bp, synthetic construct; identical to SEQ ID NO: 143604
  misc_feature 1..330: note = Description of Artificial Sequence: Synthetic coding sequence
  source 1..330: mol_type = other DNA

SEQ ID NO: 143611 - DNA, 11775 bp, synthetic construct
  misc_feature 1..11775: note = Description of Artificial Sequence: Synthetic coding sequence
  source 1..11775: mol_type = other DNA
atgatgaatgaagatgctgcccagaagagtgacagcggggagaagttcaacggcagcagccagaggaggaagaggcccaagaagagtgacagcaatgccagcttcctgcgggccgcccgggccggcaacctggacaaggtggtggagtacctgaagggcggcatcgacatcaacacctgcaaccagaatggcctgaatgccctgcacctggccgccaaggagggccacgtgggcctggtgcaggagctgctgggccggggcagctctgtggacagcgccaccaagaagggcaacacagccctgcacatcgccagcctggccggccaggccgaggtggtgaaggtgctggtgaaggagggcgccaacatcaatgcccagagccagaatggcttcacccccctgtacatggccgcccaggagaaccacattgatgtggtgaagtacctgctggagaatggagccaaccagagcacagccacagaagatggcttcacccccctggccgtggccctgcagcagggccacaaccaggccgtggccatcctgctggagaatgacaccaagggcaaggtgcggctgcctgccctgcacatcgccgccaggaaggatgacaccaagtctgctgccctgctgctgcagaatgaccacaatgctgatgtgcagagcaagatgatggtgaacagaaccacagagagcggcttcacccccctgcacatcgccgcccactatggaaatgtgaatgtggccaccctgctgctgaacagaggagctgctgtggacttcaccgccagaaatggcatcacccccctgcacgtggccagcaagaggggcaacaccaacatggtgaagctgctgctggacagaggaggccagattgatgccaagaccagagatggcctgacccccctgcactgtgccgcccggagcggccatgaccaggtggtggagctgctgctggagcggggggcccccctgctggcccggaccaagaatggcctgagccccctgcacatggccgcccagggcgaccacgtggagtgtgtgaagcacctgctgcagcacaaggcccctgtggatgatgtgaccctggactacctgacagccctgcacgtggccgcccactgcggccactacagagtgaccaagctgctgctggacaagagggccaaccccaatgcccgggccctgaatggcttcacccccctgcacatcgcctgcaagaagaaccgcatcaaggtgatggagctgctggtgaagtacggggccagcatccaggccatcacagagagcggcctgacccccatccacgtggccgccttcatgggccacctgaacatcgtgctgctgctgctgcagaatggagccagcccagatgtgaccaacatccggggggagacagccctgcacatggccgcccgggccggccaggtggaggtggtgcgctgcctgctgagaaatggagccctggtggatgcccgggcccgggaggagcagacccccctgcacatcgccagccggctgggcaagacagagatcgtgcagctgctgctgcagcacatggcccacccagatgctgccaccaccaacggctacacccccctgcacatcagcgcccgggagggccaggtggatgtggcctctgtgctgctggaggccggggccgcccacagcctggccaccaagaagggcttcacccccctgcacgtggccgccaagtatggcagcctggatgtggccaagctgctgctgcagaggagagctgctgctgacagcgctgggaagaatggcctgacccccctgcacgtggccgcccactatgacaaccagaaggtggccctgctgctgctggagaagggggccagcccccacgccacagccaagaatggctacacccccctgcacatcgccgccaagaagaaccagatgcagatcgccagcaccctgctgaactatggagctgagaccaacatcgtgaccaagcagggcgtgacccccctgcacctggccagccaggagggccacacagacatggtgaccctgctgctggacaagggggccaacatccacatgagcaccaagagcggcctgaccagcctgcacctggccgcccaggaggacaaggtgaatgtggccgacatcctgaccaagcatggagctgaccaggatgcccacaccaagctgggctacacccccctgattgtggcctgccactatggaaatgtgaagatggtgaacttcctgctgaagcagggcgccaacgtgaatgccaagaccaagaatggctacacccccctgcaccaggccgcccagcagggccacacccacatcatcaacgtgctgctgcagcacggggccaagcccaatgccaccacagccaatggaaacacagccctggccatcgccaagaggctgggctacatctctgtggtggacaccctgaaggtggtgacagaggaggtgaccaccaccaccaccaccatcacagagaagcacaagctgaatgtgcctgagaccatgacagaggtgctggatgtgtctgatgaggagggagatgacaccatgactggagatggaggagagtacctgcggcctgaggacctgaaggagctgggagatgacagcctgcccagcagccagttcctggatggcatgaactacctgcgctacagcctggagggcggccgcagtgacagcctgcgctccttcagcagtgacaggagccacaccctgagccacgccagctacctgcgggacagcgctgtgatggatgattctgtggtgatccccagccaccaggtgtccaccctggccaaggaggccgagaggaacagctaccgcctgtcctggggcacagagaacctggacaacgtggccctgagcagcagccccatccacagcggcttcctggtgtccttcatggtggatgcccggggcggggccatgaggggctgccgccacaacggcctgcgcatcatcatcccccccaggaaatgtacagcccccaccagggtgacctgccgcctggtgaagaggcaccggctggccaccatgccacccatggtggagggggagggcctggccagccggctgattgaggtgggccccagcggggcccagttcctgggccctgtgattgtggagatcccccactttgctgccctgcggggcaaggagcgggagctggtggtgctgcggagtgaaaatggagacagctggaaggagcacttctgtgactacacagaagatgagctgaatgagatcctgaatggcatggatgaggtgctggacagccctgaggacctggagaagaagaggatctgccgcatcatcacccgggacttcccccagtactttgctgtggtgagccgcatcaagcaggacagcaacctgattggccctgagggcggcgtgctgagcagcacagtggtgccccaggtgcaggccgtgtttcctgagggcgccctgaccaagaggatccgggtgggcctgcaggcccagcccatgcacagcgagctggtgaagaagatcctgggcaacaaggccaccttcagccccatcgtgaccctggagcccaggaggaggaagttccacaagcccatcaccatgaccatccctgtgcccaaggccagcagtgatgtgatgctgaatggatttggaggagatgcccccaccctgcggctgctgtgcagcatcaccggcggcaccaccccagcccagtgggaggacatcaccggcaccacccccctgacctttgtgaatgaatgtgtgtccttcaccaccaacgtgtctgcccgcttctggctgattgactgccggcagatccaggagagcgtgacctttgccagccaggtgtaccgggagatcatctgtgtgccctacatggccaagtttgtggtgtttgccaagagccatgaccccatcgaggcccggctgcgctgcttctgcatgacagatgacaaggtggacaagaccctggagcagcaggagaactttgctgaggtggcccggagcagagatgtggaggtgctggagggcaagcccatctacgtggactgctttggaaacctggtgcccctgaccaagagcggccagcaccacatcttctccttctttgccttcaaggaaaatcggctgcccctgtttgtgaaggtgcgggacaccacccaggagccctgtggccgcctgtccttcatgaaggagcccaagagcacccggggcctggtgcaccaggccatctgcaacctgaacatcaccctgcccatctacaccaaggagagcgagagtgaccaggagcaggaggaggagattgacatgaccagcgagaagaatgatgaaacagagagcacagagacctctgtgctgaagagccacctggtgaatgaggtgcctgtgctggccagcccagacctgctgtctgaggtgtctgagatgaagcaggacctgatcaagatgacagccatcctgaccacagatgtgtctgacaaggccggcagcatcaaggtgaaggagctggtgaaggctgctgaggaggagcccggggagccctttgagatcgtggagcgggtgaaggaggacctggagaaggtgaatgagatcctgcggagcggcacctgcaccagagatgagagctctgtgcagagcagccgctctgagcggggcctggtggaggaggagtgggtgattgtgtctgatgaggagattgaggaggcccggcagaaggcccccctggagatcacagagtacccctgtgtggaggtgagaattgacaaggagatcaagggcaaggtggagaaggacagcacaggcctggtgaactacctgacagatgacctgaacacctgtgtgcccctgcccaaggagcagctgcagacagtgcaggacaaggccggcaagaagtgtgaggccctggccgtgggccgcagcagcgagaaggagggcaaggacatccccccagatgagacccagagcacccagaagcagcacaagcccagcctgggcatcaagaagcctgtgcggaggaagctgaaggagaagcagaagcagaaggaggagggcctgcaggccagcgctgagaaggccgagctgaagaagggcagcagcgaggagagcctgggggaggaccccggcctggcccctgagcccctgcccaccgtgaaggccaccagccccctgattgaggagacccccatcggcagcatcaaggacaaggtgaaggccctgcagaagagggtggaggatgagcagaagggccgcagcaagctgcccatccgggtgaagggcaaggaggatgtgcccaagaagaccacccaccggccccaccctgctgccagccccagcctgaagtcagaaagacatgcccctggcagccccagccccaagacagagcggcacagcaccctgagcagcagcgccaagacagagcggcacccccctgtgagccccagcagcaagacagagaagcacagccctgtgagccccagcgccaagacagagcggcacagccctgccagcagcagcagcaagacagagaagcacagccctgtgagccccagcaccaagacagagcggcacagccctgtgagcagcaccaagacagagcggcacccccctgtgagccccagcggcaagacagacaagaggcctcctgtgagccccagcggccgcacagagaagcacccccctgtgtccccaggccgcacagagaagaggctgcctgtgagccccagcggccgcacagacaagcaccagcctgtgtccacagctgggaagacagagaagcacctgcctgtgagccccagcggcaagacagagaagcagccccctgtgagccccaccagcaagacagaaagaattgaggagaccatgtctgtgcgggagctgatgaaggccttccagagcggccaggaccccagcaagcacaagacaggcctgtttgagcacaagagcgccaagcagaagcagccccaggagaagggcaaggtgcgggtggagaaggagaagggccccatcctgacccagcgggaggcccagaagacagagaaccagaccatcaagaggggccagaggctgcctgtgactggaacagctgagagcaagaggggcgtgcgggtgagcagcattggagtgaagaaggaggatgctgctgggggcaaggagaaggtgctgagccacaagatccctgagcctgtgcagagcgtgcctgaggaggagagccaccgggagagcgaggtgcccaaggagaagatggctgatgagcagggcgacatggacctgcagatcagcccagacaggaagaccagcacagacttcagcgaggtgatcaagcaggagctggaggacaatgacaagtaccagcagttccggctgtctgaggagacagagaaggcccagctgcacctggaccaggtgctgaccagccccttcaacaccaccttccccctggactacatgaaggatgagttcctgcctgccctgagcctgcagagcggggccctggatggcagcagcgagagcctgaagaatgaaggagtggccggcagcccctgtggcagcctgatggagggcaccccccagatcagcagcgaggagagctacaagcatgagggcctggccgagaccccagagaccagccctgagagcctgtccttcagccccaagaagtctgaggagcagacaggagagaccaaggagagcaccaagacagagaccaccacagagatccgctctgagaaggagcaccccaccaccaaggacatcactggaggcagcgaggagcggggggccaccgtgacagaagattctgagaccagcacagagagcttccagaaggaggccaccctgggcagccccaaggacaccagccccaagaggcaggatgactgcaccggcagctgcagcgtggccctggccaaggagacccccaccggcctgacagaggaggccgcctgtgatgagggccagaggaccttcggcagcagcgcccacaagacccagacagacagcgaggtgcaggagagcacagccaccagtgatgagaccaaggccctgcccctgcctgaggcctctgtgaagacagacaccggcacagagagcaagccccagggcgtcatccgcagcccccagggcctggagctggccctgcccagccgggacagcgaggtgctgtctgctgtggctgatgacagcctggccgtgagccacaaggacagcctggaggccagccctgtgctggaggacaacagcagccacaagaccccagacagcctggagcccagccccctgaaggagagcccctgccgggacagcctggagagcagccctgtggagcccaagatgaaggccggcatcttccccagccacttccccctgcctgctgctgtggccaagacagagctgctgacagaggtggcctctgtgcgcagccggctgctgcgggaccctgatggcagcgcagaagatgacagcctggagcagaccagcctgatggagagcagcggcaagagccccctgagcccagacacccccagcagcgaggaggtgtcctatgaggtgacccccaagaccacagatgtgtccacccccaagccagctgtgattcatgaatgtgccgaggaggatgattctgaaaatggagagaagaagcgcttcaccccagaggaggagatgttcaagatggtgaccaagatcaagatgtttgatgagctggagcaggaggccaagcagaagagggactacaagaaggagcccaagcaggaggagagcagcagcagcagtgaccctgatgctgactgcagcgtggatgtggatgagcccaagcacactggaagtggagaagatgagagcggcgtgcctgtgctggtgaccagcgagagcaggaaggtgagcagcagcagcgagagcgagcctgagctggcccagctgaagaagggagctgacagcggcctgctgcctgagcccgtcatccgggtgcagccccccagccccctgcccagctccatggacagcaacagcagccctgaggaggtgcagttccagcctgtggtgtccaagcagtacaccttcaagatgaatgaagacacccaggaggagcccgggaagtctgaggaggagaaggacagcgagagccacctggccgaggacagacatgctgtgtccacagaagctgaggacaggagctatgacaagctgaacagagacacagaccagcccaagatctgtgatggccacggctgtgaggccatgagccccagcagcagcgctgcccctgtgagcagcggcctgcagagccccactggagatgatgtggatgagcagcccgtcatctacaaggagagcctggccctgcagggcacccatgagaaggacacagaaggagaggagctggatgtgtccagagctgagagcccccaggccgactgccccagcgagagcttcagcagcagcagcagcctgccccactgcctggtgtctgagggcaaggagctggatgaggacatcagcgccaccagcagcatccagaagacagaggtgaccaagacagatgagacctttgagaacctgcccaaggactgccccagccaggacagcagcatcaccacccagacagaccgcttctccatggatgtgcctgtgtctgacctggccgagaatgatgagatctatgacccccagatcaccagcccctatgaaaatgtgcccagccagagcttcttcagcagcgaggagagcaagacccagacagatgccaaccacaccaccagcttccacagcagcgaggtgtacagcgtgaccatcaccagccctgtggaggatgtggtggtggccagcagcagcagcggcaccgtgctgagcaaggagagcaactttgagggccaggacatcaagatggagagccagcaggagagcaccctgtgggagatgcagagcgacagcgtgagcagcagctttgagcccaccatgtctgccaccaccaccgtggtgggggagcagatcagcaaggtgatcatcaccaagacagatgtggacagcgacagctggagcgagatcagagaagatgatgaggcctttgaggcccgggtgaaggaggaggagcagaagatcttcggcctgatggtggaccggcagagccagggcaccaccccagacaccaccccagcccggacccccacagaggagggcacccccaccagcgagcagaaccccttcctgttccaggagggcaagctgtttgagatgaccaggtctggggccatcgacatgaccaagaggagctatgcagatgagagcttccacttcttccagatcggccaggagagccgggaggagaccctgtctgaagatgtgaaggagggcgccactggagctgaccccctgcccctggagaccagcgctgagagcctggccctgtctgagagcaaggagaccgtggatgatgaggccgacctgctgcctgatgatgtgtctgaggaggtggaggagatcccagccagtgatgcccagctgaacagccagatgggcatcagcgccagcacagagacccccaccaaggaggccgtgtctgtgggcaccaaggacctgcccaccgtgcagacaggagacatcccccccctgagcggcgtgaagcagatcagctgcccagacagcagcgagcctgctgtgcaggtgcagctggacttcagcaccctgaccaggtctgtgtacagcgacagaggagatgacagcccagacagcagccctgaggagcagaagagcgtcatcgagatccccacagcccccatggagaatgtgcccttcacagagagcaagagcaagatccctgtgaggaccatgcccaccagcaccccagcccctccttctgcagaatatgagagctctgtgtctgaggacttcctgagctctgtggatgaggagaacaaggcagatgaggccaagcccaagagcaagctgcctgtgaaggtgcccctgcagagggtggagcagcagctgagtgacctggacacctctgtgcagaagacagtggccccccagggccaggacatggccagcatcgccccagacaacagaagcaagtctgagagtgatgccagcagcctggacagcaagaccaagtgccctgtgaagaccaggagctacacagaaacagaaacagagagccgggagcgggcagaggagctggagctggagagcgaggagggcgccacccggcccaagatcctgaccagccggctgcctgtgaagagccgcagcaccaccagcagctgccggggcggcaccagccccaccaaggagagcaaggagcacttctttgacctgtacagaaattccattgagttctttgaggagatcagtgatgaggccagcaagctggtggaccggctgacccagagcgagcgggagcaggagatcgtgtctgatgatgagagcagcagcgccctggaggtgtctgtgattgagaacctgccccctgtggagacagagcacagcgtgcctgaggacatctttgacacccggcccatctgggatgagagcattgagaccctcatcgagcgcatcccagatgaaaatggacatgaccacgccgaggacccccaggatgagcaggagcgcatcgaggagcggctggcctacatcgctgaccacctgggcttctcctggacagagctggcccgggagctggacttcacagaggagcagatccaccagatcagaattgagaaccccaacagcctgcaggaccagagccacgccctgctgaagtactggctggagagagatggcaagcacgccacagacaccaacctggtggagtgcctgaccaagatcaacaggatggacatcgtgcacctgatggagaccaacacagagcccctgcaggagcgcatcagccacagctatgcagaaattgagcagaccatcaccctggaccacagcgagggcttctctgtgctgcaggaggagctgtgcacagcccagcacaagcagaaggaggagcaggccgtgtccaaggagagcgagacctgtgaccacccccccatcgtgtctgaggaggacatctctgtgggctacagcaccttccaggatggagtgcccaagacagaaggagacagcagcgccacagccctcttcccccagacccacaaggagcaggtgcagcaggacttcagcggcaagatgcaggacctgcctgaggagagcagcctggagtaccagcaggagtactttgtgaccaccccaggcacagagaccagcgagacccagaaggccatgattgtgcccagcagccccagcaagaccccagaggaggtgtccaccccagctgaggaggagaagctgtacctgcagacccccaccagcagcgagcggggcggcagccccatcatccaggagcctgaggagcccagcgagcaccgggaggagagcagccccaggaagaccagcctggtgattgtggagagcgctgacaaccagcctgagacctgtgagcggctggatgaagatgctgcctttgagaagggagatgacatgcctgagatccccccagagaccgtgacagaggaggagtacattgatgagcacggccacacagtggtgaagaaggtgaccaggaagatcatccgccgctacgtgtcctctgagggcacagagaaggaggagatcatggtgcagggcatgccccaggagcctgtgaacatcgaggagggagatggctacagcaaggtgatcaagagggtggtgctgaagagtgacacagagcagagcgaggacaacaatgaatag

SEQ ID NO: 143612 - DNA, 5592 bp, synthetic construct
  misc_feature 1..5592: note = Description of Artificial Sequence: Synthetic coding sequence
  source 1..5592: mol_type = other DNA
atgagccaccacatccagaggagtgacagcaatgccagcttcctgcgggccgcccgggccggcaacctggacaaggtggtggagtacctgaagggcggcatcgacatcaacacctgcaaccagaatggcctgaatgccctgcacctggccgccaaggagggccacgtgggcctggtgcaggagctgctgggccggggcagctctgtggacagcgccaccaagaagggcaacacagccctgcacatcgccagcctggccggccaggccgaggtggtgaaggtgctggtgaaggagggcgccaacatcaatgcccagagccagaatggcttcacccccctgtacatggccgcccaggagaaccacattgatgtggtgaagtacctgctggagaatggagccaaccagagcacagccacagaagatggcttcacccccctggccgtggccctgcagcagggccacaaccaggccgtggccatcctgctggagaatgacaccaagggcaaggtgcggctgcctgccctgcacatcgccgccaggaaggatgacaccaagtctgctgccctgctgctgcagaatgaccacaatgctgatgtgcagagcaagatgatggtgaacagaaccacagaaagtggcttcacccccctgcacatcgccgcccactatggaaatgtgaatgtggccaccctgctgctgaacagaggagctgctgtggacttcaccgccagaaatggcatcacccccctgcacgtggccagcaagaggggcaacaccaacatggtgaagctgctgctggaccggggcggccagattgatgccaagaccagagatggcctgacccccctgcactgtgccgcccggagcggccatgaccaggtggtggagctgctgctggagcggggggcccccctgctggcccggaccaagaatggcctgagccccctgcacatggccgcccagggcgaccacgtggagtgtgtgaagcacctgctgcagcacaaggcccctgtggatgatgtgaccctggactacctgacagccctgcacgtggccgcccactgcggccactacagagtgaccaagctgctgctggacaagagggccaaccccaatgcccgggccctgaatggcttcacccccctgcacatcgcctgcaagaagaaccgcatcaaggtgatggagctgctggtgaagtatggagccagcatccaggccatcacagaaagtggcctgacccccatccacgtggccgccttcatgggccacctgaacatcgtgctgctgctgctgcagaatggagccagcccagatgtgaccaacatccggggggagacagccctgcacatggccgcccgggccggccaggtggaggtggtgcgctgcctgctgagaaatggagccctggtggatgcccgggcccgggaggagcagacccccctgcacatcgccagccggctgggcaagacagaaattgtgcagctgctgctgcagcacatggcccacccagatgctgccaccaccaacggctacacccccctgcacatcagcgcccgggagggccaggtggatgtggcctctgtgctgctggaggccggggccgcccacagcctggccaccaagaagggcttcacccccctgcacgtggccgccaagtatggcagcctggatgtggccaagctgctgctgcagaggagagctgctgctgacagcgctgggaagaatggcctgacccccctgcacgtggccgcccactatgacaaccagaaggtggccctgctgctgctggagaagggggccagcccccacgccacagccaagaatggctacacccccctgcacatcgccgccaagaagaaccagatgcagatcgccagcaccctgctgaactacggggctgagaccaacatcgtgaccaagcagggcgtgacccccctgcacctggccagccaggagggccacacagacatggtgaccctgctgctggacaagggggccaacatccacatgagcaccaagagcggcctgaccagcctgcacctggccgcccaggaggacaaggtgaatgtggccgacatcctgaccaagcacggggctgaccaggatgcccacaccaagctgggctacacccccctcatcgtggcctgccactatggaaatgtgaagatggtgaacttcctgctgaagcagggcgccaacgtgaatgccaagaccaagaatggctacacccccctgcaccaggccgcccagcagggccacacccacatcatcaacgtgctgctgcagcacggggccaagcccaatgccaccacagccaacggcaacacagccctggccatcgccaagaggctgggctacatctctgtggtggacaccctgaaggtggtgacagaggaggtgaccaccaccaccaccaccatcacagagaagcacaagctgaatgtgcctgagaccatgacagaggtgctggatgtgtctgatgaggagggagatgacaccatgactggagatggaggagagtacctgcggcctgaggacctgaaggagctgggagatgacagcctgcccagcagccagttcctggatggcatgaactacctgcgctacagcctggagggcggccgcagtgacagcctgcggagcttcagcagtgacaggagccacaccctgagccacgccagctacctgcgggacagcgctgtgatggatgacagcgtggtgatccccagccaccaggtgtccaccctggccaaggaggccgagagaaattcctaccgcctgtcctggggcacagagaacctggacaacgtggccctgagcagcagccccatccacagcggccgggccagcccctgcctggagcgggacaacagcagcttcctggtgtccttcatggtggatgcccggggcggggccatgaggggctgccgccacaacggcctgcgcatcatcatcccccccaggaagtgcacagcccccaccagggtgacctgccgcctggtgaagaggcaccggctggccaccatgccacccatggtggagggggagggcctggccagccgcctcatcgaggtgggccccagcggggcccagttcctgggcaagctgcacctgcccacagcccccccacccctgaatgaaggagagagcctggtgagccgcatcctgcagctgggccccccaggcaccaagttcctgggccctgtgattgtggagatcccccactttgctgccctgcggggcaaggagcgggagctggtggtgctgcggagtgaaaatggagacagctggaaggagcacttctgtgactacacagaagatgagctgaatgagatcctgaatggcatggatgaggtgctggacagccctgaggacctggagaagaagaggatctgccgcatcatcacccgggacttcccccagtactttgctgtggtgagccgcatcaagcaggacagcaacctgattggccctgagggcggcgtgctgagcagcacagtggtgccccaggtgcaggccgtgtttcctgagggcgccctgaccaagaggatccgggtgggcctgcaggcccagcccatgcacagcgagctggtgaagaagatcctgggcaacaaggccaccttcagccccatcgtgaccctggagcccaggaggaggaagttccacaagcccatcaccatgaccatccctgtgcccaaggccagcagtgatgtgatgctgaatggatttggaggagatgcccccaccctgcggctgctgtgcagcatcaccggcggcaccaccccagcccagtgggaggacatcaccggcaccacccccctgacctttgtgaatgaatgtgtgtccttcaccaccaacgtgtctgcccgcttctggctgattgactgccggcagatccaggagagcgtgacctttgccagccaggtgtaccgggagatcatctgtgtgccctacatggccaagtttgtggtgtttgccaagagccatgaccccatcgaggcccggctgcgctgcttctgcatgacagatgacaaggtggacaagaccctggagcagcaggagaactttgctgaggtggcccggagcagagatgtggaggtgctggagggcaagcccatctacgtggactgctttggaaacctggtgcccctgaccaagagcggccagcaccacatcttctccttctttgccttcaaggaaaatcggctgcccctgtttgtgaaggtgcgggacaccacccaggagccctgtggccgcctgtccttcatgaaggagcccaagagcacccggggcctggtgcaccaggccatctgcaacctgaacatcaccctgcccatctacaccaaggagagcgagagtgaccaggagcaggaggaggagatcggccaggagagccgccgctacccccaggatgagcaggagagaattgaggagcggctggcctacatcgctgaccacctgggcttctcctggacagagctggcccgggagctggacttcacagaggagcagatccaccagatcagaattgagaaccccaacagcctgcaggaccagagccacgccctgctgaagtactggctggagagagatggcaagcacgccacagacaccaacctggtggagtgcctgaccaagatcaacaggatggacatcgtgcacctgatggagaccaacacagagcccctgcaggagcgcatcagccacagctatgcagaaattgagcagaccatcaccctggaccacagcgagggcttctctgtgctgcaggaggagctgtgcacagcccagcacaagcagaaggaggagcaggccgtgtccaaggagagcgagacctgtgaccacccccccatcgtgtctgaggaggacatctctgtgggctacagcaccttccaggatggagtgcccaagacagaaggagacagcagcgccacagccctcttcccccagacccacaaggagcaggtgcagcaggacttcagcggcaagatgcaggacctgcctgaggagagcagcctggagtaccagcaggagtactttgtgaccaccccaggcacagagaccagcgagacccagaaggccatgattgtgcccagcagccccagcaagaccccagaggaggtgtccaccccagctgaggaggagaagctgtacctgcagacccccaccagcagcgagcggggcggcagccccatcatccaggagcctgaggagcccagcgagcaccgggaggagagcagccccaggaagaccagcctggtgattgtggagagcgctgacaaccagcctgagacctgtgagcggctggatgaagatgctgcctttgagaagggagatgacatgcctgagatccccccagagaccgtgacagaggaggagtacattgatgaacatggccacacagtggtgaagaaggtgaccaggaagatcatcagaagatatgtgagcagcgagggcacagagaaggaggagatcatggtgcagggcatgccccaggagcctgtgaacatcgaggagggagatggctacagcaaggtgatcaagagggtggtgctgaagagtgacacagagcagagtgaagattccatggagtag

SEQ ID NO: 143613 - DNA, 11874 bp, synthetic construct
  misc_feature 1..11874: note = Description of Artificial Sequence: Synthetic coding sequence
  source 1..11874: mol_type = other DNA
atgatgaatgaagatgctgcccagaagagtgacagcggggagaagttcaacggcagcagccagaggaggaagaggcccaagaagagtgacagcaatgccagcttcctgcgggccgcccgggccggcaacctggacaaggtggtggagtacctgaagggcggcatcgacatcaacacctgcaaccagaatggcctgaatgccctgcacctggccgccaaggagggccacgtgggcctggtgcaggagctgctgggccggggcagctctgtggacagcgccaccaagaagggcaacacagccctgcacatcgccagcctggccggccaggccgaggtggtgaaggtgctggtgaaggagggcgccaacatcaatgcccagagccagaatggcttcacccccctgtacatggccgcccaggagaaccacattgatgtggtgaagtacctgctggagaatggagccaaccagagcacagccacagaagatggcttcacccccctggccgtggccctgcagcagggccacaaccaggccgtggccatcctgctggagaatgacaccaagggcaaggtgcggctgcctgccctgcacatcgccgccaggaaggatgacaccaagtctgctgccctgctgctgcagaatgaccacaatgctgatgtgcagagcaagatgatggtgaacagaaccacagagagcggcttcacccccctgcacatcgccgcccactatggaaatgtgaatgtggccaccctgctgctgaacagaggagctgctgtggacttcaccgccagaaatggcatcacccccctgcacgtggccagcaagaggggcaacaccaacatggtgaagctgctgctggacagaggaggccagattgatgccaagaccagagatggcctgacccccctgcactgtgccgcccggagcggccatgaccaggtggtggagctgctgctggagcggggggcccccctgctggcccggaccaagaatggcctgagccccctgcacatggccgcccagggcgaccacgtggagtgtgtgaagcacctgctgcagcacaaggcccctgtggatgatgtgaccctggactacctgacagccctgcacgtggccgcccactgcggccactacagagtgaccaagctgctgctggacaagagggccaaccccaatgcccgggccctgaatggcttcacccccctgcacatcgcctgcaagaagaaccgcatcaaggtgatggagctgctggtgaagtacggggccagcatccaggccatcacagagagcggcctgacccccatccacgtggccgccttcatgggccacctgaacatcgtgctgctgctgctgcagaatggagccagcccagatgtgaccaacatccggggggagacagccctgcacatggccgcccgggccggccaggtggaggtggtgcgctgcctgctgagaaatggagccctggtggatgcccgggcccgggaggagcagacccccctgcacatcgccagccggctgggcaagacagagatcgtgcagctgctgctgcagcacatggcccacccagatgctgccaccaccaacggctacacccccctgcacatcagcgcccgggagggccaggtggatgtggcctctgtgctgctggaggccggggccgcccacagcctggccaccaagaagggcttcacccccctgcacgtggccgccaagtatggcagcctggatgtggccaagctgctgctgcagaggagagctgctgctgacagcgctgggaagaatggcctgacccccctgcacgtggccgcccactatgacaaccagaaggtggccctgctgctgctggagaagggggccagcccccacgccacagccaagaatggctacacccccctgcacatcgccgccaagaagaaccagatgcagatcgccagcaccctgctgaactatggagctgagaccaacatcgtgaccaagcagggcgtgacccccctgcacctggccagccaggagggccacacagacatggtgaccctgctgctggacaagggggccaacatccacatgagcaccaagagcggcctgaccagcctgcacctggccgcccaggaggacaaggtgaatgtggccgacatcctgaccaagcatggagctgaccaggatgcccacaccaagctgggctacacccccctgattgtggcctgccactatggaaatgtgaagatggtgaacttcctgctgaagcagggcgccaacgtgaatgccaagaccaagaatggctacacccccctgcaccaggccgcccagcagggccacacccacatcatcaacgtgctgctgcagcacggggccaagcccaatgccaccacagccaatggaaacacagccctggccatcgccaagaggctgggctacatctctgtggtggacaccctgaaggtggtgacagaggaggtgaccaccaccaccaccaccatcacagagaagcacaagctgaatgtgcctgagaccatgacagaggtgctggatgtgtctgatgaggagggagatgacaccatgactggagatggaggagagtacctgcggcctgaggacctgaaggagctgggagatgacagcctgcccagcagccagttcctggatggcatgaactacctgcgctacagcctggagggcggccgcagtgacagcctgcgctccttcagcagtgacaggagccacaccctgagccacgccagctacctgcgggacagcgctgtgatggatgattctgtggtgatccccagccaccaggtgtccaccctggccaaggaggccgagaggaacagctaccgcctgtcctggggcacagagaacctggacaacgtggccctgagcagcagccccatccacagcggcttcctggtgtccttcatggtggatgcccggggcggggccatgaggggctgccgccacaacggcctgcgcatcatcatcccccccaggaaatgtacagcccccaccagggtgacctgccgcctggtgaagaggcaccggctggccaccatgccacccatggtggagggggagggcctggccagccggctgattgaggtgggccccagcggggcccagttcctgggcaagctgcacctgcccacagcccccccacccctgaatgaaggagagagcctggtgagccgcatcctgcagctgggccccccaggcaccaagttcctgggccctgtgattgtggagatcccccactttgctgccctgcggggcaaggagcgggagctggtggtgctgcggagtgaaaatggagacagctggaaggagcacttctgtgactacacagaagatgagctgaatgagatcctgaatggcatggatgaggtgctggacagccctgaggacctggagaagaagaggatctgccgcatcatcacccgggacttcccccagtactttgctgtggtgagccgcatcaagcaggacagcaacctgattggccctgagggcggcgtgctgagcagcacagtggtgccccaggtgcaggccgtgtttcctgagggcgccctgaccaagaggatccgggtgggcctgcaggcccagcccatgcacagcgagctggtgaagaagatcctgggcaacaaggccaccttcagccccatcgtgaccctggagcccaggaggaggaagttccacaagcccatcaccatgaccatccctgtgcccaaggccagcagtgatgtgatgctgaatggatttggaggagatgcccccaccctgcggctgctgtgcagcatcactggaggcaccaccccagcccagtgggaggacatcaccggcaccacccccctgacctttgtgaatgaatgtgtgtccttcaccaccaacgtgtctgcccgcttctggctgattgactgccggcagatccaggagagcgtgacctttgccagccaggtgtaccgggagatcatctgtgtgccctacatggccaagtttgtggtgtttgccaagagccatgaccccatcgaggcccggctgcgctgcttctgcatgacagatgacaaggtggacaagaccctggagcagcaggagaactttgctgaggtggcccggagcagagatgtggaggtgctggagggcaagcccatctacgtggactgcttcggcaacctggtgcccctgaccaagagcggccagcaccacatcttctccttctttgccttcaaggagaaccggctgcccctgtttgtgaaggtgcgggacaccacccaggagccctgtggccgcctgtccttcatgaaggagcccaagagcacccggggcctggtgcaccaggccatctgcaacctgaacatcaccctgcccatctacaccaaggagagcgagagtgaccaggagcaggaggaggagattgacatgaccagcgagaagaatgatgaaacagagagcacagagacctctgtgctgaagagccacctggtgaatgaggtgcctgtgctggccagcccagacctgctgtctgaggtgtctgagatgaagcaggacctgatcaagatgacagccatcctgaccacagatgtgtctgacaaggccggcagcatcaaggtgaaggagctggtgaaggctgctgaggaggagcctggagagccctttgaaattgtggagcgggtgaaggaggacctggagaaggtgaatgagatcctgcggagcggcacctgcaccagagatgagagctctgtgcagagcagccgctctgagcggggcctggtggaggaggagtgggtgattgtgtctgatgaggagattgaggaggcccggcagaaggcccccctggagatcacagagtacccctgtgtggaggtgagaattgacaaggagatcaagggcaaggtggagaaggacagcacaggcctggtgaactacctgacagatgacctgaacacctgtgtgcccctgcccaaggagcagctgcagacagtgcaggacaaggccggcaagaagtgtgaggccctggccgtgggccgcagcagcgagaaggagggcaaggacatccccccagatgagacccagagcacccagaagcagcacaagcccagcctgggcatcaagaagcctgtgcggaggaagctgaaggagaagcagaagcagaaggaggagggcctgcaggccagcgctgagaaggccgagctgaagaagggcagcagcgaggagagcctgggagaagatcctggcctggcccctgagcccctgcccaccgtgaaggccaccagccccctcatcgaggagacccccatcggcagcatcaaggacaaggtgaaggccctgcagaagagggtggaggatgagcagaagggccgcagcaagctgcccatccgggtgaagggcaaggaggatgtgcccaagaagaccacccaccggccccaccctgctgccagccccagcctgaagtcagaaagacatgcccctggcagccccagccccaagacagagcggcacagcaccctgagcagcagcgccaagacagagcggcacccccctgtgagccccagcagcaagacagagaagcacagccctgtgagccccagcgccaagacagagcggcacagccctgccagcagcagcagcaagacagagaagcacagccctgtgagccccagcaccaagacagagcggcacagccctgtgagcagcaccaagacagagcggcacccccctgtgagccccagcggcaagacagacaagaggcctcctgtgagccccagcggccgcacagagaagcacccccctgtgtccccaggccgcacagagaagaggctgcctgtgagccccagcggccgcacagacaagcaccagcctgtgtccacagctgggaagacagagaagcacctgcctgtgagccccagcggcaagacagagaagcagccccctgtgagccccaccagcaagacagagcgcatcgaggagaccatgtctgtgcgggagctgatgaaggccttccagagcggccaggaccccagcaagcacaagacaggcctgtttgagcacaagagcgccaagcagaagcagccccaggagaagggcaaggtgcgggtggagaaggagaagggccccatcctgacccagcgggaggcccagaagacagagaaccagaccatcaagaggggccagaggctgcctgtgactggaacagctgagagcaagaggggcgtgcgggtgagcagcattggagtgaagaaggaggatgctgctgggggcaaggagaaggtgctgagccacaagatccctgagcctgtgcagagcgtgcctgaggaggagagccaccgggagagcgaggtgcccaaggagaagatggctgatgagcagggcgacatggacctgcagatcagcccagacaggaagaccagcacagacttcagcgaggtgatcaagcaggagctggaggacaatgacaagtaccagcagttccggctgtctgaggagacagagaaggcccagctgcacctggaccaggtgctgaccagccccttcaacaccaccttccccctggactacatgaaggatgagttcctgcctgccctgagcctgcagagcggggccctggatggcagcagcgagagcctgaagaatgaaggagtggccggcagcccctgtggcagcctgatggagggcaccccccagatcagcagcgaggagagctacaagcatgagggcctggccgagaccccagagaccagccctgagagcctgtccttcagccccaagaagtctgaggagcagacaggagagaccaaggagagcaccaagacagagaccaccacagagatccgctctgagaaggagcaccccaccaccaaggacatcaccggcggcagcgaggagcggggggccaccgtgacagaggacagcgagaccagcacagagagcttccagaaggaggccaccctgggcagccccaaggacaccagccccaagaggcaggatgactgcaccggcagctgcagcgtggccctggccaaggagacccccaccggcctgacagaggaggccgcctgtgatgagggccagaggaccttcggcagcagcgcccacaagacccagacagattctgaggtgcaggagagcacagccaccagtgatgagaccaaggccctgcccctgcctgaggcctctgtgaagacagacacaggaacagagagcaagccccagggcgtcatccgcagcccccagggcctggagctggccctgcccagccgggacagcgaggtgctgtctgctgtggctgatgacagcctggccgtgagccacaaggacagcctggaggccagccctgtgctggaggacaacagcagccacaagaccccagacagcctggagcccagccccctgaaggagagcccctgccgggacagcctggagagcagccctgtggagcccaagatgaaggccggcatcttccccagccacttccccctgcctgctgctgtggccaagacagagctgctgacagaggtggcctctgtgcgcagccggctgctgcgggaccctgatggcagcgcagaagatgacagcctggagcagaccagcctgatggagagcagcggcaagagccccctgagcccagacacccccagcagcgaggaggtgtcctatgaggtgacccccaagaccacagatgtgtccacccccaagccagctgtgattcatgaatgtgccgaggaggatgacagtgaaaatggagagaagaagcgcttcaccccagaggaggagatgttcaagatggtgaccaagatcaagatgtttgatgagctggagcaggaggccaagcagaagagggactacaagaaggagcccaagcaggaggagagcagcagcagcagtgaccctgatgctgactgcagcgtggatgtggatgagcccaagcacacaggcagcggggaggatgaaagtggagtgcctgtgctggtgaccagcgagagcaggaaggtgagcagcagcagcgagagcgagcctgagctggcccagctgaagaagggagctgacagcggcctgctgcctgagcctgtgatccgggtgcagccccccagccccctgcccagctccatggacagcaacagcagccctgaggaggtgcagttccagcctgtggtgtccaagcagtacaccttcaagatgaatgaagacacccaggaggagcccgggaagtctgaggaggagaaggacagcgagagccacctggctgaagatagacatgctgtgtccacagaagcagaagatagaagctatgacaagctgaacagagacacagaccagcccaagatctgtgatggccacggctgtgaggccatgagccccagcagcagcgctgcccctgtgagcagcggcctgcagagccccactggagatgatgtggatgagcagcctgtgatctacaaggagagcctggccctgcagggcacccatgagaaggacacagaaggagaggagctggatgtgtccagagctgagagcccccaggccgactgccccagcgagagcttcagcagcagcagcagcctgccccactgcctggtgtctgagggcaaggagctggatgaggacatcagcgccaccagcagcatccagaagacagaggtgaccaagacagatgagacctttgagaacctgcccaaggactgccccagccaggacagcagcatcaccacccagacagaccgcttctccatggatgtgcctgtgtctgacctggctgaaaatgatgagatctatgacccccagatcaccagcccctatgaaaatgtgcccagccagagcttcttcagcagcgaggagagcaagacccagacagatgccaaccacaccaccagcttccacagcagcgaggtgtacagcgtgaccatcaccagccctgtggaggatgtggtggtggccagcagcagcagcggcaccgtgctgagcaaggagagcaactttgagggccaggacatcaagatggagagccagcaggagagcaccctgtgggagatgcagagcgacagcgtgagcagcagctttgagcccaccatgtctgccaccaccaccgtggtgggggagcagatcagcaaggtgatcatcaccaagacagatgtggacagcgacagctggagcgagatccgggaggatgatgaggcctttgaggcccgggtgaaggaggaggagcagaagatcttcggcctgatggtggaccggcagagccagggcaccaccccagacaccaccccagcccggacccccacagaggagggcacccccaccagcgagcagaaccccttcctgttccaggagggcaagctgtttgagatgaccaggtctggggccatcgacatgaccaagaggagctatgcagatgagagcttccacttcttccagatcggccaggagagccgggaggagaccctgtctgaagatgtgaaggagggcgccaccggggctgaccccctgcccctggagaccagcgctgagagcctggccctgtctgagagcaaggagaccgtggatgatgaagctgacctgctgcctgatgatgtgtctgaggaggtggaggagatcccagccagtgatgcccagctgaacagccagatgggcatcagcgccagcacagagacccccaccaaggaggccgtgtctgtgggcaccaaggacctgcccaccgtgcagacaggagacatcccccccctgtctggagtgaagcagatcagctgcccagacagcagcgagcctgctgtgcaggtgcagctggacttcagcaccctgaccaggtctgtgtacagcgacagaggagatgacagcccagacagcagccctgaggagcagaagtctgtgattgagatccccacagcccccatggagaatgtgcccttcacagagagcaagagcaagatccctgtgaggaccatgcccaccagcaccccagccccacccagcgcagaatatgagagctctgtgtctgaggacttcctgagctctgtggatgaggagaacaaggcagatgaggccaagcccaagagcaagctgcctgtgaaggtgcccctgcagagggtggagcagcagctgagtgacctggacacctctgtgcagaagacagtggccccccagggccaggacatggccagcatcgccccagacaacagaagcaagtctgagagtgatgccagcagcctggacagcaagaccaagtgccctgtgaagaccaggagctacacagaaacagaaacagagagccgggagagagctgaggagctggagctggagagcgaggagggcgccacccggcccaagatcctgaccagccggctgcctgtgaagagccgcagcaccaccagcagctgccggggcggcaccagccccaccaaggagagcaaggagcacttctttgacctgtacagaaacagcattgagttctttgaggagatcagtgatgaggccagcaagctggtggaccggctgacccagagcgagcgggagcaggagatcgtgtctgatgatgagagcagcagcgccctggaggtgtctgtgattgagaacctgccccctgtggagacagagcacagcgtgcctgaggacatctttgacacccggcccatctgggatgagagcattgagaccctgattgagcgcatcccagatgaaaatggacatgaccatgctgaggacccccaggatgagcaggagagaattgaggagcggctggcctacatcgctgaccacctgggcttctcctggacagagctggcccgggagctggacttcacagaggagcagatccaccagatcagaattgagaaccccaacagcctgcaggaccagagccacgccctgctgaagtactggctggagagagatggcaagcacgccacagacaccaacctggtggagtgcctgaccaagatcaacaggatggacatcgtgcacctgatggagaccaacacagagcccctgcaggagcgcatcagccacagctatgcagaaattgagcagaccatcaccctggaccacagcgagggcttctctgtgctgcaggaggagctgtgcacagcccagcacaagcagaaggaggagcaggccgtgtccaaggagagcgagacctgtgaccacccccccatcgtgtctgaggaggacatctctgtgggctacagcaccttccaggatggagtgcccaagacagaaggagacagcagcgccacagccctcttcccccagacccacaaggagcaggtgcagcaggacttcagcggcaagatgcaggacctgcctgaggagagcagcctggagtaccagcaggagtactttgtgaccaccccaggcacagagaccagcgagacccagaaggccatgattgtgcccagcagccccagcaagaccccagaggaggtgtccaccccagctgaggaggagaagctgtacctgcagacccccaccagcagcgagcggggcggcagccccatcatccaggagcctgaggagcccagcgagcaccgggaggagagcagccccaggaagaccagcctggtgattgtggagagcgctgacaaccagcctgagacctgtgagcggctggatgaagatgctgcctttgagaagggagatgacatgcctgagatccccccagagaccgtgacagaggaggagtacattgatgaacatggccacacagtggtgaagaaggtgaccaggaagatcatcagaagatatgtgagcagcgagggcacagagaaggaggagatcatggtgcagggcatgccccaggagcctgtgaacatcgaggagggagatggctacagcaaggtgatcaagagggtggtgctgaagagtgacacagagcagagcgaggacaacaatgaatag

SEQ ID NO: 143614 - DNA, 5619 bp, synthetic construct
  misc_feature 1..5619: note = Description of Artificial Sequence: Synthetic coding sequence
  source 1..5619: mol_type = other DNA
atgatgaatgaagatgctgcccagaagagtgacagcggggagaagttcaacggcagcagccagaggaggaagaggcccaagaagagtgacagcaatgccagcttcctgcgggccgcccgggccggcaacctggacaaggtggtggagtacctgaagggcggcatcgacatcaacacctgcaaccagaatggcctgaatgccctgcacctggccgccaaggagggccacgtgggcctggtgcaggagctgctgggccggggcagctctgtggacagcgccaccaagaagggcaacacagccctgcacatcgccagcctggccggccaggccgaggtggtgaaggtgctggtgaaggagggcgccaacatcaatgcccagagccagaatggcttcacccccctgtacatggccgcccaggagaaccacattgatgtggtgaagtacctgctggagaatggagccaaccagagcacagccacagaagatggcttcacccccctggccgtggccctgcagcagggccacaaccaggccgtggccatcctgctggagaatgacaccaagggcaaggtgcggctgcctgccctgcacatcgccgccaggaaggatgacaccaagtctgctgccctgctgctgcagaatgaccacaatgctgatgtgcagagcaagatgatggtgaacagaaccacagagagcggcttcacccccctgcacatcgccgcccactatggaaatgtgaatgtggccaccctgctgctgaacagaggagctgctgtggacttcaccgccagaaatggcatcacccccctgcacgtggccagcaagaggggcaacaccaacatggtgaagctgctgctggacagaggaggccagattgatgccaagaccagagatggcctgacccccctgcactgtgccgcccggagcggccatgaccaggtggtggagctgctgctggagcggggggcccccctgctggcccggaccaagaatggcctgagccccctgcacatggccgcccagggcgaccacgtggagtgtgtgaagcacctgctgcagcacaaggcccctgtggatgatgtgaccctggactacctgacagccctgcacgtggccgcccactgcggccactacagagtgaccaagctgctgctggacaagagggccaaccccaatgcccgggccctgaatggcttcacccccctgcacatcgcctgcaagaagaaccgcatcaaggtgatggagctgctggtgaagtacggggccagcatccaggccatcacagagagcggcctgacccccatccacgtggccgccttcatgggccacctgaacatcgtgctgctgctgctgcagaatggagccagcccagatgtgaccaacatccggggggagacagccctgcacatggccgcccgggccggccaggtggaggtggtgcgctgcctgctgagaaatggagccctggtggatgcccgggcccgggaggagcagacccccctgcacatcgccagccggctgggcaagacagagatcgtgcagctgctgctgcagcacatggcccacccagatgctgccaccaccaacggctacacccccctgcacatcagcgcccgggagggccaggtggatgtggcctctgtgctgctggaggccggggccgcccacagcctggccaccaagaagggcttcacccccctgcacgtggccgccaagtatggcagcctggatgtggccaagctgctgctgcagaggagagctgctgctgacagcgctgggaagaatggcctgacccccctgcacgtggccgcccactatgacaaccagaaggtggccctgctgctgctggagaagggggccagcccccacgccacagccaagaatggctacacccccctgcacatcgccgccaagaagaaccagatgcagatcgccagcaccctgctgaactatggagctgagaccaacatcgtgaccaagcagggcgtgacccccctgcacctggccagccaggagggccacacagacatggtgaccctgctgctggacaagggggccaacatccacatgagcaccaagagcggcctgaccagcctgcacctggccgcccaggaggacaaggtgaatgtggccgacatcctgaccaagcatggagctgaccaggatgcccacaccaagctgggctacacccccctgattgtggcctgccactatggaaatgtgaagatggtgaacttcctgctgaagcagggcgccaacgtgaatgccaagaccaagaatggctacacccccctgcaccaggccgcccagcagggccacacccacatcatcaacgtgctgctgcagcacggggccaagcccaatgccaccacagccaatggaaacacagccctggccatcgccaagaggctgggctacatctctgtggtggacaccctgaaggtggtgacagaggaggtgaccaccaccaccaccaccatcacagagaagcacaagctgaatgtgcctgagaccatgacagaggtgctggatgtgtctgatgaggagggagatgacaccatgactggagatggaggagagtacctgcggcctgaggacctgaaggagctgggagatgacagcctgcccagcagccagttcctggatggcatgaactacctgcgctacagcctggagggcggccgcagtgacagcctgcgctccttcagcagtgacaggagccacaccctgagccacgccagctacctgcgggacagcgctgtgatggatgattctgtggtgatccccagccaccaggtgtccaccctggccaaggaggccgagaggaacagctaccgcctgtcctggggcacagagaacctggacaacgtggccctgagcagcagccccatccacagcggcttcctggtgtccttcatggtggatgcccggggcggggccatgaggggctgccgccacaacggcctgcgcatcatcatcccccccaggaaatgtacagcccccaccagggtgacctgccgcctggtgaagaggcaccggctggccaccatgccacccatggtggagggggagggcctggccagccggctgattgaggtgggccccagcggggcccagttcctgggcaagctgcacctgcccacagcccccccacccctgaatgaaggagagagcctggtgagccgcatcctgcagctgggccccccaggcaccaagttcctgggccctgtgattgtggagatcccccactttgctgccctgcggggcaaggagcgggagctggtggtgctgcggagtgaaaatggagacagctggaaggagcacttctgtgactacacagaagatgagctgaatgagatcctgaatggcatggatgaggtgctggacagccctgaggacctggagaagaagaggatctgccgcatcatcacccgggacttcccccagtactttgctgtggtgagccgcatcaagcaggacagcaacctgattggccctgagggcggcgtgctgagcagcacagtggtgccccaggtgcaggccgtgtttcctgagggcgccctgaccaagaggatccgggtgggcctgcaggcccagcccatgcacagcgagctggtgaagaagatcctgggcaacaaggccaccttcagccccatcgtgaccctggagcccaggaggaggaagttccacaagcccatcaccatgaccatccctgtgcccaaggccagcagtgatgtgatgctgaatggatttggaggagatgcccccaccctgcggctgctgtgcagcatcactggaggcaccaccccagcccagtgggaggacatcaccggcaccacccccctgacctttgtgaatgaatgtgtgtccttcaccaccaacgtgtctgcccgcttctggctgattgactgccggcagatccaggagagcgtgacctttgccagccaggtgtaccgggagatcatctgtgtgccctacatggccaagtttgtggtgtttgccaagagccatgaccccatcgaggcccggctgcgctgcttctgcatgacagatgacaaggtggacaagaccctggagcagcaggagaactttgctgaggtggcccggagcagagatgtggaggtgctggagggcaagcccatctacgtggactgcttcggcaacctggtgcccctgaccaagagcggccagcaccacatcttctccttctttgccttcaaggagaaccggctgcccctgtttgtgaaggtgcgggacaccacccaggagccctgtggccgcctgtccttcatgaaggagcccaagagcacccggggcctggtgcaccaggccatctgcaacctgaacatcaccctgcccatctacaccaaggagagcgagagtgaccaggagcaggaggaggagattgacatgaccagcgagaagaacccccaggatgagcaggagcgcatcgaggagcggctggcctacatcgctgaccacctgggcttctcctggacagagctggcccgggagctggacttcacagaggagcagatccaccagatcagaattgagaaccccaacagcctgcaggaccagagccacgccctgctgaagtactggctggagagagatggcaagcacgccacagacaccaacctggtggagtgcctgaccaagatcaacaggatggacatcgtgcacctgatggagaccaacacagagcccctgcaggagcgcatcagccacagctatgcagaaattgagcagaccatcaccctggaccacagcgagggcttctctgtgctgcaggaggagctgtgcacagcccagcacaagcagaaggaggagcaggccgtgtccaaggagagcgagacctgtgaccacccccccatcgtgtctgaggaggacatctctgtgggctacagcaccttccaggatggagtgcccaagacagaaggagacagcagcgccacagccctcttcccccagacccacaaggagcaggtgcagcaggacttcagcggcaagatgcaggacctgcctgaggagagcagcctggagtaccagcaggagtactttgtgaccaccccaggcacagagaccagcgagacccagaaggccatgattgtgcccagcagccccagcaagaccccagaggaggtgtccaccccagctgaggaggagaagctgtacctgcagacccccaccagcagcgagcggggcggcagccccatcatccaggagcctgaggagcccagcgagcaccgggaggagagcagccccaggaagaccagcctggtgattgtggagagcgctgacaaccagcctgagacctgtgagcggctggatgaagatgctgcctttgagaagggagatgacatgcctgagatccccccagagaccgtgacagaggaggagtacattgatgagcacggccacacagtggtgaagaaggtgaccaggaagatcatccgccgctacgtgtcctctgagggcacagagaaggaggagatcatggtgcagggcatgccccaggagcctgtgaacatcgaggagggagatggctacagcaaggtgatcaagagggtggtgctgaagagtgacacagagcagagcgaggacaacaatgaatag

SEQ ID NO: 143615 - DNA, 2988 bp, synthetic construct
  misc_feature 1..2988: note = Description of Artificial Sequence: Synthetic coding sequence
  source 1..2988: mol_type = other DNA
atggatgacagcgtggtgatccccagccaccaggtgtccaccctggccaaggaggccgagagaaattcctaccgcctgtcctggggcacagagaacctggacaacgtggccctgagcagcagccccatccacagcggcttcctggtgtccttcatggtggatgcccggggcggggccatgaggggctgccgccacaacggcctgcgcatcatcatcccccccaggaagtgcacagcccccaccagggtgacctgccgcctggtgaagaggcaccggctggccaccatgccacccatggtggagggggagggcctggccagccgcctcatcgaggtgggccccagcggggcccagttcctgggccctgtgattgtggagatcccccactttgctgccctgcggggcaaggagcgggagctggtggtgctgcggagtgaaaatggagacagctggaaggagcacttctgtgactacacagaagatgagctgaatgagatcctgaatggcatggatgaggtgctggacagccctgaggacctggagaagaagaggatctgccgcatcatcacccgggacttcccccagtactttgctgtggtgagccgcatcaagcaggacagcaacctgattggccctgagggcggcgtgctgagcagcacagtggtgccccaggtgcaggccgtgtttcctgagggcgccctgaccaagaggatccgggtgggcctgcaggcccagcccatgcacagcgagctggtgaagaagatcctgggcaacaaggccaccttcagccccatcgtgaccctggagcccaggaggaggaagttccacaagcccatcaccatgaccatccctgtgcccaaggccagcagtgatgtgatgctgaatggatttggaggagatgcccccaccctgcggctgctgtgcagcatcactggaggcaccaccccagcccagtgggaggacatcaccggcaccacccccctgacctttgtgaatgaatgtgtgtccttcaccaccaacgtgtctgcccgcttctggctgattgactgccggcagatccaggagagcgtgacctttgccagccaggtgtaccgggagatcatctgtgtgccctacatggccaagtttgtggtgtttgccaagagccatgaccccatcgaggcccggctgcgctgcttctgcatgacagatgacaaggtggacaagaccctggagcagcaggagaactttgctgaggtggcccggagcagagatgtggaggtgctggagggcaagcccatctacgtggactgcttcggcaacctggtgcccctgaccaagagcggccagcaccacatcttctccttctttgccttcaaggagaaccggctgcccctgtttgtgaaggtgcgggacaccacccaggagccctgtggccgcctgtccttcatgaaggagcccaagagcacccggggcctggtgcaccaggccatctgcaacctgaacatcaccctgcccatctacaccaagacagagaccaccacagagatccacccccaggatgagcaggagagaattgaggagcggctggcctacatcgctgaccacctgggcttctcctggacagagctggcccgggagctggacttcacagaggagcagatccaccagatcagaattgagaaccccaacagcctgcaggaccagagccacgccctgctgaagtactggctggagagagatggcaagcacgccacagacaccaacctggtggagtgcctgaccaagatcaacaggatggacatcgtgcacctgatggagaccaacacagagcccctgcaggagcgcatcagccacagctatgcagaaattgagcagaccatcaccctggaccacagcgagggcttctctgtgctgcaggaggagctgtgcacagcccagcacaagcagaaggaggagcaggccgtgtccaaggagagcgagacctgtgaccacccccccatcgtgtctgaggaggacatctctgtgggctacagcaccttccaggatggagtgcccaagacagaaggagacagcagcgccacagccctcttcccccagacccacaaggagcaggtgcagcaggacttcagcggcaagatgcaggacctgcctgaggagagcagcctggagtaccagcaggagtactttgtgaccaccccaggcacagagaccagcgagacccagaaggccatgattgtgcccagcagccccagcaagaccccagaggaggtgtccaccccagctgaggaggagaagctgtacctgcagacccccaccagcagcgagcggggcggcagccccatcatccaggagcctgaggagcccagcgagcaccgggaggagagcagccccaggaagaccagcctggtgattgtggagagcgctgacaaccagcctgagacctgtgagcggctggatgaagatgctgcctttgagaaggagctgacagaggagctgggggagctggaggccagcagtgatgaggaggccatggtgaccaccagggtggtgagaagaagagtcatcatccagggagatgacatgcctgagatccccccagagaccgtgacagaggaggagtacattgatgagcacggccacacagtggtgaagaaggtgaccaggaagatcatccgccgctacgtgtcctctgagggcacagagaaggaggagatcatggtgcagggcatgccccaggagcctgtgaacatcgaggagggagatggctacagcaaggtgatcaagagggtggtgctgaagagtgacacagagcagagcgaggtgaccctgtgtgagcccagcatcctgagcagcaccagccagttccaggccgagcctgtggagggcagaagagtgtccaaggtggtgaagaccaccgtggtgctgggggagaggatggagaagcacctgggggacagcagcctggccacagacctgcccagcgccaaggatgactttgaggagtag

SEQ ID NO: 143616 - DNA, 3345 bp, synthetic construct
  misc_feature 1..3345: note = Description of Artificial Sequence: Synthetic coding sequence
  source 1..3345: mol_type = other DNA
atgaccaccatgctgcagaagagtgacagcaatgccagcttcctgcgggccgcccgggccggcaacctggacaaggtggtggagtacctgaagggcggcatcgacatcaacacctgcaaccagaatggcctgaatgccctgcacctggccgccaaggagggccacgtgggcctggtgcaggagctgctgggccggggcagctctgtggacagcgccaccaagaagggcaacacagccctgcacatcgccagcctggccggccaggccgaggtggtgaaggtgctggtgaaggagggcgccaacatcaatgcccagagccagaatggcttcacccccctgtacatggccgcccaggagaaccacattgatgtggtgaagtacctgctggagaatggagccaaccagagcacagccacagaagatggcttcacccccctggccgtggccctgcagcagggccacaaccaggccgtggccatcctgctggagaatgacaccaagggcaaggtgcggctgcctgccctgcacatcgccgccaggaaggatgacaccaagtctgctgccctgctgctgcagaatgaccacaatgctgatgtgcagagcaagatgatggtgaacagaaccacagaaagtggcttcacccccctgcacatcgccgcccactatggaaatgtgaatgtggccaccctgctgctgaacagaggagctgctgtggacttcaccgccagaaatggcatcacccccctgcacgtggccagcaagaggggcaacaccaacatggtgaagctgctgctggaccggggcggccagattgatgccaagaccagagatggcctgacccccctgcactgtgccgcccggagcggccatgaccaggtggtggagctgctgctggagcggggggcccccctgctggcccggaccaagaatggcctgagccccctgcacatggccgcccagggcgaccacgtggagtgtgtgaagcacctgctgcagcacaaggcccctgtggatgatgtgaccctggactacctgacagccctgcacgtggccgcccactgcggccactacagagtgaccaagctgctgctggacaagagggccaaccccaatgcccgggccctgaatggcttcacccccctgcacatcgcctgcaagaagaaccgcatcaaggtgatggagctgctggtgaagtatggagccagcatccaggccatcacagaaagtggcctgacccccatccacgtggccgccttcatgggccacctgaacatcgtgctgctgctgctgcagaatggagccagcccagatgtgaccaacatccggggggagacagccctgcacatggccgcccgggccggccaggtggaggtggtgcgctgcctgctgagaaatggagccctggtggatgcccgggcccgggaggagcagacccccctgcacatcgccagccggctgggcaagacagaaattgtgcagctgctgctgcagcacatggcccacccagatgctgccaccaccaacggctacacccccctgcacatcagcgcccgggagggccaggtggatgtggcctctgtgctgctggaggccggggccgcccacagcctggccaccaagaagggcttcacccccctgcacgtggccgccaagtatggcagcctggatgtggccaagctgctgctgcagaggagagctgctgctgacagcgctgggaagaatggcctgacccccctgcacgtggccgcccactatgacaaccagaaggtggccctgctgctgctggagaagggggccagcccccacgccacagccaagaatggctacacccccctgcacatcgccgccaagaagaaccagatgcagatcgccagcaccctgctgaactacggggctgagaccaacatcgtgaccaagcagggcgtgacccccctgcacctggccagccaggagggccacacagacatggtgaccctgctgctggacaagggggccaacatccacatgagcaccaagagcggcctgaccagcctgcacctggccgcccaggaggacaaggtgaatgtggccgacatcctgaccaagcacggggctgaccaggatgcccacaccaagctgggctacacccccctcatcgtggcctgccactatggaaatgtgaagatggtgaacttcctgctgaagcagggcgccaacgtgaatgccaagaccaagaatggctacacccccctgcaccaggccgcccagcagggccacacccacatcatcaacgtgctgctgcagcacggggccaagcccaatgccaccacagccaacggcaacacagccctggccatcgccaagaggctgggctacatctctgtggtggacaccctgaaggtggtgacagaggaggtgaccaccaccaccaccaccatcacagagaagcacaagctgaatgtgcctgagaccatgacagaggtgctggatgtgtctgatgaggagggagatgacaccatgactggagatggaggagagtacctgcggcctgaggacctgaaggagctgggagatgacagcctgcccagcagccagttcctggatggcatgaactacctgcgctacagcctggagggcggccgcagtgacagcctgcggagcttcagcagtgacaggagccacaccctgagccacgccagctacctgcgggacagcgctgtgatggatgacagcgtggtgatccccagccaccaggtgtccaccctggccaaggaggccgagagaaattcctaccgcctgtcctggggcacagagaacctggacaacgtggccctgagcagcagccccatccacagcggcttcctggtgtccttcatggtggatgcccggggcggggccatgaggggctgccgccacaacggcctgcgcatcatcatcccccccaggaagtgcacagcccccaccagggtgacctgccgcctggtgaagaggcaccggctggccaccatgccacccatggtggagggggagggcctggccagccgcctcatcgaggtgggccccagcggggcccagttcctgggcaagctgcacctgcccacagcccccccacccctgaatgaaggagagagcctggtgagccgcatcctgcagctgggccccccaggcaccaagttcctgggccctgtgattgtggagatcccccactttgctgccctgcggggcaaggagcgggagctggtggtgctgcggagtgaaaatggagacagctggaaggagcacttctgtgactacacagaagatgagctgaatgagatcctgaatggcatggatgaggtgctggacagccctgaggacctggagtag

SEQ ID NO: 143617 - DNA, 5193 bp, synthetic construct
  misc_feature 1..5193: note = Description of Artificial Sequence: Synthetic coding sequence
  source 1..5193: mol_type = other DNA
atgatgaatgaagatgctgcccagaagagtgacagcggggagaagttcaacggcagcagccagaggaggaagaggcccaagaaggtgacctgcccccagatgaagccagaggccgccaacatcgagaagagtgacagcaatgccagcttcctgcgggccgcccgggccggcaacctggacaaggtggtggagtacctgaagggcggcatcgacatcaacacctgcaaccagaatggcctgaatgccctgcacctggccgccaaggagggccacgtgggcctggtgcaggagctgctgggccggggcagctctgtggacagcgccaccaagaagggcaacacagccctgcacatcgccagcctggccggccaggccgaggtggtgaaggtgctggtgaaggagggcgccaacatcaatgcccagagccagaatggcttcacccccctgtacatggccgcccaggagaaccacattgatgtggtgaagtacctgctggagaatggagccaaccagagcacagccacagaagatggcttcacccccctggccgtggccctgcagcagggccacaaccaggccgtggccatcctgctggagaatgacaccaagggcaaggtgcggctgcctgccctgcacatcgccgccaggaaggatgacaccaagtctgctgccctgctgctgcagaatgaccacaatgctgatgtgcagagcaagatgatggtgaacagaaccacagaaagtggcttcacccccctgcacatcgccgcccactatggaaatgtgaatgtggccaccctgctgctgaacagaggagctgctgtggacttcaccgccagaaatggcatcacccccctgcacgtggccagcaagaggggcaacaccaacatggtgaagctgctgctggaccggggcggccagattgatgccaagaccagagatggcctgacccccctgcactgtgccgcccggagcggccatgaccaggtggtggagctgctgctggagcggggggcccccctgctggcccggaccaagaatggcctgagccccctgcacatggccgcccagggcgaccacgtggagtgtgtgaagcacctgctgcagcacaaggcccctgtggatgatgtgaccctggactacctgacagccctgcacgtggccgcccactgcggccactacagagtgaccaagctgctgctggacaagagggccaaccccaatgcccgggccctgaatggcttcacccccctgcacatcgcctgcaagaagaaccgcatcaaggtgatggagctgctggtgaagtatggagccagcatccaggccatcacagaaagtggcctgacccccatccacgtggccgccttcatgggccacctgaacatcgtgctgctgctgctgcagaatggagccagcccagatgtgaccaacatccggggggagacagccctgcacatggccgcccgggccggccaggtggaggtggtgcgctgcctgctgagaaatggagccctggtggatgcccgggcccgggaggagcagacccccctgcacatcgccagccggctgggcaagacagaaattgtgcagctgctgctgcagcacatggcccacccagatgctgccaccaccaacggctacacccccctgcacatcagcgcccgggagggccaggtggatgtggcctctgtgctgctggaggccggggccgcccacagcctggccaccaagaagggcttcacccccctgcacgtggccgccaagtatggcagcctggatgtggccaagctgctgctgcagaggagagctgctgctgacagcgctgggaagaatggcctgacccccctgcacgtggccgcccactatgacaaccagaaggtggccctgctgctgctggagaagggggccagcccccacgccacagccaagaatggctacacccccctgcacatcgccgccaagaagaaccagatgcagatcgccagcaccctgctgaactacggggctgagaccaacatcgtgaccaagcagggcgtgacccccctgcacctggccagccaggagggccacacagacatggtgaccctgctgctggacaagggggccaacatccacatgagcaccaagagcggcctgaccagcctgcacctggccgcccaggaggacaaggtgaatgtggccgacatcctgaccaagcacggggctgaccaggatgcccacaccaagctgggctacacccccctcatcgtggcctgccactatggaaatgtgaagatggtgaacttcctgctgaagcagggcgccaacgtgaatgccaagaccaagaatggctacacccccctgcaccaggccgcccagcagggccacacccacatcatcaacgtgctgctgcagcacggggccaagcccaatgccaccacagccaacggcaacacagccctggccatcgccaagaggctgggctacatctctgtggtggacaccctgaaggtggtgacagaggaggtgaccaccaccaccaccaccatcacagagaagcacaagctgaatgtgcctgagaccatgacagaggtgctggatgtgtctgatgaggagggagatgacaccatgactggagatggaggagagtacctgcggcctgaggacctgaaggagctgggagatgacagcctgcccagcagccagttcctggatggcatgaactacctgcgctacagcctggagggcggccgcagtgacagcctgcggagcttcagcagtgacaggagccacaccctgagccacgccagctacctgcgggacagcgctgtgatggatgacagcgtggtgatccccagccaccaggtgtccaccctggccaaggaggccgagagaaattcctaccgcctgtcctggggcacagagaacctggacaacgtggccctgagcagcagccccatccacagcggcttcctggtgtccttcatggtggatgcccggggcggggccatgaggggctgccgccacaacggcctgcgcatcatcatcccccccaggaagtgcacagcccccaccagggtgacctgccgcctggtgaagaggcaccggctggccaccatgccacccatggtggagggggagggcctggccagccgcctcatcgaggtgggccccagcggggcccagttcctgggcaagctgcacctgcccacagcccccccacccctgaatgaaggagagagcctggtgagccgcatcctgcagctgggccccccaggcaccaagttcctgggccctgtgattgtggagatcccccactttgctgccctgcggggcaaggagcgggagctggtggtgctgcggagtgaaaatggagacagctggaaggagcacttctgtgactacacagaagatgagctgaatgagatcctgaatggcatggatgaggtgctggacagccctgaggacctggagaagaagaggatctgccgcatcatcacccgggacttcccccagtactttgctgtggtgagccgcatcaagcaggacagcaacctgattggccctgagggcggcgtgctgagcagcacagtggtgccccaggtgcaggccgtgtttcctgagggcgccctgaccaagaggatccgggtgggcctgcaggcccagcccatgcacagcgagctggtgaagaagatcctgggcaacaaggccaccttcagccccatcgtgaccctggagcccaggaggaggaagttccacaagcccatcaccatgaccatccctgtgcccaaggccagcagtgatgtgatgctgaatggatttggaggagatgcccccaccctgcggctgctgtgcagcatcaccggcggcaccaccccagcccagtgggaggacatcaccggcaccacccccctgacctttgtgaatgaatgtgtgtccttcaccaccaacgtgtctgcccgcttctggctgattgactgccggcagatccaggagagcgtgacctttgccagccaggtgtaccgggagatcatctgtgtgccctacatggccaagtttgtggtgtttgccaagagccatgaccccatcgaggcccggctgcgctgcttctgcatgacagatgacaaggtggacaagaccctggagcagcaggagaactttgctgaggtggcccggagcagagatgtggaggtgctggagggcaagcccatctacgtggactgctttggaaacctggtgcccctgaccaagagcggccagcaccacatcttctccttctttgccttcaaggaaaatcggctgcccctgtttgtgaaggtgcgggacaccacccaggagccctgtggccgcctgtccttcatgaaggagcccaagagcacccggggcctggtgcaccaggccatctgcaacctgaacatcaccctgcccatctacaccaaggagagcgagagtgaccaggagcaggaggaggagattgacatgaccagcgagaagaatgatgaaacagagagcacagagacctctgtgctgaagagccacctggtgaatgaggtgcctgtgctggccagcccagacctgctgtctgaggtgtctgagatgaagcaggacctgatcaagatgacagccatcctgaccacagatgtgtctgacaaggccggcagcatcaaggtgaaggagctggtgaaggctgctgaggaggagcccggggagccctttgagatcgtggagcgggtgaaggaggacctggagaaggtgaatgagatcctgcggagcggcacctgcaccagagatgagagctctgtgcagagcagccgctctgagcggggcctggtggaggaggagtgggtgattgtgtctgatgaggagattgaggaggcccggcagaaggcccccctggagatcacagagtacccctgtgtggaggtgagaattgacaaggagatcaagggcaaggtggagaaggacagcacaggcctggtgaactacctgacagatgacctgaacacctgtgtgcccctgcccaaggagcagctgcagacagtgcaggacaaggccggcaagaagtgtgaggccctggccgtgggccgcagcagcgagaaggagggcaaggacatccccccagatgagacccagagcacccagaagcagcacaagcccagcctgggcatcaagaagcctgtgcggaggaagctgaaggagaagcagaagcagaagtag

SEQ ID NO: 143618 - DNA, 5592 bp, synthetic construct
  misc_feature 1..5592: note = Description of Artificial Sequence: Synthetic coding sequence
  source 1..5592: mol_type = other DNA
atgaccaccatgctgcagaagagtgacagcaatgccagcttcctgcgggccgcccgggccggcaacctggacaaggtggtggagtacctgaagggcggcatcgacatcaacacctgcaaccagaatggcctgaatgccctgcacctggccgccaaggagggccacgtgggcctggtgcaggagctgctgggccggggcagctctgtggacagcgccaccaagaagggcaacacagccctgcacatcgccagcctggccggccaggccgaggtggtgaaggtgctggtgaaggagggcgccaacatcaatgcccagagccagaatggcttcacccccctgtacatggccgcccaggagaaccacattgatgtggtgaagtacctgctggagaatggagccaaccagagcacagccacagaagatggcttcacccccctggccgtggccctgcagcagggccacaaccaggccgtggccatcctgctggagaatgacaccaagggcaaggtgcggctgcctgccctgcacatcgccgccaggaaggatgacaccaagtctgctgccctgctgctgcagaatgaccacaatgctgatgtgcagagcaagatgatggtgaacagaaccacagaaagtggcttcacccccctgcacatcgccgcccactatggaaatgtgaatgtggccaccctgctgctgaacagaggagctgctgtggacttcaccgccagaaatggcatcacccccctgcacgtggccagcaagaggggcaacaccaacatggtgaagctgctgctggaccggggcggccagattgatgccaagaccagagatggcctgacccccctgcactgtgccgcccggagcggccatgaccaggtggtggagctgctgctggagcggggggcccccctgctggcccggaccaagaatggcctgagccccctgcacatggccgcccagggcgaccacgtggagtgtgtgaagcacctgctgcagcacaaggcccctgtggatgatgtgaccctggactacctgacagccctgcacgtggccgcccactgcggccactacagagtgaccaagctgctgctggacaagagggccaaccccaatgcccgggccctgaatggcttcacccccctgcacatcgcctgcaagaagaaccgcatcaaggtgatggagctgctggtgaagtatggagccagcatccaggccatcacagaaagtggcctgacccccatccacgtggccgccttcatgggccacctgaacatcgtgctgctgctgctgcagaatggagccagcccagatgtgaccaacatccggggggagacagccctgcacatggccgcccgggccggccaggtggaggtggtgcgctgcctgctgagaaatggagccctggtggatgcccgggcccgggaggagcagacccccctgcacatcgccagccggctgggcaagacagaaattgtgcagctgctgctgcagcacatggcccacccagatgctgccaccaccaacggctacacccccctgcacatcagcgcccgggagggccaggtggatgtggcctctgtgctgctggaggccggggccgcccacagcctggccaccaagaagggcttcacccccctgcacgtggccgccaagtatggcagcctggatgtggccaagctgctgctgcagaggagagctgctgctgacagcgctgggaagaatggcctgacccccctgcacgtggccgcccactatgacaaccagaaggtggccctgctgctgctggagaagggggccagcccccacgccacagccaagaatggctacacccccctgcacatcgccgccaagaagaaccagatgcagatcgccagcaccctgctgaactacggggctgagaccaacatcgtgaccaagcagggcgtgacccccctgcacctggccagccaggagggccacacagacatggtgaccctgctgctggacaagggggccaacatccacatgagcaccaagagcggcctgaccagcctgcacctggccgcccaggaggacaaggtgaatgtggccgacatcctgaccaagcacggggctgaccaggatgcccacaccaagctgggctacacccccctcatcgtggcctgccactatggaaatgtgaagatggtgaacttcctgctgaagcagggcgccaacgtgaatgccaagaccaagaatggctacacccccctgcaccaggccgcccagcagggccacacccacatcatcaacgtgctgctgcagcacggggccaagcccaatgccaccacagccaacggcaacacagccctggccatcgccaagaggctgggctacatctctgtggtggacaccctgaaggtggtgacagaggaggtgaccaccaccaccaccaccatcacagagaagcacaagctgaatgtgcctgagaccatgacagaggtgctggatgtgtctgatgaggagggagatgacaccatgactggagatggaggagagtacctgcggcctgaggacctgaaggagctgggagatgacagcctgcccagcagccagttcctggatggcatgaactacctgcgctacagcctggagggcggccgcagtgacagcctgcggagcttcagcagtgacaggagccacaccctgagccacgccagctacctgcgggacagcgctgtgatggatgacagcgtggtgatccccagccaccaggtgtccaccctggccaaggaggccgagagaaattcctaccgcctgtcctggggcacagagaacctggacaacgtggccctgagcagcagccccatccacagcggccgggccagcccctgcctggagcgggacaacagcagcttcctggtgtccttcatggtggatgcccggggcggggccatgaggggctgccgccacaacggcctgcgcatcatcatcccccccaggaagtgcacagcccccaccagggtgacctgccgcctggtgaagaggcaccggctggccaccatgccacccatggtggagggggagggcctggccagccgcctcatcgaggtgggccccagcggggcccagttcctgggcaagctgcacctgcccacagcccccccacccctgaatgaaggagagagcctggtgagccgcatcctgcagctgggccccccaggcaccaagttcctgggccctgtgattgtggagatcccccactttgctgccctgcggggcaaggagcgggagctggtggtgctgcggagtgaaaatggagacagctggaaggagcacttctgtgactacacagaagatgagctgaatgagatcctgaatggcatggatgaggtgctggacagccctgaggacctggagaagaagaggatctgccgcatcatcacccgggacttcccccagtactttgctgtggtgagccgcatcaagcaggacagcaacctgattggccctgagggcggcgtgctgagcagcacagtggtgccccaggtgcaggccgtgtttcctgagggcgccctgaccaagaggatccgggtgggcctgcaggcccagcccatgcacagcgagctggtgaagaagatcctgggcaacaaggccaccttcagccccatcgtgaccctggagcccaggaggaggaagttccacaagcccatcaccatgaccatccctgtgcccaaggccagcagtgatgtgatgctgaatggatttggaggagatgcccccaccctgcggctgctgtgcagcatcaccggcggcaccaccccagcccagtgggaggacatcaccggcaccacccccctgacctttgtgaatgaatgtgtgtccttcaccaccaacgtgtctgcccgcttctggctgattgactgccggcagatccaggagagcgtgacctttgccagccaggtgtaccgggagatcatctgtgtgccctacatggccaagtttgtggtgtttgccaagagccatgaccccatcgaggcccggctgcgctgcttctgcatgacagatgacaaggtggacaagaccctggagcagcaggagaactttgctgaggtggcccggagcagagatgtggaggtgctggagggcaagcccatctacgtggactgctttggaaacctggtgcccctgaccaagagcggccagcaccacatcttctccttctttgccttcaaggaaaatcggctgcccctgtttgtgaaggtgcgggacaccacccaggagccctgtggccgcctgtccttcatgaaggagcccaagagcacccggggcctggtgcaccaggccatctgcaacctgaacatcaccctgcccatctacaccaaggagagcgagagtgaccaggagcaggaggaggagattgacatgaccagcgagaagaacccccaggatgagcaggagagaattgaggagcggctggcctacatcgctgaccacctgggcttctcctggacagagctggcccgggagctggacttcacagaggagcagatccaccagatcagaattgagaaccccaacagcctgcaggaccagagccacgccctgctgaagtactggctggagagagatggcaagcacgccacagacaccaacctggtggagtgcctgaccaagatcaacaggatggacatcgtgcacctgatggagaccaacacagagcccctgcaggagcgcatcagccacagctatgcagaaattgagcagaccatcaccctggaccacagcgagggcttctctgtgctgcaggaggagctgtgcacagcccagcacaagcagaaggaggagcaggccgtgtccaaggagagcgagacctgtgaccacccccccatcgtgtctgaggaggacatctctgtgggctacagcaccttccaggatggagtgcccaagacagaaggagacagcagcgccacagccctcttcccccagacccacaaggagcaggtgcagcaggacttcagcggcaagatgcaggacctgcctgaggagagcagcctggagtaccagcaggagtactttgtgaccaccccaggcacagagaccagcgagacccagaaggccatgattgtgcccagcagccccagcaagaccccagaggaggtgtccaccccagctgaggaggagaagctgtacctgcagacccccaccagcagcgagcggggcggcagccccatcatccaggagcctgaggagcccagcgagcaccgggaggagagcagccccaggaagaccagcctggtgattgtggagagcgctgacaaccagcctgagacctgtgagcggctggatgaagatgctgcctttgagaagggagatgacatgcctgagatccccccagagaccgtgacagaggaggagtacattgatgaacatggccacacagtggtgaagaaggtgaccaggaagatcatcagaagatatgtgagcagcgagggcacagagaaggaggagatcatggtgcagggcatgccccaggagcctgtgaacatcgaggagggagatggctacagcaaggtgatcaagagggtggtgctgaagagtgacacagagcagagcgaggacaacaatgaatag

SEQ ID NO: 143619 - DNA, 5586 bp, synthetic construct
  misc_feature 1..5586: note = Description of Artificial Sequence: Synthetic coding sequence
  source 1..5586: mol_type = other DNA
atggccagcagcgccagcagcagccctgctggaacagaagattctgccccagcccagggcggcttcggcagtgactacagccgcagcagcaggaagagtgatgccaatgccagctacctgcgggccgcccgggccggccacctggagaaggccctggactacatcaagaatggagtggacatcaacatctgcaaccagaatggcctgaatgccctgcacctggccagcaaggagggccacgtggaggtggtgtctgagctgctgcagcgggaggccaacgtggatgctgccaccaagaagggcaacacagccctgcacatcgccagcctggccggccaggccgaggtggtgaaggtgctggtgaccaatggagccaacgtgaatgcccagagccagaatggcttcacccccctgtacatggccgcccaggagaaccacctggaggtggtgaagttcctgctggacaacggggccagccagagcctggccacagaagatggcttcacccccctggccgtggccctgcagcagggccatgaccaggtggtgtccctgctgctggagaatgacaccaagggcaaggtgcggctgcctgccctgcacatcgccgccaggaaggatgacaccaaggccgccgccctgctgctgcagaatgacaacaatgctgatgtggagagcaagagcggcttcacccccctgcacatcgccgcccactacggcaacatcaacgtggccaccctgctgctgaacagagctgctgctgtggacttcaccgccagaaatgacatcacccccctgcacgtggccagcaagagaggaaatgccaacatggtgaagctgctgctggacagaggagccaagattgatgccaagaccagagatggcctgacccccctgcactgtggggcccggagcggccacgagcaggtggtggagatgctgctggaccgggccgcccccatcctgagcaagaccaagaatggcctgagccccctgcacatggccacccagggcgaccacctgaactgtgtgcagctgctgctgcagcacaacgtgcctgtggatgatgtgaccaatgactacctgacagccctgcacgtggccgcccactgcggccactacaaggtggccaaggtgctgctggacaagaaggccaaccccaatgccaaggccctgaatggcttcacccccctgcacatcgcctgcaagaagaaccgcatcaaggtgatggagctgctgctgaagcacggggccagcatccaggccgtgacagagagcggcctgacccccatccacgtggccgccttcatgggccacgtgaacatcgtgtcccagctgatgcaccacggggccagccccaacaccaccaacgtgcggggggagacagccctgcacatggccgcccggagcggccaggccgaggtggtgcgctacctggtgcaggatggagcccaggtggaggccaaggccaaggatgaccagacccccctgcacatcagcgcccggctgggcaaggctgacatcgtgcagcagctgctgcagcagggcgccagccccaatgctgccaccaccagcggctacacccccctgcacctgagcgcccgggagggccatgaagatgtggccgccttcctgctggaccacggggccagcctgagcatcaccaccaagaagggcttcacccccctgcacgtggccgccaagtatggcaagctggaggtggccaacctgctgctgcagaagagcgccagcccagatgctgctgggaagagcggcctgacccccctgcacgtggccgcccactatgacaaccagaaggtggccctgctgctgctggaccagggcgccagcccccacgccgccgccaagaatggctacacccccctgcacatcgccgccaagaagaaccagatggacatcgccaccaccctgctggagtatggagcagatgccaatgctgtgacccggcagggcatcgcctctgtgcacctggccgcccaggagggccacgtggacatggtgtccctgctgctgggcagaaatgccaacgtgaacctgagcaacaagagcggcctgacccccctgcacctggccgcccaggaggacagagtgaatgtggccgaggtgctggtgaaccagggcgcccacgtggatgcccagaccaagatgggctacacccccctgcacgtgggctgccactacggcaacatcaagatcgtgaacttcctgctgcagcacagcgccaaggtgaatgccaagaccaagaatggctacacccccctgcaccaggccgcccagcagggccacacccacatcatcaacgtgctgctgcagaacaatgccagccccaatgagctgactgtgaatggaaacacagccctgggcatcgcccggcggctgggctacatctctgtggtggacaccctgaagatcgtgacagaggagaccatgaccaccaccaccgtgacagagaagcacaagatgaatgtgcctgagaccatgaatgaggtgctggacatgtctgatgatgaggtgaggaaggccaatgcccctgagatgctgagtgatggagagtacatcagtgatgtggaggagggagaagatgccatgactggagacacagacaagtacctgggcccccaggacctgaaggagctgggagatgacagcctgcctgctgagggctacatgggcttcagcctgggcgcccggagcgccagcctgcggagcttcagcagtgacaggagctacaccctgaacagaagcagctatgcccgggacagcatgatgattgaggagctgctggtgcccagcaaggagcagcacctgaccttcacccgggagtttgacagcgacagcctgcggcactacagctgggccgctgacaccctggacaacgtgaacctggtgagcagccccatccacagcggcttcctggtgtccttcatggtggatgcccggggcggctccatgaggggcagccgccaccacggcatgaggatcatcatcccccccaggaaatgtacagcccccacccgcatcacctgccgcctggtgaagaggcacaagctggccaaccccccacccatggtggagggggagggcctggccagccggctggtggagatgggccctgctggggcccagttcctgggccctgtgattgtggagatcccccacttcggctccatgaggggcaaggagcgggagctgattgtgctgcggagtgaaaatggagagacctggaaggagcaccagtttgacagcaagaatgaagacctgacagagctgctgaatggcatggatgaggagctggacagccctgaggagctgggcaagaagaggatctgccgcatcatcaccaaggacttcccccagtactttgctgtggtgagccgcatcaagcaggagagcaaccagatcggccctgagggcggcatcctgagcagcaccaccgtgcccctggtgcaggccagcttccctgagggcgccctgaccaagaggatccgggtgggcctgcaggcccagcctgtgcctgatgagatcgtgaagaagatcctgggcaacaaggccaccttcagccccatcgtgacagtggagcccaggaggaggaagttccacaagcccatcaccatgaccatccctgtgcccccacccagcggggagggcgtgtccaatggctacaagggggacaccacccccaacctgcggctgctgtgcagcatcactggaggcaccagccctgcccagtgggaggacatcaccggcaccacccccctgaccttcatcaaggactgtgtgtccttcaccaccaacgtgtctgcccgcttctggctggccgactgccaccaggtgctggagaccgtgggcctggccacccagctgtaccgggagctgatctgtgtgccctacatggccaagtttgtggtgtttgccaagatgaatgaccctgtggagagcagcctgcgctgcttctgcatgacagatgacaaggtggacaagaccctggagcagcaggagaactttgaggaggtggcccggagcaaggacatcgaggtgctggagggcaagcccatctacgtggactgctacggcaacctggcccccctgaccaagggcggccagcagctggtgttcaacttctacagcttcaaggagaaccggctgcccttcagcatcaagatccgggacaccagccaggagccctgtggccgcctgtccttcctgaaggagcccaagaccaccaagggcctgccccagacagctgtgtgcaacctgaacatcaccctgcctgcccacaagaagattgagaagacagaccggcggcagagctttgccagcctggccctgaggaagcgctacagctacctgacagagcccggcatgagcccccagagcccctgtgagaggacagacatccgcatggccatcgtggccgaccacctgggcctgtcctggacagagctggcccgggagctgaacttctctgtggatgagatcaaccagatccgggtggagaaccccaacagcctcatcagccagagcttcatgctgctgaagaagtgggtgaccagagatggcaagaatgccaccacagatgccctgacctctgtgctgaccaagatcaacagaattgatattgtgaccctgctggagggccccatctttgattatggcaacatcagcggcaccaggagctttgctgatgagaacaacgtgttccatgaccctgtggatggctaccccagcctgcaggtggagctggagacccccaccggcctgcactacaccccacccacccccttccagcaggatgactacttcagtgacatcagcagcattgagagccccctgcggacccccagccggctgagtgatggcctggtgcccagccagggcaacatcgagcacagcgcagatggcccccctgtggtgacagcagaagatgccagcctggaggacagcaagctggaggacagcgtgcccctgacagagatgcctgaggccgtggatgtggatgagagccagctggagaatgtgtgcctgtcctggcagaatgagaccagcagcggcaacctggagagctgtgcccaggcccggcgggtgactggaggcctgctggaccggctggatgacagcccagaccagtgccgggacagcatcaccagctacctgaagggggaggccggcaagtttgaggccaacggcagccacacagagatcaccccagaggccaagaccaagagctacttccctgagagccagaatgatgtgggcaagcagagcaccaaggagaccctgaagcccaagatccacggcagcggccacgtggaggagcccgccagccccctggccgcctaccagaagagcctggaggagaccagcaagctgatcatcgaggagaccaagccctgtgtgcctgtgtccatgaagaagatgagcaggaccagccctgcagatggcaagccccggctgagcctgcacgaggaggagggcagcagcggcagcgagcagaagcagggcgagggcttcaaggtgaagaccaagaaggagatccgccacgtggagaagaagagccacagctag

SEQ ID NO: 143620 - DNA, 5607 bp, synthetic construct
  misc_feature 1..5607: note = Description of Artificial Sequence: Synthetic coding sequence
  source 1..5607: mol_type = other DNA
atgtctgaggagcccaaggagaagaatgccaagccagcccacaggaagaggaagggcaagaagagtgatgccaatgccagctacctgcgggccgcccgggccggccacctggagaaggccctggactacatcaagaatggagtggacatcaacatctgcaaccagaatggcctgaatgccctgcacctggccagcaaggagggccacgtggaggtggtgtctgagctgctgcagcgggaggccaacgtggatgctgccaccaagaagggcaacacagccctgcacatcgccagcctggccggccaggccgaggtggtgaaggtgctggtgaccaacggggccaacgtgaatgcccagagccagaatggcttcacccccctgtacatggccgcccaggagaaccacctggaggtggtgaagttcctgctggacaatggagccagccagagcctggccacagaagatggcttcacccccctggccgtggccctgcagcagggccatgaccaggtggtgtccctgctgctggagaatgacaccaagggcaaggtgcggctgcctgccctgcacatcgccgccaggaaggatgacaccaaggctgctgccctgctgctgcagaatgacaacaatgctgatgtggagagcaagagcggcttcacccccctgcacatcgccgcccactacggcaacatcaacgtggccaccctgctgctgaacagagctgctgctgtggacttcaccgccagaaatgacatcacccccctgcacgtggccagcaagagaggaaatgccaacatggtgaagctgctgctggacagaggagccaagattgatgccaagaccagagatggcctgacccccctgcactgtggggcccggagcggccacgagcaggtggtggagatgctgctggacagagctgcccccatcctgagcaagaccaagaatggcctgagccccctgcacatggccacccagggcgaccacctgaactgtgtgcagctgctgctgcagcacaacgtgcctgtggatgatgtgaccaatgactacctgacagccctgcacgtggccgcccactgcggccactacaaggtggccaaggtgctgctggacaagaaggccaaccccaatgccaaggccctgaatggcttcacccccctgcacatcgcctgcaagaagaaccgcatcaaggtgatggagctgctgctgaagcatggagccagcatccaggccgtgacagaaagtggcctgacccccatccacgtggccgccttcatgggccacgtgaacatcgtgtcccagctgatgcaccacggggccagccccaacaccaccaacgtgcggggggagacagccctgcacatggccgcccggagcggccaggccgaggtggtgcgctacctggtgcaggatggagcccaggtggaggccaaggccaaggatgaccagacccccctgcacatcagcgcccggctgggcaaggctgacatcgtgcagcagctgctgcagcagggcgccagccccaatgctgccaccaccagcggctacacccccctgcacctgagcgcccgggagggccatgaagatgtggccgccttcctgctggaccatggagccagcctgagcatcaccaccaagaagggcttcacccccctgcacgtggccgccaagtatggcaagctggaggtggccaacctgctgctgcagaagagcgccagcccagatgctgctgggaagagcggcctgacccccctgcacgtggccgcccactatgacaaccagaaggtggccctgctgctgctggaccagggcgccagcccccatgctgctgccaagaatggctacacccccctgcacatcgccgccaagaagaaccagatggacatcgccaccaccctgctggagtatggagcagatgccaatgctgtgacccggcagggcatcgcctctgtgcacctggccgcccaggagggccacgtggacatggtgtccctgctgctgggcagaaatgccaacgtgaacctgagcaacaagagcggcctgacccccctgcacctggccgcccaggaggacagagtgaatgtggccgaggtgctggtgaaccagggcgcccacgtggatgcccagaccaagatgggctacacccccctgcacgtgggctgccactacggcaacatcaagatcgtgaacttcctgctgcagcacagcgccaaggtgaatgccaagaccaagaatggctacacccccctgcaccaggccgcccagcagggccacacccacatcatcaacgtgctgctgcagaacaatgccagccccaatgagctgactgtgaatggaaacacagccctgggcatcgcccggcggctgggctacatctctgtggtggacaccctgaagatcgtgacagaggagaccatgaccaccaccaccgtgacagagaagcacaagatgaatgtgcctgagaccatgaatgaggtgctggacatgtctgatgatgaggtgaggaaggccaatgcccctgagatgctgagtgatggagagtacatcagtgatgtggaggagggcaaccgctgcacctggtacaagatccccaaggtgcaggagttcaccgtgaagtcagaagatgccatgaccggggacacagacaagtacctgggcccccaggacctgaaggagctgggagatgacagcctgcctgctgagggctacatgggcttcagcctgggcgcccggagcgccagcctgcgctccttcagcagtgacaggagctacaccctgaacagaagcagctatgcccgggacagcatgatgattgaggagctgctggtgcccagcaaggagcagcacctgaccttcacccgggagtttgacagcgacagcctgcggcactacagctgggccgctgacaccctggacaacgtgaacctggtgagcagccccatccacagcggcttcctggtgtccttcatggtggatgcccggggcggctccatgaggggcagccgccaccacggcatgaggatcatcatcccccccaggaagtgcacagcccccacccgcatcacctgccgcctggtgaagaggcacaagctggccaaccccccacccatggtggagggggagggcctggccagccggctggtggagatgggccctgctggggcccagttcctgggccctgtgattgtggagatcccccacttcggctccatgaggggcaaggagcgggagctgattgtgctgcggagtgaaaatggagagacctggaaggagcaccagtttgacagcaagaatgaagacctgacagagctgctgaatggcatggatgaggagctggacagccctgaggagctgggcaagaagaggatctgccgcatcatcaccaaggacttcccccagtactttgctgtggtgagccgcatcaagcaggagagcaaccagatcggccctgagggcggcatcctgagcagcaccaccgtgcccctggtgcaggccagcttccctgagggcgccctgaccaagaggatccgggtgggcctgcaggcccagcctgtgcctgatgaaattgtgaagaagatcctgggcaacaaggccaccttcagccccatcgtgacagtggagcccaggaggaggaagttccacaagcccatcaccatgaccatccctgtgcccccaccttctggagagggcgtgtccaatggctacaagggggacaccacccccaacctgcggctgctgtgcagcatcaccggcggcaccagccctgcccagtgggaggacatcaccggcaccacccccctgaccttcatcaaggactgtgtgtccttcaccaccaacgtgtctgcccgcttctggctggccgactgccaccaggtgctggagaccgtgggcctggccacccagctgtaccgggagctgatctgtgtgccctacatggccaagtttgtggtgtttgccaagatgaatgaccctgtggagagcagcctgcgctgcttctgcatgacagatgacaaggtggacaagaccctggagcagcaggagaactttgaggaggtggcccggagcaaggacatcgaggtgctggagggcaagcccatctacgtggactgctacggcaacctggcccccctgaccaagggcggccagcagctggtgttcaacttctacagcttcaaggaaaatcggctgcccttcagcatcaagatccgggacaccagccaggagccctgtggccgcctgtccttcctgaaggagcccaagaccaccaagggcctgccccagacagctgtgtgcaacctgaacatcaccctgcctgcccacaagaagattgagaagacagaccggcggcagagctttgccagcctggccctgaggaagcgctacagctacctgacagagcccggcatgagcccccagagcccctgtgagaggacagacatccgcatggccatcgtggccgaccacctgggcctgtcctggacagagctggcccgggagctgaacttctctgtggatgagatcaaccagatccgggtggagaaccccaacagcctcatcagccagagcttcatgctgctgaagaagtgggtgaccagagatggcaagaatgccaccacagatgccctgacctctgtgctgaccaagatcaacagaattgacatcgtgaccctgctggagggccccatctttgattatggcaacatcagcggcaccaggagctttgctgatgaaaataatgtgttccatgaccctgtggatggctaccccagcctgcaggtggagctggagacccccaccggcctgcactacaccccacccacccccttccagcaggatgactacttcagtgacatcagcagcattgagagccccctgcggacccccagccggctgagtgatggcctggtgcccagccagggcaacatcgagcacagcgcagatggcccccctgtggtgacagcagaagatgccagcctggaggacagcaagctggaggacagcgtgcccctgacagagatgcctgaggccgtggatgtggatgagagccagctggagaatgtgtgcctgtcctggcagaatgagaccagcagcggcaacctggagagctgtgcccaggcccggcgggtgactggaggcctgctggaccggctggatgacagcccagaccagtgccgggacagcatcaccagctacctgaagggggaggccggcaagtttgaggccaacggcagccacacagagatcaccccagaggccaagaccaagagctacttccctgagagccagaatgatgtgggcaagcagagcaccaaggagaccctgaagcccaagatccacggcagcggccacgtggaggagcccgccagccccctggccgcctaccagaagagcctggaggagaccagcaagctgatcatcgaggagaccaagccctgtgtgcctgtgtccatgaagaagatgagcaggaccagccctgcagatggcaagccccggctgagcctgcacgaggaggagggcagcagcggcagcgagcagaagcagggcgagggcttcaaggtgaagaccaagaaggagatcagacatgtggagaagaagagccacagctag

SEQ ID NO: 143621 - DNA, 13134 bp, synthetic construct
  misc_feature 1..13134: note = Description of Artificial Sequence: Synthetic coding sequence
  source 1..13134: mol_type = other DNA
atggcccacgccgccagccagctgaagaagaacagagacctggagatcaatgctgaggaggagcctgagaagaagaggaagcacaggaagaggagccgggacaggaagaagaagagtgatgccaatgccagctacctgcgggccgcccgggccggccacctggagaaggccctggactacatcaagaatggagtggacatcaacatctgcaaccagaatggcctgaatgccctgcacctggccagcaaggagggccacgtggaggtggtgtctgagctgctgcagcgggaggccaacgtggatgctgccaccaagaagggcaacacagccctgcacatcgccagcctggccggccaggccgaggtggtgaaggtgctggtgaccaatggagccaacgtgaatgcccagagccagaatggcttcacccccctgtacatggccgcccaggagaaccacctggaggtggtgaagttcctgctggacaacggggccagccagagcctggccacagaagatggcttcacccccctggccgtggccctgcagcagggccatgaccaggtggtgtccctgctgctggagaatgacaccaagggcaaggtgcggctgcctgccctgcacatcgccgccaggaaggatgacaccaaggccgccgccctgctgctgcagaatgacaacaatgctgatgtggagagcaagagcggcttcacccccctgcacatcgccgcccactacggcaacatcaacgtggccaccctgctgctgaacagagctgctgctgtggacttcaccgccagaaatgacatcacccccctgcacgtggccagcaagagaggaaatgccaacatggtgaagctgctgctggacagaggagccaagattgatgccaagaccagagatggcctgacccccctgcactgtggggcccggagcggccacgagcaggtggtggagatgctgctggaccgggccgcccccatcctgagcaagaccaagaatggcctgagccccctgcacatggccacccagggcgaccacctgaactgtgtgcagctgctgctgcagcacaacgtgcctgtggatgatgtgaccaatgactacctgacagccctgcacgtggccgcccactgcggccactacaaggtggccaaggtgctgctggacaagaaggccaaccccaatgccaaggccctgaatggcttcacccccctgcacatcgcctgcaagaagaaccgcatcaaggtgatggagctgctgctgaagcacggggccagcatccaggccgtgacagagagcggcctgacccccatccacgtggccgccttcatgggccacgtgaacatcgtgtcccagctgatgcaccacggggccagccccaacaccaccaacgtgcggggggagacagccctgcacatggccgcccggagcggccaggccgaggtggtgcgctacctggtgcaggatggagcccaggtggaggccaaggccaaggatgaccagacccccctgcacatcagcgcccggctgggcaaggctgacatcgtgcagcagctgctgcagcagggcgccagccccaatgctgccaccaccagcggctacacccccctgcacctgagcgcccgggagggccatgaagatgtggccgccttcctgctggaccacggggccagcctgagcatcaccaccaagaagggcttcacccccctgcacgtggccgccaagtatggcaagctggaggtggccaacctgctgctgcagaagagcgccagcccagatgctgctgggaagagcggcctgacccccctgcacgtggccgcccactatgacaaccagaaggtggccctgctgctgctggaccagggcgccagcccccacgccgccgccaagaatggctacacccccctgcacatcgccgccaagaagaaccagatggacatcgccaccaccctgctggagtatggagcagatgccaatgctgtgacccggcagggcatcgcctctgtgcacctggccgcccaggagggccacgtggacatggtgtccctgctgctgggcagaaatgccaacgtgaacctgagcaacaagagcggcctgacccccctgcacctggccgcccaggaggacagagtgaatgtggccgaggtgctggtgaaccagggcgcccacgtggatgcccagaccaagatgggctacacccccctgcacgtgggctgccactacggcaacatcaagatcgtgaacttcctgctgcagcacagcgccaaggtgaatgccaagaccaagaatggctacacccccctgcaccaggccgcccagcagggccacacccacatcatcaacgtgctgctgcagaacaatgccagccccaatgagctgactgtgaatggaaacacagccctgggcatcgcccggcggctgggctacatctctgtggtggacaccctgaagatcgtgacagaggagaccatgaccaccaccaccgtgacagagaagcacaagatgaatgtgcctgagaccatgaatgaggtgctggacatgtctgatgatgaggtgaggaaggccaatgcccctgagatgctgagtgatggagagtacatcagtgatgtggaggagggagaagatgccatgactggagacacagacaagtacctgggcccccaggacctgaaggagctgggagatgacagcctgcctgctgagggctacatgggcttcagcctgggcgcccggagcgccagcctgcggagcttcagcagtgacaggagctacaccctgaacagaagcagctatgcccgggacagcatgatgattgaggagctgctggtgcccagcaaggagcagcacctgaccttcacccgggagtttgacagcgacagcctgcggcactacagctgggccgctgacaccctggacaacgtgaacctggtgagcagccccatccacagcggcttcctggtgtccttcatggtggatgcccggggcggctccatgaggggcagccgccaccacggcatgaggatcatcatcccccccaggaaatgtacagcccccacccgcatcacctgccgcctggtgaagaggcacaagctggccaaccccccacccatggtggagggggagggcctggccagccggctggtggagatgggccctgctggggcccagttcctgggccctgtgattgtggagatcccccacttcggctccatgaggggcaaggagcgggagctgattgtgctgcggagtgaaaatggagagacctggaaggagcaccagtttgacagcaagaatgaagacctgacagagctgctgaatggcatggatgaggagctggacagccctgaggagctgggcaagaagaggatctgccgcatcatcaccaaggacttcccccagtactttgctgtggtgagccgcatcaagcaggagagcaaccagatcggccctgagggcggcatcctgagcagcaccaccgtgcccctggtgcaggccagcttccctgagggcgccctgaccaagaggatccgggtgggcctgcaggcccagcctgtgcctgatgagatcgtgaagaagatcctgggcaacaaggccaccttcagccccatcgtgacagtggagcccaggaggaggaagttccacaagcccatcaccatgaccatccctgtgcccccacccagcggggagggcgtgtccaatggctacaagggggacaccacccccaacctgcggctgctgtgcagcatcactggaggcaccagccctgcccagtgggaggacatcaccggcaccacccccctgaccttcatcaaggactgtgtgtccttcaccaccaacgtgtctgcccgcttctggctggccgactgccaccaggtgctggagaccgtgggcctggccacccagctgtaccgggagctgatctgtgtgccctacatggccaagtttgtggtgtttgccaagatgaatgaccctgtggagagcagcctgcgctgcttctgcatgacagatgacaaggtggacaagaccctggagcagcaggagaactttgaggaggtggcccggagcaaggacatcgaggtgctggagggcaagcccatctacgtggactgctacggcaacctggcccccctgaccaagggcggccagcagctggtgttcaacttctacagcttcaaggagaaccggctgcccttcagcatcaagatccgggacaccagccaggagccctgtggccgcctgtccttcctgaaggagcccaagaccaccaagggcctgccccagacagctgtgtgcaacctgaacatcaccctgcctgcccacaagaaggagacagaaagtgaccaggatgatgaaattgagaagacagaccggcggcagagctttgccagcctggccctgaggaagcgctacagctacctgacagagcccggcatgattgaaagaagcactggagccaccaggagcctgcccaccacctacagctacaagcccttcttcagcacccggccctaccagagctggaccacagcccccatcaccgtgcccggccctgccaagagcggcttcaccagcctgagcagcagcagcagcaacaccccatctgccagccccctgaagagcatctggagcgtgtccacccccagccccatcaagagcaccctgggcgccagcaccaccagctctgtgaagagcatcagtgatgtggccagccccatccgctccttccgcaccatgagcagccccatcaagacagtggtgtcccagagcccctacaacatccaggtgagcagcggcaccctggcccgggccccagctgtgacagaggccacccccctgaagggcctggccagcaacagcaccttcagcagcaggaccagccctgtgaccacagctggcagcctgctggagaggagcagcatcaccatgaccccaccagccagccccaagagcaacatcaacatgtacagcagcagcctgcccttcaagagcatcatcaccagcgctgcccccctcatcagcagccccctgaagtctgtggtgtcccctgtgaagtctgctgtggatgtgatcagcagcgccaagatcaccatggccagcagcctgagcagccctgtgaagcagatgcctggccatgctgaggtggccctggtgaatggcagcatcagccccctgaagtaccccagcagcagcaccctcatcaatggctgcaaggccacagccaccctgcaggagaagatcagcagcgccaccaacagcgtgtcctctgtggtgtctgctgccacagacacagtggagaaggtgttcagcaccaccacagccatgcccttcagccccctgcggagctatgtgtctgctgcccccagcgccttccagagcctgcggacccccagcgccagcgccctgtacaccagcctgggcagcagcatcagcgccaccaccagctctgtgaccagcagcatcatcaccgtgcctgtgtacagcgtggtgaatgtgctgcctgagcccgccctgaagaagctgcctgacagcaacagcttcaccaagtctgctgctgccctgctgagccccatcaagaccctgaccacagagacccacccccagccccacttcagcaggaccagcagccctgtgaagagcagcctcttcctggcccccagcgccctgaagctgagcacccccagcagcctgagcagcagccaggagatcctgaaggatgtggccgagatgaaggaggacctgatgaggatgacagccatcctgcagacagatgtgcctgaggagaagcccttccagcctgagctgcccaaggagggcagaattgatgatgaggagcccttcaagatcgtggagaaggtgaaggaggacctggtgaaggtgtctgagatcctgaagaaggatgtgtgtgtggacaacaagggcagccccaagagccccaagagtgacaagggccacagcccagaagatgactggattgagttcagcagcgaggagatccgggaggcccggcagcaggccgccgccagccagagccccagcctgcctgagcgggtgcaggtgaaggccaaggccgccagcgagaaggactacaacctgaccaaggtgattgactacctgaccaatgacatcggcagcagcagcctgaccaacctgaagtacaagtttgaagatgccaagaaggatggagaggagcggcagaagagggtgctgaagccagccatcgccctgcaggagcacaagctgaagatgcccccagcctccatgaggaccagcaccagcgagaaggagctgtgcaagatggctgacagcttctttggaacagacaccatcctggagagcccagatgacttcagccagcacgaccaggacaagagccccctgagtgacagcggctttgagaccaggtctgagaagaccccatctgccccccagagcgctgagagcacaggccccaagcccctcttccacgaggtgcccatcccccctgtgatcacagagaccaggacagaggtggtgcacgtgatccgctcctatgaccccagcgctggagatgtgccccagacccagcctgaggagcctgtgagccccaagcccagccccaccttcatggagctggagcccaagcccaccaccagcagcatcaaggagaaggtgaaggccttccagatgaaggccagcagtgaagaagatgaccacaacagagtgctgagcaagggcatgagggtgaaggaggagacccacatcaccaccaccaccaggatggtgtaccacagccccccaggaggagagggcgccagcgagagaattgaggagaccatgtctgtgcatgacatcatgaaggccttccagagcggccgggaccccagcaaggagctggccggcctgtttgagcacaagtctgctgtgtccccagatgtgcacaagtctgctgctgagaccagcgcccagcacgccgagaaggacaaccagatgaagcccaagctggagcgcatcatcgaggtgcacatcgagaagggcaaccaggccgagcccacagaggtgatcatccgggagaccaagaagcaccctgagaaggagatgtatgtgtaccagaaggacctgagcagaggagacatcaacctgaaggacttcctgcctgagaagcatgatgccttcccctgcagcgaggagcagggccagcaggaggaggaggagctgacagctgaggagagcctgcccagctacctggagagcagccgggtgaacacccctgtgtcccaggaggaggacagccggcccagcagcgcccagctgatcagtgatgacagctacaagaccctgaagctgctgagccagcacagcattgagtaccatgatgatgagctgtctgagctgcggggggagagctacagatttgctgagaagatgctgctgtctgagaagctggatgtgagccacagcgacacagaggagagcgtgacagaccacgccggcccccccagcagcgagctgcagggcagtgacaagaggagccgggagaagatcgccacagcccccaagaaggagatcctgagcaagatctacaaggatgtgtctgaaaatggagtgggcaaggtgtccaaggatgagcactttgacaaggtgacagtgctgcactacagcggaaatgtgagcagccccaagcacgccatgtggatgaggttcacagaagatcggctggaccggggccgggagaagctgatctatgaggacagagtggacagaacagtgaaggaggccgaggagaagctgacagaggtgtcccagttcttccgggacaagacagagaagctgaatgatgagctgcagagccctgagaagaaggcccggcccaagaatggcaaggagtacagcagccagagccccaccagcagcagccctgagaaggtgctgctgacagagctgctggccagcaatgatgagtgggtgaaggcccggcagcacggcccagatggccagggcttccccaaggccgaggagaaggcccccagcctgcccagcagccctgagaagatggtgctgagccagcagacagaggacagcaagagcacagtggaggccaagggcagcatcagccagagcaaggccccagatggcccccagagcggcttccagctgaagcagagcaagctgagcagcatccggctgaagtttgagcagggcacccacgccaagagcaaggacatgagccaggaggacaggaagagtgatggccagagccgcatccctgtgaagaagatccaggagagcaagctgcctgtgtaccaggtgtttgcccgggagaagcagcagaaggccatcgacctgcctgatgaatctgtgtctgtgcagaaggacttcatggtgctgaagaccaaggatgaacatgcccagagcaatgaaattgtggtgaatgacagcggcagtgacaacgtgaagaagcagaggacagagatgagcagcaaggccatgccagacagcttcagcgagcagcaggccaaggacctggcctgccacatcaccagtgacctggccacccggggcccctgggacaagaaggtgttccgcacctgggagagcagcggggccaccaacaacaagagccagaaggagaagctgagccacgtgctggtgcatgatgtgcgggagaaccacatcggccaccctgagagcaagtctgtggaccagaagaatgagttcatgtctgtgacagagcgggagaggaagctgctgaccaacggcagcctgtctgagatcaaggagatgacagtgaagagccccagcaagaaggtgctgtaccgggagtatgtggtgaaggagggggaccaccctgggggcctgctggaccagcccagccgccgctctgagagcagcgctgtgagccacatccctgtgcgggtggctgatgagaggaggatgctgagcagcaacatcccagatggcttctgtgagcagagcgccttccccaagcatgagctgagccagaagctgagccagagctccatgagcaaggagaccgtggagacccagcacttcaacagcattgaagatgagaaggtgacctacagcgagatcagcaaggtgtccaagcaccagagctatgtgggcctgtgcccccccctggaggagacagagaccagccccaccaagagcccagacagcctggagttcagccctgggaaggagagccccagcagtgatgtgtttgaccacagccccattgatggcctggagaagctggcccccctggcccagacagaaggaggcaaggagatcaagaccctgcctgtgtatgtgtcctttgtgcaggtgggcaagcagtatgagaaggagatccagcagggcggcgtgaagaagatcatcagccaggagtgcaagacagtgcaggagacccggggcaccttctacaccacccggcagcagaagcagccccccagcccccagggcagcccagaagatgacaccctggagcaggtgtccttcctggacagcagcggcaagagccccctgaccccagagacccccagcagcgaggaggtgtcctatgagttcaccagcaagaccccagacagcctcatcgcctacatccctgggaagcccagccccatccctgaggtgtctgaggagagcgaggaggaggagcaggccaagagcaccagcctgaagcagaccaccgtggaggagacagctgtggagcgggagatgcccaatgatgtgtccaaggacagcaaccagaggcccaagaacaacagagtggcctacatcgagttccccccacctccacccctggatgctgaccagattgaaagtgacaagaagcaccactacctgcctgagaaggaggtggacatgattgaggtgaacctgcaggatgaacatgacaagtaccagctggccgagcccgtcatccgggtgcagccccccagccctgtgcccccaggagcagatgtgtctgacagcagtgatgatgagagcatctaccagcctgtgcctgtgaagaagtacaccttcaagctgaaggaggtggatgatgagcagaaggagaagcccaaggccagcgctgagaaggccagcaaccagaaggagctggagagcaatggaagtggcaaggacaatgaatttggcctgggcctggacagcccccagaatgagatcgcccagaatggaaataatgaccagagcatcacagagtgcagcatcgccaccacagctgagttcagccatgacacagatgccacagaaattgacagcctggatggctatgacctgcaggatgaagatgatggcctgacagaaagtgacagcaagctgcccatccaggccatggagatcaagaaggacatctggaacacagagggcatcctgaagccagctgacaggagcttcagccagagcaagctggaggtgattgaggaggagggcaaggtgggcccagatgaggacaagccacccagcaagagcagcagcagcgagaagaccccagacaagacagaccagaagagcggggcccagttcttcaccctggagggccgccacccagacagatctgtgtttcctgacacctacttctcctacaaggtggatgaggagtttgccacccccttcaagacagtggccaccaagggcctggactttgacccctggagcaacaacagaggagatgatgaggtgtttgacagcaagagcagagaagatgagaccaagcccttcggcctggccgtggaggacaggagccctgccaccaccccagacaccaccccagcccggacccccacagatgagagcacccccaccagcgagcccaaccccttccccttccacgagggcaagatgtttgagatgaccaggtctggggccatcgacatgagcaagagggactttgtggaggagcggctgcagttcttccagatcggggagcacaccagcgagggcaagagcggggaccagggcgagggggacaagtccatggtgacagccaccccccagccccagagcggggacaccaccgtggagaccaacctggagagaaatgtggagacccccaccgtggagcccaaccccagcatccccaccagcggggagtgccaggagggcaccagcagcagcggcagcctggagaagtctgctgctgccaccaacaccagcaaggtggaccccaagctgcggacccccatcaagatgggcatcagcgccagcaccatgaccatgaagaaggagggccctggagagatcacagacaagattgaagctgtgatgaccagctgccagggcctggagaatgagaccatcaccatgatcagcaacacagccaacagccagatgggcgtgcggccccatgagaagcatgacttccagaaggacaacttcaacaacaacaacaacctggacagcagcaccatccagacagacaacatcatgagcaacatcgtgctgacagagcacagcgcccccacctgcaccacagagaaggacaaccctgtgaaggtgagcagcggcaagaagacaggagtgctgcagggccactgtgtgcgggacaagcagaaggtgctgggggagcagcagaagaccaaggagctgattggcatccggcagaagagcaagctgcccatcaaggccaccagccccaaggacaccttcccccccaaccacatgagcaacaccaaggccagcaagatgaagcaggtgtcccagagcgagaagaccaaggccctgaccaccagcagctgtgtggatgtgaagagccgcatccctgtgaagaacacccaccgggacaacatcatcgctgtgaggaaggcctgtgccacccagaagcagggccagcctgagaagggcaaggccaagcagctgcccagcaagctgcctgtgaaggtgcgcagcacctgtgtgaccaccaccaccaccacagccaccaccaccaccaccaccaccaccaccaccaccaccagctgcaccgtgaaggtgaggaagagccagctgaaggaggtgtgcaagcacagcattgagtacttcaagggcatcagcggggagaccctgaagctggtggaccggctgtctgaggaggagaagaagatgcagagcgagctgagtgatgaggaggagagcaccagcaggaacaccagcctgtctgagaccagccggggcggccagcccagcgtgaccaccaagagcgcccgggacaagaagacagaagctgcccccctgaagagcaagtctgagaaggccggcagcgagaagaggagcagcagaagaacaggcccccagagcccctgtgagaggacagacatccgcatggccatcgtggccgaccacctgggcctgtcctggacagagctggcccgggagctgaacttctctgtggatgagatcaaccagatccgggtggagaaccccaacagcctcatcagccagagcttcatgctgctgaagaagtgggtgaccagagatggcaagaatgccaccacagatgccctgacctctgtgctgaccaagatcaacagaattgacatcgtgaccctgctggagggccccatctttgattatggcaacatcagcggcaccaggagctttgctgatgaaaataatgtgttccatgaccctgtggatggctggcagaatgagaccagcagcggcaacctggagagctgtgcccaggcccggcgggtgactggaggcctgctggaccggctggatgacagcccagaccagtgccgggacagcatcaccagctacctgaagggggaggccggcaagtttgaggccaacggcagccacacagagatcaccccagaggccaagaccaagagctacttccctgagagccagaatgatgtgggcaagcagagcaccaaggagaccctgaagcccaagatccacggcagcggccacgtggaggagcccgccagccccctggccgcctaccagaagagcctggaggagaccagcaagctgatcatcgaggagaccaagccctgtgtgcctgtgtccatgaagaagatgagcaggaccagccctgcagatggcaagccccggctgagcctgcacgaggaggagggcagcagcggcagcgagcagaagcagggcgagggcttcaaggtgaagaccaagaaggagatccgccacgtggagaagaagagccacagctag

SEQ ID NO: 143622 - DNA, 3006 bp, synthetic construct
  misc_feature 1..3006: note = Description of Artificial Sequence: Synthetic coding sequence
  source 1..3006: mol_type = other DNA
atggccctgccccagagtgaagatgccatgactggagacacagacaagtacctgggcccccaggacctgaaggagctgggagatgacagcctgcctgctgagggctacatgggcttcagcctgggcgcccggagcgccagcctgcggagcttcagcagtgacaggagctacaccctgaacagaagcagctatgcccgggacagcatgatgattgaggagctgctggtgcccagcaaggagcagcacctgaccttcacccgggagtttgacagcgacagcctgcggcactacagctgggccgctgacaccctggacaacgtgaacctggtgagcagccccatccacagcggcttcctggtgtccttcatggtggatgcccggggcggctccatgaggggcagccgccaccacggcatgaggatcatcatcccccccaggaaatgtacagcccccacccgcatcacctgccgcctggtgaagaggcacaagctggccaaccccccacccatggtggagggggagggcctggccagccggctggtggagatgggccctgctggggcccagttcctgggccctgtgattgtggagatcccccacttcggctccatgaggggcaaggagcgggagctgattgtgctgcggagtgaaaatggagagacctggaaggagcaccagtttgacagcaagaatgaagacctgacagagctgctgaatggcatggatgaggagctggacagccctgaggagctgggcaagaagaggatctgccgcatcatcaccaaggacttcccccagtactttgctgtggtgagccgcatcaagcaggagagcaaccagatcggccctgagggcggcatcctgagcagcaccaccgtgcccctggtgcaggccagcttccctgagggcgccctgaccaagaggatccgggtgggcctgcaggcccagcctgtgcctgatgagatcgtgaagaagatcctgggcaacaaggccaccttcagccccatcgtgacagtggagcccaggaggaggaagttccacaagcccatcaccatgaccatccctgtgcccccacccagcggggagggcgtgtccaatggctacaagggggacaccacccccaacctgcggctgctgtgcagcatcactggaggcaccagccctgcccagtgggaggacatcaccggcaccacccccctgaccttcatcaaggactgtgtgtccttcaccaccaacgtgtctgcccgcttctggctggccgactgccaccaggtgctggagaccgtgggcctggccacccagctgtaccgggagctgatctgtgtgccctacatggccaagtttgtggtgtttgccaagatgaatgaccctgtggagagcagcctgcgctgcttctgcatgacagatgacaaggtggacaagaccctggagcagcaggagaactttgaggaggtggcccggagcaaggacatcgaggtgctggagggcaagcccatctacgtggactgctacggcaacctggcccccctgaccaagggcggccagcagctggtgttcaacttctacagcttcaaggagaaccggctgcccttcagcatcaagatccgggacaccagccaggagccctgtggccgcctgtccttcctgaaggagcccaagaccaccaagggcctgccccagacagctgtgtgcaacctgaacatcaccctgcctgcccacaagaagattgagaagacagaccggcggcagagctttgccagcctggccctgaggaagcgctacagctacctgacagagcccggcatgagcccccagagcccctgtgagaggacagacatccgcatggccatcgtggccgaccacctgggcctgtcctggacagagctggcccgggagctgaacttctctgtggatgagatcaaccagatccgggtggagaaccccaacagcctcatcagccagagcttcatgctgctgaagaagtgggtgaccagagatggcaagaatgccaccacagatgccctgacctctgtgctgaccaagatcaacagaattgatattgtgaccctgctggagggccccatctttgattatggcaacatcagcggcaccaggagctttgctgatgagaacaacgtgttccatgaccctgtggatggctaccccagcctgcaggtggagctggagacccccaccggcctgcactacaccccacccacccccttccagcaggatgactacttcagtgacatcagcagcattgagagccccctgcggacccccagccggctgagtgatggcctggtgcccagccagggcaacatcgagcacagcgcagatggcccccctgtggtgacagcagaagatgccagcctggaggacagcaagctggaggacagcgtgcccctgacagagatgcctgaggccgtggatgtggatgagagccagctggagaatgtgtgcctgtcctggcagaatgagaccagcagcggcaacctggagagctgtgcccaggcccggcgggtgactggaggcctgctggaccggctggatgacagcccagaccagtgccgggacagcatcaccagctacctgaagggggaggccggcaagtttgaggccaacggcagccacacagagatcaccccagaggccaagaccaagagctacttccctgagagccagaatgatgtgggcaagcagagcaccaaggagaccctgaagcccaagatccacggcagcggccacgtggaggagcccgccagccccctggccgcctaccagaagagcctggaggagaccagcaagctgatcatcgaggagaccaagccctgtgtgcctgtgtccatgaagaagatgagcaggaccagccctgcagatggcaagccccggctgagcctgcacgaggaggagggcagcagcggcagcgagcagaagcagggcgagggcttcaaggtgaagaccaagaaggagatccgccacgtggagaagaagagccacagctag

SEQ ID NO: 143623 - DNA, 3306 bp, synthetic construct
  misc_feature 1..3306: note = Description of Artificial Sequence: Synthetic coding sequence
  source 1..3306: mol_type = other DNA
atgtctgaggagcccaaggagaagaatgccaagccagcccacaggaagaggaagggcaagaagagtgatgccaatgccagctacctgcgggccgcccgggccggccacctggagaaggccctggactacatctctgtggtggacaccctgaagatcgtgacagaggagaccatgaccaccaccaccgtgacagagaagcacaagatgaatgtgcctgagaccatgaatgaggtgctggacatgtctgatgatgaggtgaggaaggccaatgcccctgagatgctgagtgatggagagtacatcagtgatgtggaggagggggaggatgccatgaccggggacacagacaagtacctgggcccccaggacctgaaggagctgggagatgacagcctgcctgctgagggctacatgggcttcagcctgggcgcccggagcgccagcctgcgctccttcagcagtgacaggagctacaccctgaacagaagcagctatgcccgggacagcatgatgattgaggagctgctggtgcccagcaaggagcagcacctgaccttcacccgggagtttgacagcgacagcctgcggcactacagctgggccgctgacaccctggacaacgtgaacctggtgagcagccccatccacagcggcttcctggtgtccttcatggtggatgcccggggcggctccatgaggggcagccgccaccacggcatgaggatcatcatcccccccaggaagtgcacagcccccacccgcatcacctgccgcctggtgaagaggcacaagctggccaaccccccacccatggtggagggggagggcctggccagccggctggtggagatgggccctgctggggcccagttcctgggccctgtgattgtggagatcccccacttcggctccatgaggggcaaggagcgggagctgattgtgctgcggagtgaaaatggagagacctggaaggagcaccagtttgacagcaagaatgaagacctgacagagctgctgaatggcatggatgaggagctggacagccctgaggagctgggcaagaagaggatctgccgcatcatcaccaaggacttcccccagtactttgctgtggtgagccgcatcaagcaggagagcaaccagatcggccctgagggcggcatcctgagcagcaccaccgtgcccctggtgcaggccagcttccctgagggcgccctgaccaagaggatccgggtgggcctgcaggcccagcctgtgcctgatgaaattgtgaagaagatcctgggcaacaaggccaccttcagccccatcgtgacagtggagcccaggaggaggaagttccacaagcccatcaccatgaccatccctgtgcccccaccttctggagagggcgtgtccaatggctacaagggggacaccacccccaacctgcggctgctgtgcagcatcaccggcggcaccagccctgcccagtgggaggacatcaccggcaccacccccctgaccttcatcaaggactgtgtgtccttcaccaccaacgtgtctgcccgcttctggctggccgactgccaccaggtgctggagaccgtgggcctggccacccagctgtaccgggagctgatctgtgtgccctacatggccaagtttgtggtgtttgccaagatgaatgaccctgtggagagcagcctgcgctgcttctgcatgacagatgacaaggtggacaagaccctggagcagcaggagaactttgaggaggtggcccggagcaaggacatcgaggtgctggagggcaagcccatctacgtggactgctacggcaacctggcccccctgaccaagggcggccagcagctggtgttcaacttctacagcttcaaggaaaatcggctgcccttcagcatcaagatccgggacaccagccaggagccctgtggccgcctgtccttcctgaaggagcccaagaccaccaagggcctgccccagacagctgtgtgcaacctgaacatcaccctgcctgcccacaagaagattgagaagacagaccggcggcagagctttgccagcctggccctgaggaagcgctacagctacctgacagagcccggcatgagcccccagagcccctgtgagaggacagacatccgcatggccatcgtggccgaccacctgggcctgtcctggacagagctggcccgggagctgaacttctctgtggatgagatcaaccagatccgggtggagaaccccaacagcctcatcagccagagcttcatgctgctgaagaagtgggtgaccagagatggcaagaatgccaccacagatgccctgacctctgtgctgaccaagatcaacagaattgacatcgtgaccctgctggagggccccatctttgattatggcaacatcagcggcaccaggagctttgctgatgaaaataatgtgttccatgaccctgtggatggctaccccagcctgcaggtggagctggagacccccaccggcctgcactacaccccacccacccccttccagcaggatgactacttcagtgacatcagcagcattgagagccccctgcggacccccagccggctgagtgatggcctggtgcccagccagggcaacatcgagcacagcgcagatggcccccctgtggtgacagcagaagatgccagcctggaggacagcaagctggaggacagcgtgcccctgacagagatgcctgaggccgtggatgtggatgagagccagctggagaatgtgtgcctgtcctggcagaatgagaccagcagcggcaacctggagagctgtgcccaggcccggcgggtgactggaggcctgctggaccggctggatgacagcccagaccagtgccgggacagcatcaccagctacctgaagggggaggccggcaagtttgaggccaacggcagccacacagagatcaccccagaggccaagaccaagagctacttccctgagagccagaatgatgtgggcaagcagagcaccaaggagaccctgaagcccaagatccacggcagcggccacgtggaggagcccgccagccccctggccgcctaccagaagagcctggaggagaccagcaagctgatcatcgaggagaccaagccctgtgtgcctgtgtccatgaagaagatgagcaggaccagccctgcagatggcaagccccggctgagcctgcacgaggaggagggcagcagcggcagcgagcagaagggggagggcttcaaggtgaagaccaagaaggagatccgccacgtggagaagaagagccacagctag

SEQ ID NO: 143624 - DNA, 3387 bp, synthetic construct
  misc_feature 1..3387: note = Description of Artificial Sequence: Synthetic coding sequence
  source 1..3387: mol_type = other DNA
atggccacccagggcgaccacctgaactgtgtgcagctgctgctgcagcacaacgtgcctgtggatgatgtgaccaatgactacctgacagccctgcacgtggccgcccactgcggccactacaaggtggccaaggtgctgctggacaagaaggccaaccccaatgccaaggccctgaatggcttcacccccctgcacatcgcctgcaagaagaaccgcatcaaggtgatggagctgctgctgaagcatggagccagcatccaggccgtgacagaaagtggcctgacccccatccacgtggccgccttcatgggccacgtgaacatcgtgtcccagctgatgcaccacggggccagccccaacaccaccaacgtgcggggggagacagccctgcacatggccgcccggagcggccaggccgaggtggtgcgctacctggtgcaggatggagcccaggtggaggccaaggccaaggatgaccagacccccctgcacatcagcgcccggctgggcaaggctgacatcgtgcagcagctgctgcagcagggcgccagccccaatgctgccaccaccagcggctacacccccctgcacctgagcgcccgggagggccatgaagatgtggccgccttcctgctggaccatggagccagcctgagcatcaccaccaagaagggcttcacccccctgcacgtggccgccaagtatggcaagctggaggtggccaacctgctgctgcagaagagcgccagcccagatgctgctgggaagagcggcctgacccccctgcacgtggccgcccactatgacaaccagaaggtggccctgctgctgctggaccagggcgccagcccccatgctgctgccaagaatggctacacccccctgcacatcgccgccaagaagaaccagatggacatcgccaccaccctgctggagtatggagcagatgccaatgctgtgacccggcagggcatcgcctctgtgcacctggccgcccaggagggccacgtggacatggtgtccctgctgctgggcagaaatgccaacgtgaacctgagcaacaagagcggcctgacccccctgcacctggccgcccaggaggacagagtgaatgtggccgaggtgctggtgaaccagggcgcccacgtggatgcccagaccaagatgggctacacccccctgcacgtgggctgccactacggcaacatcaagatcgtgaacttcctgctgcagcacagcgccaaggtgaatgccaagaccaagaatggctacacccccctgcaccaggccgcccagcagggccacacccacatcatcaacgtgctgctgcagaacaatgccagccccaatgagctgactgtgaatggaaacacagccctgggcatcgcccggcggctgggctacatctctgtggtggacaccctgaagatcgtgacagaggagaccatgaccaccaccaccgtgacagagaagcacaagatgaatgtgcctgagaccatgaatgaggtgctggacatgtctgatgatgaaggagaagatgccatgactggagacacagacaagtacctgggcccccaggacctgaaggagctgggagatgacagcctgcctgctgagggctacatgggcttcagcctgggcgcccggagcgccagcagtgacaggagctacaccctgaacagaagcagctatgcccgggacagcatgatgattgaggagctgctggtgcccagcaaggagcagcacctgaccttcacccgggagtttgacagcgacagcctgcggcactacagctgggccgctgacaccctggacaacgtgaacctggtgagcagccccatccacagcggcttcctggtgtccttcatggtggatgcccggggcggctccatgaggggcagccgccaccacggcatgaggatcatcatcccccccaggaagtgcacagcccccacccgcatcacctgccgcctggtgaagaggcacaagctggccaaccccccacccatggtggagggggagggcctggccagccggctggtggagatgggccctgctggggcccagttcctgggccctgtgattgtggagatcccccacttcggctccatgaggggcaaggagcgggagctgattgtgctgcggagtgaaaatggagagacctggaaggagcaccagtttgacagcaagaatgaagacctgacagagctgctgaatggcatggatgaggagctggacagccctgaggagctgggcaagaagaggatctgccgcatcatcaccaaggacttcccccagtactttgctgtggtgagccgcatcaagcaggagagcaaccagatcggccctgagggcggcatcctgagcagcaccaccgtgcccctggtgcaggccagcttccctgagggcgccctgaccaagaggatccgggtgggcctgcaggcccagcctgtgcctgatgaaattgtgaagaagatcctgggcaacaaggccaccttcagccccatcgtgacagtggagcccaggaggaggaagttccacaagcccatcaccatgaccatccctgtgcccccaccttctggagagggcgtgtccaatggctacaagggggacaccacccccaacctgcggctgctgtgcagcatcaccggcggcaccagccctgcccagtgggaggacatcaccggcaccacccccctgaccttcatcaaggactgtgtgtccttcaccaccaacgtgtctgcccgcttctggctggccgactgccaccaggtgctggagaccgtgggcctggccacccagctgtaccgggagctgatctgtgtgccctacatggccaagtttgtggtgtttgccaagatgaatgaccctgtggagagcagcctgcgctgcttctgcatgacagatgacaaggtggacaagaccctggagcagcaggagaactttgaggaggtggcccggagcaaggacatcgaggtgctggagggcaagcccatctacgtggactgctacggcaacctggcccccctgaccaagggcggccagcagctggtgttcaacttctacagcttcaaggaaaatcggctgcccttcagcatcaagatccgggacaccagccaggagccctgtggccgcctgtccttcctgaaggagcccaagaccaccaagggcctgccccagacagctgtgtgcaacctgaacatcaccctgcctgcccacaagaagattgagaagacagaccggcggcagagctttgccagcctggccctgaggaagcgctacagctacctgacagagcccggcatgtctgagttccccaacaccttcaccaacacctggatcttcatccggcgggacatcttcagcatccagaccaagttctag

SEQ ID NO: 143625 - DNA, 5544 bp, synthetic construct
  misc_feature 1..5544: note = Description of Artificial Sequence: Synthetic coding sequence
  source 1..5544: mol_type = other DNA
agtgatgccaatgccagctacctgcgggccgcccgggccggccacctggagaaggccctggactacatcaagaatggagtggacatcaacatctgcaaccagaatggcctgaatgccctgcacctggccagcaaggagggccacgtggaggtggtgtctgagctgctgcagcgggaggccaacgtggatgctgccaccaagaagggcaacacagccctgcacatcgccagcctggccggccaggccgaggtggtgaaggtgctggtgaccaatggagccaacgtgaatgcccagagccagaatggcttcacccccctgtacatggccgcccaggagaaccacctggaggtggtgaagttcctgctggacaacggggccagccagagcctggccacagaagatggcttcacccccctggccgtggccctgcagcagggccatgaccaggtggtgtccctgctgctggagaatgacaccaagggcaaggtgcggctgcctgccctgcacatcgccgccaggaaggatgacaccaaggccgccgccctgctgctgcagaatgacaacaatgctgatgtggagagcaagagcggcttcacccccctgcacatcgccgcccactacggcaacatcaacgtggccaccctgctgctgaacagagctgctgctgtggacttcaccgccagaaatgacatcacccccctgcacgtggccagcaagagaggaaatgccaacatggtgaagctgctgctggacagaggagccaagattgatgccaagaccagagatggcctgacccccctgcactgtggggcccggagcggccacgagcaggtggtggagatgctgctggaccgggccgcccccatcctgagcaagaccaagaatggcctgagccccctgcacatggccacccagggcgaccacctgaactgtgtgcagctgctgctgcagcacaacgtgcctgtggatgatgtgaccaatgactacctgacagccctgcacgtggccgcccactgcggccactacaaggtggccaaggtgctgctggacaagaaggccaaccccaatgccaaggccctgaatggcttcacccccctgcacatcgcctgcaagaagaaccgcatcaaggtgatggagctgctgctgaagcacggggccagcatccaggccgtgacagagagcggcctgacccccatccacgtggccgccttcatgggccacgtgaacatcgtgtcccagctgatgcaccacggggccagccccaacaccaccaacgtgcggggggagacagccctgcacatggccgcccggagcggccaggccgaggtggtgcgctacctggtgcaggatggagcccaggtggaggccaaggccaaggatgaccagacccccctgcacatcagcgcccggctgggcaaggctgacatcgtgcagcagctgctgcagcagggcgccagccccaatgctgccaccaccagcggctacacccccctgcacctgagcgcccgggagggccatgaagatgtggccgccttcctgctggaccacggggccagcctgagcatcaccaccaagaagggcttcacccccctgcacgtggccgccaagtatggcaagctggaggtggccaacctgctgctgcagaagagcgccagcccagatgctgctgggaagagcggcctgacccccctgcacgtggccgcccactatgacaaccagaaggtggccctgctgctgctggaccagggcgccagcccccacgccgccgccaagaatggctacacccccctgcacatcgccgccaagaagaaccagatggacatcgccaccaccctgctggagtatggagcagatgccaatgctgtgacccggcagggcatcgcctctgtgcacctggccgcccaggagggccacgtggacatggtgtccctgctgctgggcagaaatgccaacgtgaacctgagcaacaagagcggcctgacccccctgcacctggccgcccaggaggacagagtgaatgtggccgaggtgctggtgaaccagggcgcccacgtggatgcccagaccaagatgggctacacccccctgcacgtgggctgccactacggcaacatcaagatcgtgaacttcctgctgcagcacagcgccaaggtgaatgccaagaccaagaatggctacacccccctgcaccaggccgcccagcagggccacacccacatcatcaacgtgctgctgcagaacaatgccagccccaatgagctgactgtgaatggaaacacagccctgggcatcgcccggcggctgggctacatctctgtggtggacaccctgaagatcgtgacagaggagaccatgaccaccaccaccgtgacagagaagcacaagatgaatgtgcctgagaccatgaatgaggtgctggacatgtctgatgatgaggtgaggaaggccaatgcccctgagatgctgagtgatggagagtacatcagtgatgtggaggagggcaaccgctgcacctggtacaagatccccaaggtgcaggagttcaccgtgaagtcagaagatgccatgactggagacacagacaagtacctgggcccccaggacctgaaggagctgggagatgacagcctgcctgctgagggctacatgggcttcagcctgggcgcccggagcgccagcctgcggagcttcagcagtgacaggagctacaccctgaacagaagcagctatgcccgggacagcatgatgattgaggagctgctggtgcccagcaaggagcagcacctgaccttcacccgggagtttgacagcgacagcctgcggcactacagctgggccgctgacaccctggacaacgtgaacctggtgagcagccccatccacagcggcttcctggtgtccttcatggtggatgcccggggcggctccatgaggggcagccgccaccacggcatgaggatcatcatcccccccaggaaatgtacagcccccacccgcatcacctgccgcctggtgaagaggcacaagctggccaaccccccacccatggtggagggggagggcctggccagccggctggtggagatgggccctgctggggcccagttcctgggccctgtgattgtggagatcccccacttcggctccatgaggggcaaggagcgggagctgattgtgctgcggagtgaaaatggagagacctggaaggagcaccagtttgacagcaagaatgaagacctgacagagctgctgaatggcatggatgaggagctggacagccctgaggagctgggcaagaagaggatctgccgcatcatcaccaaggacttcccccagtactttgctgtggtgagccgcatcaagcaggagagcaaccagatcggccctgagggcggcatcctgagcagcaccaccgtgcccctggtgcaggccagcttccctgagggcgccctgaccaagaggatccgggtgggcctgcaggcccagcctgtgcctgatgagatcgtgaagaagatcctgggcaacaaggccaccttcagccccatcgtgacagtggagcccaggaggaggaagttccacaagcccatcaccatgaccatccctgtgcccccacccagcggggagggcgtgtccaatggctacaagggggacaccacccccaacctgcggctgctgtgcagcatcactggaggcaccagccctgcccagtgggaggacatcaccggcaccacccccctgaccttcatcaaggactgtgtgtccttcaccaccaacgtgtctgcccgcttctggctggccgactgccaccaggtgctggagaccgtgggcctggccacccagctgtaccgggagctgatctgtgtgccctacatggccaagtttgtggtgtttgccaagatgaatgaccctgtggagagcagcctgcgctgcttctgcatgacagatgacaaggtggacaagaccctggagcagcaggagaactttgaggaggtggcccggagcaaggacatcgaggtgctggagggcaagcccatctacgtggactgctacggcaacctggcccccctgaccaagggcggccagcagctggtgttcaacttctacagcttcaaggagaaccggctgcccttcagcatcaagatccgggacaccagccaggagccctgtggccgcctgtccttcctgaaggagcccaagaccaccaagggcctgccccagacagctgtgtgcaacctgaacatcaccctgcctgcccacaagaagattgagaagacagaccggcggcagagctttgccagcctggccctgaggaagcgctacagctacctgacagagcccggcatgagcccccagagcccctgtgagaggacagacatccgcatggccatcgtggccgaccacctgggcctgtcctggacagagctggcccgggagctgaacttctctgtggatgagatcaaccagatccgggtggagaaccccaacagcctcatcagccagagcttcatgctgctgaagaagtgggtgaccagagatggcaagaatgccaccacagatgccctgacctctgtgctgaccaagatcaacagaattgatattgtgaccctgctggagggccccatctttgattatggcaacatcagcggcaccaggagctttgctgatgagaacaacgtgttccatgaccctgtggatggctaccccagcctgcaggtggagctggagacccccaccggcctgcactacaccccacccacccccttccagcaggatgactacttcagtgacatcagcagcattgagagccccctgcggacccccagccggctgagtgatggcctggtgcccagccagggcaacatcgagcacagcgcagatggcccccctgtggtgacagcagaagatgccagcctggaggacagcaagctggaggacagcgtgcccctgacagagatgcctgaggccgtggatgtggatgagagccagctggagaatgtgtgcctgtcctggcagaatgagaccagcagcggcaacctggagagctgtgcccaggcccggcgggtgactggaggcctgctggaccggctggatgacagcccagaccagtgccgggacagcatcaccagctacctgaagggggaggccggcaagtttgaggccaacggcagccacacagagatcaccccagaggccaagaccaagagctacttccctgagagccagaatgatgtgggcaagcagagcaccaaggagaccctgaagcccaagatccacggcagcggccacgtggaggagcccgccagccccctggccgcctaccagaagagcctggaggagaccagcaagctgatcatcgaggagaccaagccctgtgtgcctgtgtccatgaagaagatgagcaggaccagccctgcagatggcaagccccggctgagcctgcacgaggaggagggcagcagcggcagcgagcagaagcagggcgagggcttcaaggtgaagaccaagaaggagatccgccacgtggagaagaagagccacagctag

SEQ ID NO: 143626 - DNA, 3354 bp, synthetic construct
  misc_feature 1..3354: note = Description of Artificial Sequence: Synthetic coding sequence
  source 1..3354: mol_type = other DNA
atggccacccagggcgaccacctgaactgtgtgcagctgctgctgcagcacaacgtgcctgtggatgatgtgaccaatgactacctgacagccctgcacgtggccgcccactgcggccactacaaggtggccaaggtgctgctggacaagaaggccaaccccaatgccaaggccctgaatggcttcacccccctgcacatcgcctgcaagaagaaccgcatcaaggtgatggagctgctgctgaagcatggagccagcatccaggccgtgacagaaagtggcctgacccccatccacgtggccgccttcatgggccacgtgaacatcgtgtcccagctgatgcaccacggggccagccccaacaccaccaacgtgcggggggagacagccctgcacatggccgcccggagcggccaggccgaggtggtgcgctacctggtgcaggatggagcccaggtggaggccaaggccaaggatgaccagacccccctgcacatcagcgcccggctgggcaaggctgacatcgtgcagcagctgctgcagcagggcgccagccccaatgctgccaccaccagcggctacacccccctgcacctgagcgcccgggagggccatgaagatgtggccgccttcctgctggaccatggagccagcctgagcatcaccaccaagaagggcttcacccccctgcacgtggccgccaagtatggcaagctggaggtggccaacctgctgctgcagaagagcgccagcccagatgctgctgggaagagcggcctgacccccctgcacgtggccgcccactatgacaaccagaaggtggccctgctgctgctggaccagggcgccagcccccatgctgctgccaagaatggctacacccccctgcacatcgccgccaagaagaaccagatggacatcgccaccaccctgctggagtatggagcagatgccaatgctgtgacccggcagggcatcgcctctgtgcacctggccgcccaggagggccacgtggacatggtgtccctgctgctgggcagaaatgccaatgacagcggcctgacccccctgcacctggccgcccaggaggacagagtgaatgtggccgaggtgctggtgaaccagggcgcccacgtggatgcccagaccaagatgggctacacccccctgcacgtgggctgccactacggcaacatcaagatcgtgaacttcctgctgcagcacagcgccaaggtgaatgccaagaccaagaatggctacacccccctgcaccaggccgcccagcagggccacacccacatcatcaacgtgctgctgcagaacaatgccagccccaatgagctgactgtgaatggaaacacagccctgggcatcgcccggcggctgggctacatctctgtggtggacaccctgaagatcgtgacagaggagaccatgaccaccaccaccgtgacagagaagcacaagatgaatgtgcctgagaccatgaatgaggtgctggacatgtctgatgatgaaggagaagatgccatgaccggggacacagacaagtacctgggcccccaggacctgaaggagctgggagatgacagcctgcctgctgagggctacatgggcttcagcctgggcgcccggagcgccagcctgcgctccttcagcagtgacaggagctacaccctgaacagaagcagctatgcccgggacagcatgatgattgaggagctgctggtgcccagcaaggagcagcacctgaccttcacccgggagtttgacagcgacagcctgcggcactacagctgggccgctgacaccctggacaacgtgaacctggtgagcagccccatccacagcggcttcctggtgtccttcatggtggatgcccggggcggctccatgaggggcagccgccaccacggcatgaggatcatcatcccccccaggaagtgcacagcccccacccgcatcacctgccgcctggtgaagaggcacaagctggccaaccccccacccatggtggagggggagggcctggccagccggctggtggagatgggccctgctggggcccagttcctgggccctgtgattgtggagatcccccacttcggctccatgaggggcaaggagcgggagctgattgtgctgcggagtgaaaatggagagacctggaaggagcaccagtttgacagcaagaatgaagacctgacagagctgctgaatggcatggatgaggagctggacagccctgaggagctgggcaagaagaggatctgccgcatcatcaccaaggacttcccccagtactttgctgtggtgagccgcatcaagcaggagagcaaccagatcggccctgagggcggcatcctgagcagcaccaccgtgcccctggtgcaggccagcttccctgagggcgccctgaccaagaggatccgggtgggcctgcaggcccagcctgtgcctgatgaaattgtgaagaagatcctgggcaacaaggccaccttcagccccatcgtgacagtggagcccaggaggaggaagttccacaagcccatcaccatgaccatccctgtgcccccaccttctggagagggcgtgtccaatggctacaagggggacaccacccccaacctgcggctgctgtgcagcatcaccggcggcaccagccctgcccagtgggaggacatcaccggcaccacccccctgaccttcatcaaggactgtgtgtccttcaccaccaacgtgtctgcccgcttctggctggccgactgccaccaggtgctggagaccgtgggcctggccacccagctgtaccgggagctgatctgtgtgccctacatggccaagtttgtggtgtttgccaagatgaatgaccctgtggagagcagcctgcgctgcttctgcatgacagatgacaaggtggacaagaccctggagcagcaggagaactttgaggaggtggcccggagcaaggacatcgaggtgctggagggcaagcccatctacgtggactgctacggcaacctggcccccctgaccaagggcggccagcagctggtgttcaacttctacagcttcaaggaaaatcggctgcccttcagcatcaagatccgggacaccagccaggagccctgtggccgcctgtccttcctgaaggagcccaagaccaccaagggcctgccccagacagctgtgtgcaacctgaacatcaccctgcctgcccacaagaagattgagaagacagaccggcggcagagctttgccagcctggccctgaggaagcgctacagctacctgacagagcccggcatgtctgagttccccaacaccttcaccaacctgcggggcttctcctag

SEQ ID NO: 143627 - DNA, 2436 bp, synthetic construct
  misc_feature 1..2436: note = Description of Artificial Sequence: Synthetic coding sequence
  source 1..2436: mol_type = other DNA
atggccctgccccagagtgaagatgccatgactggagacacagacaagtacctgggcccccaggacctgaaggagctgggagatgacagcctgcctgctgagggctacatgggcttcagcctgggcgcccggagcgccagcctgcggagcttcagcagtgacaggagctacaccctgaacagaagcagctatgcccgggacagcatgatgattgaggagctgctggtgcccagcaaggagcagcacctgaccttcacccgggagtttgacagcgacagcctgcggcactacagctgggccgctgacaccctggacaacgtgaacctggtgagcagccccatccacagcggcttcctggtgtccttcatggtggatgcccggggcggctccatgaggggcagccgccaccacggcatgaggatcatcatcccccccaggaaatgtacagcccccacccgcatcacctgccgcctggtgaagaggcacaagctggccaaccccccacccatggtggagggggagggcctggccagccggctggtggagatgggccctgctggggcccagttcctgggccctgtgattgtggagatcccccacttcggctccatgaggggcaaggagcgggagctgattgtgctgcggagtgaaaatggagagacctggaaggagcaccagtttgacagcaagaatgaagacctgacagagctgctgaatggcatggatgaggagctggacagccctgaggagctgggcaagaagaggatctgccgcatcatcaccaaggacttcccccagtactttgctgtggtgagccgcatcaagcaggagagcaaccagatcggccctgagggcggcatcctgagcagcaccaccgtgcccctggtgcaggccagcttccctgagggcgccctgaccaagaggatccgggtgggcctgcaggcccagcctgtgcctgatgagatcgtgaagaagatcctgggcaacaaggccaccttcagccccatcgtgacagtggagcccaggaggaggaagttccacaagcccatcaccatgaccatccctgtgcccccacccagcggggagggcgtgtccaatggctacaagggggacaccacccccaacctgcggctgctgtgcagcatcactggaggcaccagccctgcccagtgggaggacatcaccggcaccacccccctgaccttcatcaaggactgtgtgtccttcaccaccaacgtgtctgcccgcttctggctggccgactgccaccaggtgctggagaccgtgggcctggccacccagctgtaccgggagctgatctgtgtgccctacatggccaagtttgtggtgtttgccaagatgaatgaccctgtggagagcagcctgcgctgcttctgcatgacagatgacaaggtggacaagaccctggagcagcaggagaactttgaggaggtggcccggagcaaggacatcgaggtgctggagggcaagcccatctacgtggactgctacggcaacctggcccccctgaccaagggcggccagcagctggtgttcaacttctacagcttcaaggagaaccggctgcccttcagcatcaagatccgggacaccagccaggagccctgtggccgcctgtccttcctgaaggagcccaagaccaccaagggcctgccccagacagctgtgtgcaacctgaacatcaccctgcctgcccacaagaagattgagaagacagaccggcggcagagctttgccagcctggccctgaggaagcgctacagctacctgacagagcccggcatgagcccccagagcccctgtgagaggacagacatccgcatggccatcgtggccgaccacctgggcctgtcctggacagagctggcccgggagctgaacttctctgtggatgagatcaaccagatccgggtggagaaccccaacagcctcatcagccagagcttcatgctgctgaagaagtgggtgaccagagatggcaagaatgccaccacagatgccctgacctctgtgctgaccaagatcaacagaattgatattgtgaccctgctggagggccccatctttgattatggcaacatcagcggcaccaggagctttgctgatgagaacaacgtgttccatgaccctgtggatggctaccccagcctgcaggtggagctggagacccccaccggcctgcactacaccccacccacccccttccagcaggatgactacttcagtgacatcagcagcattgagagccccctgcggacccccagccggctgagtgatggcctggtgcccagccagggcaacatcgagcacagcgcagatggcccccctgtggtgacagcagaagatgccagcctggaggacagcaagctggaggacagcgtgcccctgacagagatgcctgaggccgtgatgtag

SEQ ID NO: 143628 - DNA, 2796 bp, synthetic construct
  misc_feature 1..2796: note = Description of Artificial Sequence: Synthetic coding sequence
  source 1..2796: mol_type = other DNA
ttcaccctggcccacgtgccccagagaggagaaacagccctgcacatggccgcccggagcggccaggccgaggtggtgcgctacctggtgcaggatggagcccaggtggaggccaaggccaaggatgaccagacccccctgcacatcagcgcccggctgggcaaggctgacatcgtgcagcagctgctgcagcagggcgccagccccaatgctgccaccaccagcggctacacccccctgcacctgagcgcccgggagggccatgaagatgtggccgccttcctgctggaccacggggccagcctgagcatcaccaccaagaagggcttcacccccctgcacgtggccgccaagtatggcaagctggaggtggccaacctgctgctgcagaagagcgccagcccagatgctgctgggaagagcggcctgacccccctgcacgtggccgcccactatgacaaccagaaggtggccctgctgctgctggaccagggcgccagcccccacgccgccgccaagaatggctacacccccctgcacatcgccgccaagaagaaccagatggacatcgccaccaccctgctggagtatggagcagatgccaatgctgtgacccggcagggcatcgcctctgtgcacctggccgcccaggagggccacgtggacatggtgtccctgctgctgggcagaaatgccaacgtgaacctgagcaacaagagcggcctgacccccctgcacctggccgcccaggaggacagagtgaatgtggccgaggtgctggtgaaccagggcgcccacgtggatgcccagaccaagatgggctacacccccctgcacgtgggctgccactacggcaacatcaagatcgtgaacttcctgctgcagcacagcgccaaggtgaatgccaagaccaagaatggctacacccccctgcaccaggccgcccagcagggccacacccacatcatcaacgtgctgctgcagaacaatgccagccccaatgagctgactgtgaatggaaacacagccctgggcatcgcccggcggctgggctacatctctgtggtggacaccctgaagatcgtgacagaggagaccatgaccaccaccaccgtgacagagaagcacaagatgaatgtgcctgagaccatgaatgaggtgctggacatgtctgatgatgaaggagaagatgccatgaccggggacacagacaagtacctgggcccccaggacctgaaggagctgggagatgacagcctgcctgctgagggctacatgggcttcagcctgggcgcccggagcgccagccgctccttcagcagtgacaggagctacaccctgaacagaagcagctatgcccgggacagcatgatgattgaggagctgctggtgcccagcaaggagcagcacctgaccttcacccgggagtttgacagcgacagcctgcggcactacagctgggccgctgacaccctggacaacgtgaacctggtgagcagccccatccacagcggctacagcagccccctgccccagtatgacagccgcttcctggtgtccttcatggtggatgcccggggcggctccatgaggggcagccgccaccacggcatgaggatcatcatcccccccaggaagtgcacagcccccacccgcatcacctgccgcctggtgaagaggcacaagctggccaaccccccacccatggtggagggggagggcctggccagccggctggtggagatgggccctgctggggcccagttcctgggccctgtgattgtggagatcccccacttcggctccatgaggggcaaggagcgggagctgattgtgctgcggagtgaaaatggagagacctggaaggagcaccagtttgacagcaagaatgaagacctgacagagctgctgaatggcatggatgaggagctggacagccctgaggagctgggcaagaagaggatctgccgcatcatcaccaaggacttcccccagtactttgctgtggtgagccgcatcaagcaggagagcaaccagatcggccctgagggcggcatcctgagcagcaccaccgtgcccctggtgcaggccagcttccctgagggcgccctgaccaagaggatccgggtgggcctgcaggcccagcctgtgcctgatgaaattgtgaagaagatcctgggcaacaaggccaccttcagccccatcgtgacagtggagcccaggaggaggaagttccacaagcccatcaccatgaccatccctgtgcccccaccttctggagagggcgtgtccaatggctacaagggggacaccacccccaacctgcggctgctgtgcagcatcaccggcggcaccagccctgcccagtgggaggacatcaccggcaccacccccctgaccttcatcaaggactgtgtgtccttcaccaccaacgtgtctgcccgcttctggctggccgactgccaccaggtgctggagaccgtgggcctggccacccagctgtaccgggagctgatctgtgtgccctacatggccaagtttgtggtgtttgccaagatgaatgaccctgtggagagcagcctgcgctgcttctgcatgacagatgacaaggtggacaagaccctggagcagcaggagaactttgaggaggtggcccggagcaaggacatcgaggtgccctgcagccagaagcaggtgcacttcatcacctacagccgctatgaggtgctcttctgtggcctgaacagcacccactacaagatccccagcgccctgctgatcctgctgctgctgtag

SEQ ID NO: 143629 - DNA, 1647 bp, synthetic construct
  misc_feature 1..1647: note = Description of Artificial Sequence: Synthetic coding sequence
  source 1..1647: mol_type = other DNA
agcctgcctgagagtgaagatgccatgaccggggacacagacaagtacctgggcccccaggacctgaaggagctgggagatgacagcctgcctgctgagggctacatgggcttcagcctgggcgcccggagcgccagcctgcgctccttcagcagtgacaggagctacaccctgaacagaagcagctatgcccgggacagcatgatgattgaggagctgctggtgcccagcaaggagcagcacctgaccttcacccgggagtttgacagcgacagcctgcggcactacagctgggccgctgacaccctggacaacgtgaacctggtgagcagccccatccacagcggcttcctggtgtccttcatggtggatgcccggggcggctccatgaggggcagccgccaccacggcatgaggatcatcatcccccccaggaagtgcacagcccccacccgcatcacctgccgcctggtgaagaggcacaagctggccaaccccccacccatggtggagggggagggcctggccagccggctggtggagatgggccctgctggggcccagttcctgggccctgtgattgtggagatcccccacttcggctccatgaggggcaaggagcgggagctgattgtgctgcggagtgaaaatggagagacctggaaggagcaccagtttgacagcaagaatgaagacctgacagagctgctgaatggcatggatgaggagctggacagccctgaggagctgggcaagaagaggatctgccgcatcatcaccaaggacttcccccagtactttgctgtggtgagccgcatcaagcaggagagcaaccagatcggccctgagggcggcatcctgagcagcaccaccgtgcccctggtgcaggccagcttccctgagggcgccctgaccaagaggatccgggtgggcctgcaggcccagcctgtgcctgatgaaattgtgaagaagatcctgggcaacaaggccaccttcagccccatcgtgacagtggagcccaggaggaggaagttccacaagcccatcaccatgaccatccctgtgcccccaccttctggagagggcgtgtccaatggctacaagggggacaccacccccaacctgcggctgctgtgcagcatcaccggcggcaccagccctgcccagtgggaggacatcaccggcaccacccccctgaccttcatcaaggactgtgtgtccttcaccaccaacgtgtctgcccgcttctggctggccgactgccaccaggtgctggagaccgtgggcctggccacccagctgtaccgggagctgatctgtgtgccctacatggccaagtttgtggtgtttgccaagatgaatgaccctgtggagagcagcctgcgctgcttctgcatgacagatgacaaggtggacaagaccctggagcagcaggagaactttgaggaggtggcccggagcaaggacatcgaggtgctggagggcaagcccatctacgtggactgctacggcaacctggcccccctgaccaagggcggccagcagctggtgttcaacttctacagcttcaaggaaaatcggctgcccttcagcatcaagatccgggacaccagccagaacatcgtgcagctgagctgcctgctgtag

SEQ ID NO: 143630 - DNA, 1443 bp, synthetic construct
  misc_feature 1..1443: note = Description of Artificial Sequence: Synthetic coding sequence
  source 1..1443: mol_type = other DNA
atggctgtggcccgggccgccctgggccccctggtgacaggcctgtatgatgtgcaggccttcaagtttggagactttgtgctgaagagcggcctgagcagccccatctacatcgacctgcggggcatcgtgtcccggccccggctgctgagccaggtggccgacatcctcttccagacagcccagaatgccggcatcagctttgacacagtgtgtggggtgccctacacagccctgcccctggccaccgtcatctgcagcaccaaccagatccccatgctgatccggaggaaggagaccaaggactatggcaccaagaggctggtggagggcaccatcaaccctggagagacctgcctgatcattgaagatgtggtgaccagcggcagctctgtgctggagaccgtggaggtgctgcagaaggagggcctgaaggtgacagatgccatcgtgctgctggaccgggagcagggcggcaaggacaagctgcaggcccacggcatccggctgcacagcgtgtgcaccctgagcaagatgctggagatcctggagcagcagaagaaggtggatgctgagaccgtgggccgggtgaagcgcttcatccaggagaatgtgtttgtggccgccaaccacaacggcagccccctgagcatcaaggaggcccccaaggagctgagctttggagcccgggcagagctgccccgcatccaccctgtggccagcaagctgctgcggctgatgcagaagaaggagaccaacctgtgcctgtctgcagatgtgtccctggcccgggagctgctgcagctggctgatgccctgggccccagcatctgcatgctgaagacccacgtggacatcctgaatgacttcaccctggatgtgatgaaggagctgatcaccctggccaagtgccacgagttcctgatctttgaggacaggaagtttgctgacatcggcaacacagtgaagaagcagtatgagggcggcatcttcaagatcgcctcctgggccgacctggtgaatgcccacgtggtgcccggcagcggcgtggtgaagggcctgcaggaggtgggcctgcccctgcaccggggctgcctgctgattgctgagatgagcagcacaggcagcctggccactggagactacaccagggctgctgtgaggatggccgaggagcacagcgagtttgtggtgggcttcatcagcggcagccgggtgtccatgaagccagagttcctgcacctgaccccaggagtgcagctggaggccggcggggacaacctgggccagcagtacaacagcccccaggaggtgattggcaagaggggcagtgacatcatcatcgtgggccggggcatcatctctgctgctgaccggctggaggccgctgagatgtacaggaaggccgcctgggaggcctacctgagccggctgggcgtgtag

SEQ ID NO: 143631 - DNA, 1218 bp, synthetic construct
  misc_feature 1..1218: note = Description of Artificial Sequence: Synthetic coding sequence
  source 1..1218: mol_type = other DNA
atggacaccagtgacctgtttgccagctgcaggaaaggagatgtgggccgggtgcgctacctgctggagcaggtgctgtacctgctggccaatggagcccgctgtgaggccaacacctttgatggagagcgctgcctgtatggagccctgagtgaccccatcagaagagccctgcgggactacaagcaccccctgctgtgggacctgctgagtgacctggaggccaagtgtgagaaggtgtctgaatttgtggccagcaagccaggcacctgtgtgaaggtgctgaccatcgagcccccacctgctgacccccggctgcgggaggacatggccctgctggccgactgtgccctgcccccagagctgcgggccttcttctgtggccgcagtgactacttccgggccctgctggatgaccacttccgggagagcgaggagcccgccaccagcggcggccccccagctgtgaccctgcacggcatcagcccagatgtgttcacccacgtgctgtactacatgtacagcgaccacacagagctgagccctgaggccgcctatgatgtgctgtctgtggccgacatgtacctgctgcccggcctgaagaggctgtgtggccgcagcctggcccagatgctggatgaggacacagtggtgggcgtgtggagggtggccaagctgttccggctggcccggctggaggaccagtgcacagagtacatggccaaggtgattgagaagctggtggagagagaagattttgtggaggccgtgaaggaggaggccgctgctgtggccgcccggcaggagacagacagcatccccctggtggatgacatccgcttccacgtggccagcacagtgcagacctacagcgccatcgaggaggcccagcagaggctgcgggccctggaggacacctccatgtgcatgaggctgtgtgccgccctgctgcctgccccctgcaccctgcgggcctcctggggcgtgcggggggcccagtggggcttcagcagcctgcacgagcccggggacccccggggcggcagcatctgggatgagcccccacctccaaatgcccaggccagcccccaggaccccggcggcggccaccacagcggcaagccaggagtgggcgtgggcttcggcctgagcaccttcctgctgcagatcccccccacccaccccagccccaagagcagccccctggccctggcctag

SEQ ID NO: 143632 - DNA, 1011 bp, synthetic construct
  misc_feature 1..1011: note = Description of Artificial Sequence: Synthetic coding sequence
  source 1..1011: mol_type = other DNA
atgctggacaccaagtggaagggcaagtctgtggtggtgctgcggcaccccctcatcaaccctgtggccttcggggccctgctgcagtacctgtacacaggccgcctggacatcggcgtggagcacgtgtctgactgtgagcggctggccaagcagtgccagctgtgggacctgctgagtgacctggaggccaagtgtgagaaggtgtctgaatttgtggccagcaagccaggcacctgtgtgaaggtgctgaccatcgagcccccacctgctgacccccggctgcgggaggacatggccctgctggccgactgtgccctgcccccagagctgcggggggacctgtgggagctgcccttcccctgcccagatggcttcaacagctgcccagacatctgcttccgggtggccggctgcagcttcctgtgccacaaggccttcttctgtggccgcagtgactacttccgggccctgctggatgaccacttccgggagagcgaggagcccgccaccagcggcggccccccagctgtgaccctgcacggcatcagcccagatgtgttcacccacgtgctgtactacatgtacagcgaccacacagagctgagccctgaggccgcctatgatgtgctgtctgtggccgacatgtacctgctgcccggcctgaagaggctgtgtggccgcagcctggcccagatgctggatgaggacacagtggtgggcgtgtggagggtggccaagctgttccggctggcccggctggaggaccagtgcacagagtacatggccaaggtgattgagaagctggtggagagagaagattttgtggaggccgtgaaggaggaggccgctgctgtggccgcccggcaggagacagacagcatccccctggtggatgacatccgcttccacgtggccagcacagtgcagacctacagcgccatcgaggaggcccagcagaggctgcgggccctggaggacctgctggtgtccatcggcctggactgctag

SEQ ID NO: 143633 - DNA, 1011 bp, synthetic construct; identical to SEQ ID NO: 143632
  misc_feature 1..1011: note = Description of Artificial Sequence: Synthetic coding sequence
  source 1..1011: mol_type = other DNA

SEQ ID NO: 143634 - DNA, 1011 bp, synthetic construct; identical to SEQ ID NO: 143632
  misc_feature 1..1011: note = Description of Artificial Sequence: Synthetic coding sequence
  source 1..1011: mol_type = other DNA

SEQ ID NO: 143635 - DNA, 2061 bp, synthetic construct
  misc_feature 1..2061: note = Description of Artificial Sequence: Synthetic coding sequence
  source 1..2061: mol_type = other DNA
atggaggccagccaggagggccacctggagctggtgaagtacctgctggccagcggggccaacgtgcacgccaccacagccaccggggacacagccctgacctacgcctgtgaaaatggccacacagatgtggctgatgtgctgctgcaggccggggctgacctggacaagcaggaggacatgaagaccatcctggagggcatcgaccctgccaagcaccaggagcacgagagcgagggcggccgcacccccctgatgaaggccgcccgggccggccacctgtgcaccgtgcagttcctgatcagcaaaggagccaacgtgaacagagccacagccaacaatgaccacacagtggtgtccctggcctgtgccggcggccacctggccgtggtggagctgctgctggcccatggagctgaccccacccaccggctgaaggatggcagcaccatgctgattgaagctgccaagggcggccacaccaacgtggtgtcctacctgctggactaccccaacaacgtgctgtctgtgcccaccacagatgtgtcccagctgcccccacccagccaggaccagagccaggagccagacaggaccagccaggagaacagccctgccctgctgggcgtgcagaaggctgtgtccaccagggtgcccaccggcagcaacagcagcagccagaccacagagtgcctgaccccagagagctgcagccagaccaccagcaatgtggccagccagagcatgcctcctgtgtaccccagcgtggacattgatgcccacacagagagcaaccacgacacagccctgaccctggcctgtgccggcggccacgaggagctggtgtctgtgctgattgccagagatgccaagattgagcaccgggacaagaagggcttcacccccctcatcctggccgccacagctggccacgtgggcgtggtggagatcctgctggacaagggcggggacatcgaggcccagagcgagaggaccaaggacacccccctgagcctggcctgcagcggcggccggcaggaggtggtggacctgctgctggcccggggggccaacaaggagcacagaaatgtgtctgactacacccccctgagcctggccgccagcggcggctacgtgaacatcatcaagatcctgctgaatgctggagctgagatcaacagcaggacaggcagcaagctgggcatcagccccctgatgctggccgccatgaatggacatgtgcctgctgtgaagctgctgctggacatgggcagtgacatcaatgcccagatcgagaccaacagaaacacagccctgaccctggcctgcttccagggccgggcagaggtggtgtccctgctgctggacaggaaggccaacgtggagcaccgggccaagacaggcctgacccccctgatggaggccgccagcggcggctatgcagaggtgggccgggtgctgctggacaagggagcagatgtgaatgcccctcctgtgcccagcagccgggacacagccctgaccatcgctgctgacaagggccactacaagttctgtgagctgctgatccacagaggagcccacattgatgtgaggaacaagaagggcaacacccccctgtggctggccagcaatggaggccactttgatgtggtgcagctgctggtgcaggccggggctgatgtggatgctgctgacaacaggaagatcacccccctgatgtctgccttcagaaaaggacatgtgaaggtggtgcagtacctggtgaaggaggtgaaccagttccccagcgacatcgagtgcatgagatacatcgccaccatcacagacaaggagctgctgaagaagtgccaccagtgtgtggagaccatcgtgaaggccaaggaccagcaggccgctgaggccaacaagaatgccagcatcctgctgaaggagctggacctggagaagagccgggaggagagcaggaagcaggccctggccgccaagcgggagaagaggaaggagaagaggaagaagaagaaggaggagcagaagaggaagcaggaggaggatgaatag

SEQ ID NO: 143636 - DNA, 7623 bp, synthetic construct
  misc_feature 1..7623: note = Description of Artificial Sequence: Synthetic coding sequence
  source 1..7623: mol_type = other DNA
atgctgacagattctgggggcggcggcaccagctttgaggaggacctggacagcgtggcccccaggtctgccccagctggggccagcgagcccccacctcctgggggcgtgggcctgggcatcagaacagtgcggctgtttggagaggccggccctgccagcggcgtgggcagcagcggcggcggcggcagcggcagcggcaccggcggcggagatgctgccctggacttcaagctggccgctgctgtgctgaggactggaggcggcggcggggccagcggcagtgatgaagatgaggtgtctgaggtggagagcttcatcctggaccaggaggacctggacaaccctgtgctgaagaccaccagcgagatcttcctgagcagcacagctgagggcgctgacctgaggacagtggaccctgagacccaggcccggctggaggccctgctggaggccgccggcatcggcaagctgagcacagcagatggcaaggcctttgctgaccctgaggtgctgcggcggctgaccagctctgtgtcctgtgccctggatgaggccgccgccgccctgaccaggatgaaggccgagaacagccacaatgccggccaggtggacaccaggagcctggccgaggcctgcagtgatggagatgtgaatgctgtgaggaagctgctggatgagggccgctctgtgaatgagcacacagaggagggggagagcctgctgtgcctggcctgcagcgctggctactatgagctggcccaggtgctgctggccatgcacgccaacgtggaggaccggggcaacaagggggacatcacccccctgatggccgccagcagcggcggctacctggacatcgtgaagctgctgctgctgcatgatgctgatgtgaacagccagagcgccaccggcaacacagccctgacctacgcctgtgccggcggctttgtggacatcgtgaaggtgctgctgaatgaaggagccaacatcgaggaccacaatgaaaatggccacacccccctgatggaggccgccagcgctggccacgtggaggtggcccgggtgctgctggaccacggggccggcatcaacacccacagcaatgagttcaaggagagcgccctgaccctggcctgctacaagggccacctggacatggtgcgcttcctgctggaggccggggctgaccaggagcacaagacagatgagatgcacacagccctgatggaggcctgcatggatggccacgtggaggtggcccggctgctgctggacagcggggcccaggtgaacatgcctgctgacagctttgagagccccctgaccctggccgcctgtggcggccacgtggagctggccgccctgctgattgaaagaggagccaacctggaggaggtgaatgatgagggctacacccccctgatggaggccgcccgggagggccacgaggagatggtggccctgctgctggcccagggcgccaacatcaatgcccagacagaggagacccaggagacagccctgaccctggcctgctgcggcggcttcagcgaggtggccgacttcctgatcaaggccggggctgacatcgagctgggctgcagcacccccctgatggaggccagccaggagggccacctggagctggtgaagtacctgctggccagcggggccaacgtgcacgccaccacagccactggagacacagccctgacctacgcctgtgaaaatggccacacagatgtggctgatgtgctgctgcaggccggggctgacctggagcacgagagcgagggcggccgcacccccctgatgaaggccgcccgggccggccacctgtgcaccgtgcagttcctgatcagcaaaggagccaacgtgaacagagccacagccaacaatgaccacacagtggtgtccctggcctgtgccggcggccacctggccgtggtggagctgctgctggcccatggagctgaccccacccaccggctgaaggatggcagcaccatgctgattgaagctgccaagggcggccacaccaacgtggtgtcctacctgctggactaccccaacaacgtgctgtctgtgcccaccacagatgtgtcccagctgcccccacccagccaggaccagagccaggtgccccgggtgcccacccacaccctggccatggtggtgcccccccaggagccagacaggaccagccaggagaacagccctgccctgctgggcgtgcagaagggcaccagcaagcagaagagcagcagcctgcaggtggccgaccaggacctgctgcccagcttccacccctaccagcccctggagtgcatcgtggaggagacagagggcaagctgaatgagctgggccagaggatcagcgccatcgagaaggcccagctgaagagcctggagctgatccagggcgagcccctgaacaaggacaagattgaggagctgaagaagaaccgggaggagcaggtgcagaagaagaagaagatcctgaaggagctgcagaaggtggagcggcagctgcagatgaagacccagcagcagttcaccaaggagtacctggagaccaagggccagaaggacacagtgtccctgcaccagcagtgcagccacagaggagtcttccctgagggggagggagatggcagcctgcctgaggaccacttcagcgagctgccccaggtggacaccatcctcttcaaggacaatgatgtggatgatgagcagcagagcccccccagcgctgagcagattgactttgtgcctgtgcagcccctgagcagcccccagtgcaacttcagcagtgacctgggcagcaatggcaccaacagcctggagctgcagaaggtgtctggcaaccagcagatcgtgggccagccccagatcgccatcactggacatgaccagggcctgctggtgcaggagccagatggcctgatggtggccaccccagcccagaccctgacagacaccctggatgacctgattgctgctgtgtccaccagggtgcccaccggcagcaacagcagcagccagaccacagaatgtctgaccccagagagctgcagccagaccaccagcaatgtggccagccagagcatgcctcctgtgtaccccagcgtggacattgatgcccacacagagagcaaccacgacacagccctgaccctggcctgtgccggcggccacgaggagctggtgtctgtgctgattgccagagatgccaagattgagcaccgggacaagaagggcttcacccccctcatcctggccgccacagctggccacgtgggcgtggtggagatcctgctggacaagggcggggacatcgaggcccagagcgagaggaccaaggacacccccctgagcctggcctgcagcggcggccggcaggaggtggtggacctgctgctggcccggggggccaacaaggagcacagaaatgtgtctgactacacccccctgagcctggccgccagcggcggctacgtgaacatcatcaagatcctgctgaatgctggagctgagatcaacagcaggacaggcagcaagctgggcatcagccccctgatgctggccgccatgaatggccacgtgcctgctgtgaagctgctgctggacatgggcagtgacatcaatgcccagatcgagaccaacagaaacacagccctgaccctggcctgcttccagggccgggcagaggtggtgtccctgctgctggacaggaaggccaacgtggagcaccgggccaagacaggcctgacccccctgatggaggccgccagcggcggctacgccgaggtgggccgggtgctgctggacaagggagcagatgtgaatgcccctcctgtgcccagcagccgggacacagccctgaccatcgctgctgacaagggccactacaagttctgtgagctgctgatccacagaggagcccacattgatgtgaggaacaagaagggcaacacccccctgtggctggccagcaatggaggccactttgatgtggtgcagctgctggtgcaggccggggctgatgtggatgctgctgacaacaggaagatcacccccctgatgtctgccttcaggaagggccacgtgaaggtggtgcagtacctggtgaaggaggtgaaccagttccccagcgacatcgagtgcatgagatacatcgccaccatcacagacaaggagctgctgaagaagtgccaccagtgtgtggagaccatcgtgaaggccaaggaccagcaggccgctgaggccaacaagaatgccagcatcctgctgaaggagctggacctggagaagagccgggaggagagcaggaagcaggccctggccgccaagcgggagaagaggaaggagaagaggaagaagaagaaggaggagcagaagaggaagcaggaggaggatgaggagaacaagcccaaggaaaattctgagctgcctgaagatgaagatgaggaggagaatgatgaagatgtggagcaggaggtgcccatcgagccccccagcgccaccaccaccaccaccatcggcatcagcgccaccagcgccaccttcaccaacgtgtttgggaagaagagggccaacgtggtgaccacccccagcaccaacaggaagaacaagaagaacaagaccaaggagaccccacccacagcccacctgatcctgcctgagcagcacatgagcctggcccagcagaaggctgacaagaacaagatcaatggagagccccggggcggcggggccggcggcaacagcgacagcgacaacctggacagcacagactgcaacagcgagagcagcagcggcggcaagagccaggagctgaactttgtgatggatgtgaacagcagcaagtaccccagcctgctgctgcacagccaggaggagaagaccagcacagccaccagcaagacccagacccggctggagggggaggtgacccccaacagcctgagcaccagctacaagacagtgtccctgcccctgagcagccccaacatcaagctgaacctgaccagccccaagaggggccagaagcgggaggagggctggaaggaggtggtgagaagaagcaagaagctgtctgtgcctgcctctgtggtgagccgcatcatgggccggggcggctgcaacatcacagccatccaggatgtgactggagcccacattgatgtggacaagcagaaggacaagaatggagagaggatgatcaccatccggggcggcacagagagcaccaggtatgctgtgcagctgatcaatgccctgatccaggaccctgccaaggagctggaggacctgatccccaagaaccacatccgcaccccagccagcaccaagagcatccacgccaacttcagcagcggcgtgggcaccacagctgccagcagcaagaatgccttccccctgggcgcccccaccctggtgaccagccaggccaccaccctgagcaccttccagcctgccaacaagctgaacaagaatgtgcccaccaacgtgcgcagcagcttccctgtgtccctgcccctggcctacccccacccccactttgccctgctggccgcccagaccatgcagcagatccgccacccccggctgcccatggcccagtttggaggcaccttcagccccagccccaacacctggggccccttccctgtgcggcctgtgaaccctggcaacaccaacagcagccccaagcacaacaacaccagccggctgcccaaccagaatggaacagtgctgcccagcgagagcgctggcctggccacagccagctgccccatcaccgtgtcctctgtggtggccgccagccagcagctgtgtgtgaccaacaccaggacccccagctctgtgaggaagcagctgtttgcctgtgtgcccaagaccagccccccagccaccgtcatcagctctgtgaccagcacctgcagcagcctgcccagcgtgtcctctgcccccatcaccagcggccaggcccccaccaccttcctgcctgccagcaccagccaggcccagctgagcagccagaagatggagagcttctctgctgtgccccccaccaaggagaaggtgtccacccaggaccagcccatggccaacctgtgcacccccagcagcacagccaacagctgcagcagcagcgccagcaacacccctggggcccctgagacccaccccagcagcagccccacccccaccagcagcaacacccaggaggaggcccagcccagctctgtgtctgacctgagccccatgtccatgccctttgccagcaacagcgagcccgcccccctgaccctgaccagccccaggatggtggccgctgacaaccaggacaccagcaacctgccccagctggccgtgcctgccccccgggtgagccacaggatgcagccccggggcagcttctacagcatggtgcccaatgccaccatccaccaggacccccagagcatctttgtgaccaaccctgtgaccctgaccccaccccagggccccccagctgctgtgcagctgagcagcgctgtgaacatcatgaatggcagccagatgcacatcaacccagccaacaagagcctgccccccaccttcggccctgccaccctcttcaaccacttcagcagcctgtttgacagcagccaggtgcctgccaaccagggctggggagatggccccctgagcagccgggtggccacagatgccagcttcaccgtgcagagcgccttcctgggcaacagcgtgctgggccacctggagaacatgcacccagacaacagcaaggcccctggcttccggccccccagccagagggtgtccaccagccctgtgggcctgcccagcattgaccccagcggcagcagccccagcagcagcagcgcccccctggccagcttcagcggcatccctggcaccagggtcttcctgcagggccctgcccctgtgggcacccccagcttcaaccggcagcacttcagcccccacccctggaccagcgccagcaacagctgtgacagccccatccccagcgtgagcagcggcagcagcagccccctgagcgccaccagcgccccacccaccctgggccagcccaagggcgtgtctgccagccaggacaggaagatccccccacccatcggcacagagcggctggcccgcatccggcagggcggctctgtggcccaggccccagctggcaccagctttgtggcccctgtgggccacagcggcatctggagctttggagtgaatgctgtgtctgagggcctgagcggctggagccagagcgtgatgggcaaccaccccatgcaccagcagctgagtgaccccagcaccttcagccagcaccagcccatggagagagatgattctggcatggtggcccccagcaacatcttccaccagcccatggccagcggctttgtggacttcagcaagggcctgcccatctccatgtatggaggcaccatcatccccagccacccccagctggctgatgtgcctgggggccccctcttcaacggcctgcacaacccagaccctgcctggaaccccatgatcaaggtgatccagaacagcacagagtgcacagatgcccagcagtag

SEQ ID NO: 143637 - DNA, 7854 bp, synthetic construct
  misc_feature 1..7854: note = Description of Artificial Sequence: Synthetic coding sequence
  source 1..7854: mol_type = other DNA
atgctgacagattctgggggcggcggcaccagctttgaggaggacctggacagcgtggcccccaggtctgccccagctggggccagcgagcccccacctcctgggggcgtgggcctgggcatcagaacagtgcggctgtttggagaggccggccctgccagcggcgtgggcagcagcggcggcggcggcagcggcagcggcaccggcggcggagatgctgccctggacttcaagctggccgctgctgtgctgaggactggaggcggcggcggggccagcggcagtgatgaagatgaggtgtctgaggtggagagcttcatcctggaccaggaggacctggacaaccctgtgctgaagaccaccagcgagatcttcctgagcagcacagctgagggcgctgacctgaggacagtggaccctgagacccaggcccggctggaggccctgctggaggccgccggcatcggcaagctgagcacagcagatggcaaggcctttgctgaccctgaggtgctgcggcggctgaccagctctgtgtcctgtgccctggatgaggccgccgccgccctgaccaggatgaaggccgagaacagccacaatgccggccaggtggacaccaggagcctggccgaggcctgcagtgatggagatgtgaatgctgtgaggaagctgctggatgagggccgctctgtgaatgagcacacagaggagggggagagcctgctgtgcctggcctgcagcgctggctactatgagctggcccaggtgctgctggccatgcacgccaacgtggaggaccggggcaacaagggggacatcacccccctgatggccgccagcagcggcggctacctggacatcgtgaagctgctgctgctgcatgatgctgatgtgaacagccagagcgccaccggcaacacagccctgacctacgcctgtgccggcggctttgtggacatcgtgaaggtgctgctgaatgaaggagccaacatcgaggaccacaatgaaaatggccacacccccctgatggaggccgccagcgctggccacgtggaggtggcccgggtgctgctggaccacggggccggcatcaacacccacagcaatgagttcaaggagagcgccctgaccctggcctgctacaagggccacctggacatggtgcgcttcctgctggaggccggggctgaccaggagcacaagacagatgagatgcacacagccctgatggaggcctgcatggatggccacgtggaggtggcccggctgctgctggacagcggggcccaggtgaacatgcctgctgacagctttgagagccccctgaccctggccgcctgtggcggccacgtggagctggccgccctgctgattgaaagaggagccaacctggaggaggtgaatgatgagggctacacccccctgatggaggccgcccgggagggccacgaggagatggtggccctgctgctggcccagggcgccaacatcaatgcccagacagaggagacccaggagacagccctgaccctggcctgctgcggcggcttcagcgaggtggccgacttcctgatcaaggccggggctgacatcgagctgggctgcagcacccccctgatggaggccagccaggagggccacctggagctggtgaagtacctgctggccagcggggccaacgtgcacgccaccacagccactggagacacagccctgacctacgcctgtgaaaatggccacacagatgtggctgatgtgctgctgcaggccggggctgacctggagcacgagagcgagggcggccgcacccccctgatgaaggccgcccgggccggccacctgtgcaccgtgcagttcctgatcagcaaaggagccaacgtgaacagagccacagccaacaatgaccacacagtggtgtccctggcctgtgccggcggccacctggccgtggtggagctgctgctggcccatggagctgaccccacccaccggctgaaggatggcagcaccatgctgattgaagctgccaagggcggccacaccaacgtggtgtcctacctgctggactaccccaacaacgtgctgtctgtgcccaccacagatgtgtcccagctgcccccacccagccaggaccagagccaggtgccccgggtgcccacccacaccctggccatggtggtgcccccccaggagccagacaggaccagccaggagaacagccctgccctgctgggcgtgcagaagggcaccagcaagcagaagagcagcagcctgcaggtggccgaccaggacctgctgcccagcttccacccctaccagcccctggagtgcatcgtggaggagacagagggcaagctgaatgagctgggccagaggatcagcgccatcgagaaggcccagctgaagagcctggagctgatccagggcgagcccctgaacaaggacaagattgaggagctgaagaagaaccgggaggagcaggtgcagaagaagaagaagatcctgaaggagctgcagaaggtggagcggcagctgcagatgaagacccagcagcagttcaccaaggagtacctggagaccaagggccagaaggacacagtgtccctgcaccagcagtgcagccacagaggagtcttccctgagggggagggagatggcagcctgcctgaggaccacttcagcgagctgccccaggtggacaccatcctcttcaaggacaatgatgtggatgatgagcagcagagcccccccagcgctgagcagattgactttgtgcctgtgcagcccctgagcagcccccagtgcaacttcagcagtgacctgggcagcaatggcaccaacagcctggagctgcagaaggtgtctggcaaccagcagatcgtgggccagccccagatcgccatcactggacatgaccagggcctgctggtgcaggagccagatggcctgatggtggccaccccagcccagaccctgacagacaccctggatgacctgattgctgctgtgtccaccagggtgcccaccggcagcaacagcagcagccagaccacagaatgtctgaccccagagagctgcagccagaccaccagcaatgtggccagccagagcatgcctcctgtgtaccccagcgtggacattgatgcccacacagagagcaaccacgacacagccctgaccctggcctgtgccggcggccacgaggagctggtgtctgtgctgattgccagagatgccaagattgagcaccgggacaagaagggcttcacccccctcatcctggccgccacagctggccacgtgggcgtggtggagatcctgctggacaagggcggggacatcgaggcccagagcgagaggaccaaggacacccccctgagcctggcctgcagcggcggccggcaggaggtggtggacctgctgctggcccggggggccaacaaggagcacagaaatgtgtctgactacacccccctgagcctggccgccagcggcggctacgtgaacatcatcaagatcctgctgaatgctggagctgagatcaacagcaggacaggcagcaagctgggcatcagccccctgatgctggccgccatgaatggccacgtgcctgctgtgaagctgctgctggacatgggcagtgacatcaatgcccagatcgagaccaacagaaacacagccctgaccctggcctgcttccagggccgggcagaggtggtgtccctgctgctggacaggaaggccaacgtggagcaccgggccaagacaggcctgacccccctgatggaggccgccagcggcggctacgccgaggtgggccgggtgctgctggacaagggagcagatgtgaatgcccctcctgtgcccagcagccgggacacagccctgaccatcgctgctgacaagggccactacaagttctgtgagctgctgatccacagaggagcccacattgatgtgaggaacaagaagggcaacacccccctgtggctggccagcaatggaggccactttgatgtggtgcagctgctggtgcaggccggggctgatgtggatgctgctgacaacaggaagatcacccccctgatgtctgccttcaggaagggccacgtgaaggtggtgcagtacctggtgaaggaggtgaaccagttccccagcgacatcgagtgcatgagatacatcgccaccatcacagacaaggagctgctgaagaagtgccaccagtgtgtggagaccatcgtgaaggccaaggaccagcaggccgctgaggccaacaagaatgccagcatcctgctgaaggagctggacctggagaagagccgggaggagagcaggaagcaggccctggccgccaagcgggagaagaggaaggagaagaggaagaagaagaaggaggagcagaagaggaagcaggaggaggatgaggagaacaagcccaaggaaaattctgagctgcctgaagatgaagatgaggaggagaatgatgaagatgtggagcaggaggtgcccatcgagccccccagcgccaccaccaccaccaccatcggcatcagcgccaccagcgccaccttcaccaacgtgtttgggaagaagagggccaacgtggtgaccacccccagcaccaacaggaagaacaagaagaacaagaccaaggagaccccacccacagcccacctgatcctgcctgagcagcacatgagcctggcccagcagaaggctgacaagaacaagatcaatggagagccccggggcggcggggccggcggcaacagcgacagcgacaacctggacagcacagactgcaacagcgagagcagcagcggcggcaagagccaggagctgaactttgtgatggatgtgaacagcagcaagtaccccagcctgctgctgcacagccaggaggagaagaccagcacagccaccagcaagacccagacccggctggagggggaggtgacccccaacagcctgagcaccagctacaagacagtgtccctgcccctgagcagccccaacatcaagctgaacctgaccagccccaagaggggccagaagcgggaggagggctggaaggaggtggtgagaagaagcaagaagctgtctgtgcctgcctctgtggtgagccgcatcatgggccggggcggctgcaacatcacagccatccaggatgtgactggagcccacattgatgtggacaagcagaaggacaagaatggagagaggatgatcaccatccggggcggcacagagagcaccaggtatgctgtgcagctgatcaatgccctgatccaggaccctgccaaggagctggaggacctgatccccaagaaccacatccgcaccccagccagcaccaagagcatccacgccaacttcagcagcggcgtgggcaccacagctgccagcagcaagaatgccttccccctgggcgcccccaccctggtgaccagccaggccaccaccctgagcaccttccagcctgccaacaagctgaacaagaatgtgcccaccaacgtgcgcagcagcttccctgtgtccctgcccctggcctacccccacccccactttgccctgctggccgcccagaccatgcagcagatccgccacccccggctgcccatggcccagtttggaggcaccttcagccccagccccaacacctggggccccttccctgtgcggcctgtgaaccctggcaacaccaacagcagccccaagcacaacaacaccagccggctgcccaaccagaatggaacagtgctgcccagcgagagcgctggcctggccacagccagctgccccatcaccgtgtcctctgtggtggccgccagccagcagctgtgtgtgaccaacaccaggacccccagctctgtgaggaagcagctgtttgcctgtgtgcccaagaccagccccccagccaccgtcatcagctctgtgaccagcacctgcagcagcctgcccagcgtgtcctctgcccccatcaccagcggccaggcccccaccaccttcctgcctgccagcaccagccaggcccagctgagcagccagaagatggagagcttctctgctgtgccccccaccaaggagaaggtgtccacccaggaccagcccatggccaacctgtgcacccccagcagcacagccaacagctgcagcagcagcgccagcaacacccctggggcccctgagacccaccccagcagcagccccacccccaccagcagcaacacccaggaggaggcccagcccagctctgtgtctgacctgagccccatgtccatgccctttgccagcaacagcgagcccgcccccctgaccctgaccagccccaggatggtggccgctgacaaccaggacaccagcaacctgccccagctggccgtgcctgccccccgggtgagccacaggatgcagccccggggcagcttctacagcatggtgcccaatgccaccatccaccaggacccccagagcatctttgtgaccaaccctgtgaccctgaccccaccccagggccccccagctgctgtgcagctgagcagcgctgtgaacatcatgaatggcagccagatgcacatcaacccagccaacaagagcctgccccccaccttcggccctgccaccctcttcaaccacttcagcagcctgtttgacagcagccaggtgcctgccaaccagggctggggagatggccccctgagcagccgggtggccacagatgccagcttcaccgtgcagagcgccttcctgggcaacagcgtgctgggccacctggagaacatgcacccagacaacagcaaggcccctggcttccggccccccagccagagggtgtccaccagccctgtgggcctgcccagcattgaccccagcggcagcagccccagcagcagcagcgcccccctggccagcttcagcggcatccctggcaccagggtcttcctgcagggccctgcccctgtgggcacccccagcttcaaccggcagcacttcagcccccacccctggaccagcgccagcaacagcagcaccagcgccccacccaccctgggccagcccaagggcgtgtctgccagccaggacaggaagatccccccacccatcggcacagagcggctggcccgcatccggcagggcggctctgtggcccaggccccagctggcaccagctttgtggcccctgtgggccacagcggcatctggagctttggagtgaatgctgtgtctgagggcctgagcggctggagccagagcgtgatgggcaaccaccccatgcaccagcagctgagtgaccccagcaccttcagccagcaccagcccatggagagagatgacagcggcatggtggcccccagcaacatcttccaccagcccatggccagcggctttgtggacttcagcaagggcctgcccatctccatgtatggaggcaccatcatccccagccacccccagctggctgatgtgcctgggggccccctcttcaacggcctgcacaacccagaccctgcctggaaccccatgatcaaggtgatccagaacagcacagaatgtacagatgcccagcaggccagcctgctgcccagcgtgcctgccctgaagggggagatccccagcccccagctgacccggcccaagaagagaattggccggcccatggtggccagccccaaccagaggcaccaggaccacctgcggcccaaggtgcctgctggggtgcaggagctgacccactgcccagacacccccctgctgccccccagcgacagccggggccacaacagcagcaacagccccagcctgcaggccggcggcgctgagggcgctggggaccggggccgggacaccaggtag

SEQ ID NO: 143638 - DNA, 3024 bp, synthetic construct
  misc_feature 1..3024: note = Description of Artificial Sequence: Synthetic coding sequence
  source 1..3024: mol_type = other DNA
atggtggccctgctgctggcccagggcgccaacatcaatgcccagacagaggagacccaggagacagccctgaccctggcctgctgcggcggcttcagcgaggtggccgacttcctgatcaaggccggggctgacatcgagctgggctgcagcacccccctgatggaggccagccaggagggccacctggagctggtgaagtacctgctggccagcggggccaacgtgcacgccaccacagccaccggggacacagccctgacctacgcctgtgaaaatggccacacagatgtggctgatgtgctgctgcaggccggggctgacctggacaagcaggaggacatgaagaccatcctggagggcatcgaccctgccaagcaccaggagcacgagagcgagggcggccgcacccccctgatgaaggccgcccgggccggccacctgtgcaccgtgcagttcctgatcagcaaaggagccaacgtgaacagagccacagccaacaatgaccacacagtggtgtccctggcctgtgccggcggccacctggccgtggtggagctgctgctggcccatggagctgaccccacccaccggctgaaggatggcagcaccatgctgattgaagctgccaagggcggccacaccaacgtggtgtcctacctgctggactaccccaacaacgtgctgtctgtgcccaccacagatgtgtcccagctgcccccacccagccaggaccagagccaggtgccccgggtgcccacccacaccctggccatggtggtgcccccccaggagccagacaggaccagccaggagaacagccctgccctgctgggcgtgcagaagggcaccagcaagcagaagagcagcagcctgcaggtggccgaccaggacctgctgcccagcttccacccctaccagcccctggagtgcatcgtggaggagacagagggcaagctgaatgagctgggccagaggatcagcgccatcgagaaggcccagctgaagagcctggagctgatccagggcgagcccctgaacaaggacaagattgaggagctgaagaagaaccgggaggagcaggtgcagaagaagaagaagatcctgaaggagctgcagaaggtggagcggcagctgcagatgaagacccagcagcagttcaccaaggagtacctggagaccaagggccagaaggacacagtgtccctgcaccagcagtgcagccacagaggagtcttccctgagggggagggagatggcagcctgcctgaggaccacttcagcgagctgccccaggtggacaccatcctcttcaaggacaatgatgtggatgatgagcagcagagcccccccagcgctgagcagattgactttgtgcctgtgcagcccctgagcagcccccagtgcaacttcagcagtgacctgggcagcaatggcaccaacagcctggagctgcagaaggtgtctggcaaccagcagatcgtgggccagccccagatcgccatcactggacatgaccagggcctgctggtgcaggagccagatggcctgatggtggccaccccagcccagaccctgacagacaccctggatgacctgattgctgctgtgtccaccagggtgcccaccggcagcaacagcagcagccagaccacagaatgtctgaccccagagagctgcagccagaccaccagcaatgtggccagccagagcatgcctcctgtgtaccccagcgtggacattgatgcccacacagagagcaaccacgacacagccctgaccctggcctgtgccggcggccacgaggagctggtgtctgtgctgattgccagagatgccaagattgagcaccgggacaagaagggcttcacccccctcatcctggccgccacagctggccacgtgggcgtggtggagatcctgctggacaagggcggggacatcgaggcccagagcgagaggaccaaggacacccccctgagcctggcctgcagcggcggccggcaggaggtggtggacctgctgctggcccggggggccaacaaggagcacagaaatgtgtctgactacacccccctgagcctggccgccagcggcggctacgtgaacatcatcaagatcctgctgaatgctggagctgagatcaacagcaggacaggcagcaagctgggcatcagccccctgatgctggccgccatgaatggccacgtgcctgctgtgaagctgctgctggacatgggcagtgacatcaatgcccagatcgagaccaacagaaacacagccctgaccctggcctgcttccagggccgggcagaggtggtgtccctgctgctggacaggaaggccaacgtggagcaccgggccaagacaggcctgacccccctgatggaggccgccagcggcggctacgccgaggtgggccgggtgctgctggacaagggagcagatgtgaatgcccctcctgtgcccagcagccgggacacagccctgaccatcgctgctgacaagggccactacaagttctgtgagctgctgatccacagaggagcccacattgatgtgaggaacaagaagggcaacacccccctgtggctggccagcaatggaggccactttgatgtggtgcagctgctggtgcaggccggggctgatgtggatgctgctgacaacaggaagatcacccccctgatgtctgccttcaggaagggccacgtgaaggtggtgcagtacctggtgaaggaggtgaaccagttccccagcgacatcgagtgcatgagatacatcgccaccatcacagacaaggagctgctgaagaagtgccaccagtgtgtggagaccatcgtgaaggccaaggaccagcaggccgctgaggccaacaagaatgccagcatcctgctgaaggagctggacctggagaagagccgggaggagagcaggaagcaggccctggccgccaagcgggagaagaggaaggagaagaggaaggagaagaggggcacagagaaggagaccggcagaagatag

SEQ ID NO: 143639 - DNA, 7629 bp, synthetic construct
  misc_feature 1..7629: note = Description of Artificial Sequence: Synthetic coding sequence
  source 1..7629: mol_type = other DNA
atgctgacagattctgggggcggcggcaccagctttgaggaggacctggacagcgtggcccccaggtctgccccagctggggccagcgagcccccacctcctgggggcgtgggcctgggcatcagaacagtgcggctgtttggagaggccggccctgccagcggcgtgggcagcagcggcggcggcggcagcggcagcggcaccggcggcggagatgctgccctggacttcaagctggccgctgctgtgctgaggactggaggcggcggcggggccagcggcagtgatgaagatgaggtgtctgaggtggagagcttcatcctggaccaggaggacctggacaaccctgtgctgaagaccaccagcgagatcttcctgagcagcacagctgagggcgctgacctgaggacagtggaccctgagacccaggcccggctggaggccctgctggaggccgccggcatcggcaagctgagcacagcagatggcaaggcctttgctgaccctgaggtgctgcggcggctgaccagctctgtgtcctgtgccctggatgaggccgccgccgccctgaccaggatgaaggccgagaacagccacaatgccggccaggtggacaccaggagcctggccgaggcctgcagtgatggagatgtgaatgctgtgaggaagctgctggatgagggccgctctgtgaatgagcacacagaggagggggagagcctgctgtgcctggcctgcagcgctggctactatgagctggcccaggtgctgctggccatgcacgccaacgtggaggaccggggcaacaagggggacatcacccccctgatggccgccagcagcggcggctacctggacatcgtgaagctgctgctgctgcatgatgctgatgtgaacagccagagcgccaccggcaacacagccctgacctacgcctgtgccggcggctttgtggacatcgtgaaggtgctgctgaatgaaggagccaacatcgaggaccacaatgaaaatggccacacccccctgatggaggccgccagcgctggccacgtggaggtggcccgggtgctgctggaccacggggccggcatcaacacccacagcaatgagttcaaggagagcgccctgaccctggcctgctacaagggccacctggacatggtgcgcttcctgctggaggccggggctgaccaggagcacaagacagatgagatgcacacagccctgatggaggcctgcatggatggccacgtggaggtggcccggctgctgctggacagcggggcccaggtgaacatgcctgctgacagctttgagagccccctgaccctggccgcctgtggcggccacgtggagctggccgccctgctgattgaaagaggagccaacctggaggaggtgaatgatgagggctacacccccctgatggaggccgcccgggagggccacgaggagatggtggccctgctgctggcccagggcgccaacatcaatgcccagacagaggagacccaggagacagccctgaccctggcctgctgcggcggcttcagcgaggtggccgacttcctgatcaaggccggggctgacatcgagctgggctgcagcacccccctgatggaggccagccaggagggccacctggagctggtgaagtacctgctggccagcggggccaacgtgcacgccaccacagccactggagacacagccctgacctacgcctgtgaaaatggccacacagatgtggctgatgtgctgctgcaggccggggctgacctggagcacgagagcgagggcggccgcacccccctgatgaaggccgcccgggccggccacctgtgcaccgtgcagttcctgatcagcaaaggagccaacgtgaacagagccacagccaacaatgaccacacagtggtgtccctggcctgtgccggcggccacctggccgtggtggagctgctgctggcccatggagctgaccccacccaccggctgaaggatggcagcaccatgctgattgaagctgccaagggcggccacaccaacgtggtgtcctacctgctggactaccccaacaacgtgctgtctgtgcccaccacagatgtgtcccagctgcccccacccagccaggaccagagccaggtgccccgggtgcccacccacaccctggccatggtggtgcccccccaggagccagacaggaccagccaggagaacagccctgccctgctgggcgtgcagaagggcaccagcaagcagaagagcagcagcctgcaggtggccgaccaggacctgctgcccagcttccacccctaccagcccctggagtgcatcgtggaggagacagagggcaagctgaatgagctgggccagaggatcagcgccatcgagaaggcccagctgaagagcctggagctgatccagggcgagcccctgaacaaggacaagattgaggagctgaagaagaaccgggaggagcaggtgcagaagaagaagaagatcctgaaggagctgcagaaggtggagcggcagctgcagatgaagacccagcagcagttcaccaaggagtacctggagaccaagggccagaaggacacagtgtccctgcaccagcagtgcagccacagaggagtcttccctgagggggagggagatggcagcctgcctgaggaccacttcagcgagctgccccaggtggacaccatcctcttcaaggacaatgatgtggatgatgagcagcagagcccccccagcgctgagcagattgactttgtgcctgtgcagcccctgagcagcccccagtgcaacttcagcagtgacctgggcagcaatggcaccaacagcctggagctgcagaaggtgtctggcaaccagcagatcgtgggccagccccagatcgccatcactggacatgaccagggcctgctggtgcaggagccagatggcctgatggtggccaccccagcccagaccctgacagacaccctggatgacctgattgctgctgtgtccaccagggtgcccaccggcagcaacagcagcagccagaccacagaatgtctgaccccagagagctgcagccagaccaccagcaatgtggccagccagagcatgcctcctgtgtaccccagcgtggacattgatgcccacacagagagcaaccacgacacagccctgaccctggcctgtgccggcggccacgaggagctggtgtctgtgctgattgccagagatgccaagattgagcaccgggacaagaagggcttcacccccctcatcctggccgccacagctggccacgtgggcgtggtggagatcctgctggacaagggcggggacatcgaggcccagagcgagaggaccaaggacacccccctgagcctggcctgcagcggcggccggcaggaggtggtggacctgctgctggcccggggggccaacaaggagcacagaaatgtgtctgactacacccccctgagcctggccgccagcggcggctacgtgaacatcatcaagatcctgctgaatgctggagctgagatcaacagcaggacaggcagcaagctgggcatcagccccctgatgctggccgccatgaatggccacgtgcctgctgtgaagctgctgctggacatgggcagtgacatcaatgcccagatcgagaccaacagaaacacagccctgaccctggcctgcttccagggccgggcagaggtggtgtccctgctgctggacaggaaggccaacgtggagcaccgggccaagacaggcctgacccccctgatggaggccgccagcggcggctacgccgaggtgggccgggtgctgctggacaagggagcagatgtgaatgcccctcctgtgcccagcagccgggacacagccctgaccatcgctgctgacaagggccactacaagttctgtgagctgctgatccacagaggagcccacattgatgtgaggaacaagaagggcaacacccccctgtggctggccagcaatggaggccactttgatgtggtgcagctgctggtgcaggccggggctgatgtggatgctgctgacaacaggaagatcacccccctgatgtctgccttcaggaagggccacgtgaaggtggtgcagtacctggtgaaggaggtgaaccagttccccagcgacatcgagtgcatgagatacatcgccaccatcacagacaaggagctgctgaagaagtgccaccagtgtgtggagaccatcgtgaaggccaaggaccagcaggccgctgaggccaacaagaatgccagcatcctgctgaaggagctggacctggagaagagccgggaggagagcaggaagcaggccctggccgccaagcgggagaagaggaaggagaagaggaagaagaagaaggaggagcagaagaggaagcaggaggaggatgaggagaacaagcccaaggaaaattctgagctgcctgaagatgaagatgaggaggagaatgatgaagatgtggagcaggaggtgcccatcgagccccccagcgccaccaccaccaccaccatcggcatcagcgccaccagcgccaccttcaccaacgtgtttgggaagaagagggccaacgtggtgaccacccccagcaccaacaggaagaacaagaagaacaagaccaaggagaccccacccacagcccacctgatcctgcctgagcagcacatgagcctggcccagcagaaggctgacaagaacaagatcaatggagagccccggggcggcggggccggcggcaacagcgacagcgacaacctggacagcacagactgcaacagcgagagcagcagcggcggcaagagccaggagctgaactttgtgatggatgtgaacagcagcaagtaccccagcctgctgctgcacagccaggaggagaagaccagcacagccaccagcaagacccagacccggctggagggggaggtgacccccaacagcctgagcaccagctacaagacagtgtccctgcccctgagcagccccaacatcaagctgaacctgaccagccccaagaggggccagaagcgggaggagggctggaaggaggtggtgagaagaagcaagaagctgtctgtgcctgcctctgtggtgagccgcatcatgggccggggcggctgcaacatcacagccatccaggatgtgactggagcccacattgatgtggacaagcagaaggacaagaatggagagaggatgatcaccatccggggcggcacagagagcaccaggtatgctgtgcagctgatcaatgccctgatccaggaccctgccaaggagctggaggacctgatccccaagaaccacatccgcaccccagccagcaccaagagcatccacgccaacttcagcagcggcgtgggcaccacagctgccagcagcaagaatgccttccccctgggcgcccccaccctggtgaccagccaggccaccaccctgagcaccttccagcctgccaacaagctgaacaagaatgtgcccaccaacgtgcgcagcagcttccctgtgtccctgcccctggcctacccccacccccactttgccctgctggccgcccagaccatgcagcagatccgccacccccggctgcccatggcccagtttggaggcaccttcagccccagccccaacacctggggccccttccctgtgcggcctgtgaaccctggcaacaccaacagcagccccaagcacaacaacaccagccggctgcccaaccagaatggaacagtgctgcccagcgagagcgctggcctggccacagccagctgccccatcaccgtgtcctctgtggtggccgccagccagcagctgtgtgtgaccaacaccaggacccccagctctgtgaggaagcagctgtttgcctgtgtgcccaagaccagccccccagccaccgtcatcagctctgtgaccagcacctgcagcagcctgcccagcgtgtcctctgcccccatcaccagcggccaggcccccaccaccttcctgcctgccagcaccagccaggcccagctgagcagccagaagatggagagcttctctgctgtgccccccaccaaggagaaggtgtccacccaggaccagcccatggccaacctgtgcacccccagcagcacagccaacagctgcagcagcagcgccagcaacacccctggggcccctgagacccaccccagcagcagccccacccccaccagcagcaacacccaggaggaggcccagcccagctctgtgtctgacctgagccccatgtccatgccctttgccagcaacagcgagcccgcccccctgaccctgaccagccccaggatggtggccgctgacaaccaggacaccagcaacctgccccagctggccgtgcctgccccccgggtgagccacaggatgcagccccggggcagcttctacagcatggtgcccaatgccaccatccaccaggacccccagagcatctttgtgaccaaccctgtgaccctgaccccaccccagggccccccagctgctgtgcagctgagcagcgctgtgaacatcatgaatggcagccagatgcacatcaacccagccaacaagagcctgccccccaccttcggccctgccaccctcttcaaccacttcagcagcctgtttgacagcagccaggtgcctgccaaccagggctggggagatggccccctgagcagccgggtggccacagatgccagcttcaccgtgcagagcgccttcctgggcaacagcgtgctgggccacctggagaacatgcacccagacaacagcaaggcccctggcttccggccccccagccagagggtgtccaccagccctgtgggcctgcccagcattgaccccagcggcagcagccccagcagcagcagcgcccccctggccagcttcagcggcatccctggcaccagggtcttcctgcagggccctgcccctgtgggcacccccagcttcaaccggcagcacttcagcccccacccctggaccagcgccagcaacagcagcaccagcgccccacccaccctgggccagcccaagggcgtgtctgccagccaggacaggaagatccccccacccatcggcacagagcggctggcccgcatccggcagggcggctctgtggcccaggccccagctggcaccagctttgtggcccctgtgggccacagcggcatctggagctttggagtgaatgctgtgtctgagggcctgagcggctggagccagagcgtgatgggcaaccaccccatgcaccagcagctgagtgaccccagcaccttcagccagcaccagcccatggagagagatgacagcggcatggtggcccccagcaacatcttccaccagcccatggccagcggctttgtggacttcagcaagggcctgcccatctccatgtatggaggcaccatcatccccagccacccccagctggctgatgtgcctgggggccccctcttcaacggcctgcacaacccagaccctgcctggaaccccatgatcaaggtgatccagaacagcacagaatgtacagatgcccagcagatctggccaggcacctgggccccccacatcggcaacatgcacctgaagtatgtgaactag

SEQ ID NO: 143640 - DNA, 1851 bp, synthetic construct
  misc_feature 1..1851: note = Description of Artificial Sequence: Synthetic coding sequence
  source 1..1851: mol_type = other DNA
atgctgacagattctgggggcggcggcaccagctttgaggaggacctggacagcgtggcccccaggtctgccccagctggggccagcgagcccccacctcctgggggcgtgggcctgggcatcagaacagtgcggctgtttggagaggccggccctgccagcggcgtgggcagcagcggcggcggcggcagcggcagcggcaccggcggcggagatgctgccctggacttcaagctggccgctgctgtgctgaggactggaggcggcggcggggccagcggcagtgatgaagatgaggtgtctgaggtggagagcttcatcctggaccaggaggacctggacaaccctgtgctgaagaccaccagcgagatcttcctgagcagcacagctgagggcgctgacctgaggacagtggaccctgagacccaggcccggctggaggccctgctggaggccgccgcctttgctgaccctgaggtgctgcggcggctgaccagctctgtgtcctgtgccctggatgaagctgctgctgccctgaccaggatgaaggccgagaacagccacaatgccggccaggtggacaccaggagcctggccgaggcctgcagtgatggagatgtgaatgctgtgaggaagctgctggatgagggccgctctgtgaatgagcacacagaggagggggagagcctgctgtgcctggcctgcagcgctggctactatgagctggcccaggtgctgctggccatgcacgccaacgtggaggaccggggcaacaagggggacatcacccccctgatggccgccagcagcggcggctacctggacatcgtgaagctgctgctgctgcatgatgctgatgtgaacagccagagcgccactggaaacacagccctgacctacgcctgtgccggcggctttgtggacatcgtgaaggtgctgctgaatgaaggagccaacatcgaggaccacaatgaaaatggccacacccccctgatggaggccgccagcgctggccacgtggaggtggcccgggtgctgctggaccatggagctggcatcaacacccacagcaatgagttcaaggagagcgccctgaccctggcctgctacaagggccacctggacatggtgcgcttcctgctggaggccggggctgaccaggagcacaagacagatgagatgcacacagccctgatggaggcctgcatggatggccacgtggaggtggcccggctgctgctggacagcggggcccaggtgaacatgcctgctgacagctttgagagccccctgaccctggccgcctgtggcggccacgtggagctggccgccctgctgattgagcggggggccaacctggaggaggtgaatgatgagggctacacccccctgatggaggccgcccgggagggccacgaggagatggtggccctgctgctggcccagggcgccaacatcaatgcccagacagaggagacccaggagacagccctgaccctggcctgctgcggcggcttcagcgaggtggccgacttcctgatcaaggccggggctgacatcgagctgggctgcagcacccccctgatggaggccagccaggagggccacctggagctggtgaagtacctgctggccagcggggccaacgtgcacgccaccacagccaccggggacacagccctgacctacgcctgtgaaaatggccacacagatgtggctgatgtgctgctgcaggccggggctgacctggacaagcaggaggacatgaagaccatcctggagggcatcgaccctgccaagcaccaggtgcgggtggcctttgatgcctgcaagctgctgaggaaggagtag

SEQ ID NO: 143641 - DNA, 1884 bp, synthetic construct
  misc_feature 1..1884: note = Description of Artificial Sequence: Synthetic coding sequence
  source 1..1884: mol_type = other DNA
atgctgacagattctgggggcggcggcaccagctttgaggaggacctggacagcgtggcccccaggtctgccccagctggggccagcgagcccccacctcctgggggcgtgggcctgggcatcagaacagtgcggctgtttggagaggccggccctgccagcggcgtgggcagcagcggcggcggcggcagcggcagcggcaccggcggcggagatgctgccctggacttcaagctggccgctgctgtgctgaggactggaggcggcggcggggccagcggcagtgatgaagatgaggtgtctgaggtggagagcttcatcctggaccaggaggacctggacaaccctgtgctgaagaccaccagcgagatcttcctgagcagcacagctgagggcgctgacctgaggacagtggaccctgagacccaggcccggctggaggccctgctggaggccgccggcatcggcaagctgagcacagcagatggcaaggcctttgctgaccctgaggtgctgcggcggctgaccagctctgtgtcctgtgccctggatgaggccgccgccgccctgaccaggatgaaggccgagaacagccacaatgccggccaggtggacaccaggagcctggccgaggcctgcagtgatggagatgtgaatgctgtgaggaagctgctggatgagggccgctctgtgaatgagcacacagaggagggggagagcctgctgtgcctggcctgcagcgctggctactatgagctggcccaggtgctgctggccatgcacgccaacgtggaggaccggggcaacaagggggacatcacccccctgatggccgccagcagcggcggctacctggacatcgtgaagctgctgctgctgcatgatgctgatgtgaacagccagagcgccaccggcaacacagccctgacctacgcctgtgccggcggctttgtggacatcgtgaaggtgctgctgaatgaaggagccaacatcgaggaccacaatgaaaatggccacacccccctgatggaggccgccagcgctggccacgtggaggtggcccgggtgctgctggaccacggggccggcatcaacacccacagcaatgagttcaaggagagcgccctgaccctggcctgctacaagggccacctggacatggtgcgcttcctgctggaggccggggctgaccaggagcacaagacagatgagatgcacacagccctgatggaggcctgcatggatggccacgtggaggtggcccggctgctgctggacagcggggcccaggtgaacatgcctgctgacagctttgagagccccctgaccctggccgcctgtggcggccacgtggagctggccgccctgctgattgaaagaggagccaacctggaggaggtgaatgatgagggctacacccccctgatggaggccgcccgggagggccacgaggagatggtggccctgctgctggcccagggcgccaacatcaatgcccagacagaggagacccaggagacagccctgaccctggcctgctgcggcggcttcagcgaggtggccgacttcctgatcaaggccggggctgacatcgagctgggctgcagcacccccctgatggaggccagccaggagggccacctggagctggtgaagtacctgctggccagcggggccaacgtgcacgccaccacagccactggagacacagccctgacctacgcctgtgaaaatggccacacagatgtggctgatgtgctgctgcaggccggggctgacctggacaagcaggaggacatgaagaccatcctggagggcattgatcctgccaagcaccaggtgcgggtggcctttgatgcctgcaagctgctgaggaaggagtag

SEQ ID NO: 143642 - DNA, 4461 bp, synthetic construct
  misc_feature 1..4461: note = Description of Artificial Sequence: Synthetic coding sequence
  source 1..4461: mol_type = other DNA
ccccgggtgggccgccaccggctgcggctgcgggtgaggaccatgctgacagattctgggggcggcggcaccagctttgaggaggacctggacagcgtggcccccaggtctgccccagctggggccagcgagcccccacctcctgggggcgtgggcctgggcatcagaacagtgcggctgtttggagaggccggccctgccagcggcgtgggcagcagcggcggcggcggcagcggcagcggcaccggcggcggagatgctgccctggacttcaagctggccgctgctgtgctgaggactggaggcggcggcggggccagcggcagtgatgaagatgaggtgtctgaggtggagagcttcatcctggaccaggaggacctggacaaccctgtgctgaagaccaccagcgagatcttcctgagcagcacagctgagggcgctgacctgaggacagtggaccctgagacccaggcccggctggaggccctgctggaggccgccggcatcggcaagctgagcacagcagatggcaaggcctttgctgaccctgaggtgctgcggcggctgaccagctctgtgtcctgtgccctggatgaggccgccgccgccctgaccaggatgaaggccgagaacagccacaatgccggccaggtggacaccaggagcctggccgaggcctgcagtgatggagatgtgaatgctgtgaggaagctgctggatgagggccgctctgtgaatgagcacacagaggagggggagagcctgctgtgcctggcctgcagcgctggctactatgagctggcccaggtgctgctggccatgcacgccaacgtggaggaccggggcaacaagggggacatcacccccctgatggccgccagcagcggcggctacctggacatcgtgaagctgctgctgctgcatgatgctgatgtgaacagccagagcgccaccggcaacacagccctgacctacgcctgtgccggcggctttgtggacatcgtgaaggtgctgctgaatgaaggagccaacatcgaggaccacaatgaaaatggccacacccccctgatggaggccgccagcgctggccacgtggaggtggcccgggtgctgctggaccacggggccggcatcaacacccacagcaatgagttcaaggagagcgccctgaccctggcctgctacaagggccacctggacatggtgcgcttcctgctggaggccggggctgaccaggagcacaagacagatgagatgcacacagccctgatggaggcctgcatggatggccacgtggaggtggcccggctgctgctggacagcggggcccaggtgaacatgcctgctgacagctttgagagccccctgaccctggccgcctgtggcggccacgtggagctggccgccctgctgattgaaagaggagccaacctggaggaggtgaatgatgagggctacacccccctgatggaggccgcccgggagggccacgaggagatggtggccctgctgctggcccagggcgccaacatcaatgcccagacagaggagacccaggagacagccctgaccctggcctgctgcggcggcttcagcgaggtggccgacttcctgatcaaggccggggctgacatcgagctgggctgcagcacccccctgatggaggccagccaggagggccacctggagctggtgaagtacctgctggccagcggggccaacgtgcacgccaccacagccactggagacacagccctgacctacgcctgtgaaaatggccacacagatgtggctgatgtgctgctgcaggccggggctgacctggacaagcaggaggacatgaagaccatcctggagggcattgatcctgccaagcaccaggagcatgaaagtgaaggaggccgcacccccctgatgaaggccgcccgggccggccacctgtgcaccgtgcagttcctgatcagcaagggggccaacgtgaacagagccacagccaacaatgaccacacagtggtgtccctggcctgtgccggcggccacctggccgtggtggagctgctgctggcccacggggctgaccccacccaccggctgaaggatggcagcaccatgctgattgaggccgccaagggcggccacaccaacgtggtgtcctacctgctggactaccccaacaacgtgctgtctgtgcccaccacagatgtgtcccagctgcccccacccagccaggaccagagccaggtgccccgggtgcccacccacaccctggccatggtggtgcccccccaggagccagacaggaccagccaggagaacagccctgccctgctgggcgtgcagaagggcaccagcaagcagaagagcagcagcctgcaggtggccgaccaggacctgctgcccagcttccacccctaccagcccctggagtgcatcgtggaggagacagagggcaagctgaatgagctgggccagaggatcagcgccatcgagaaggcccagctgaagagcctggagctgatccagggcgagcccctgaacaaggacaagattgaggagctgaagaagaaccgggaggagcaggtgcagaagaagaagaagatcctgaaggagctgcagaaggtggagcggcagctgcagatgaagacccagcagcagttcaccaaggagtacctggagaccaagggccagaaggacacagtgtccctgcaccagcagtgcagccaccggggcgtcttccctgagggggagggagatggcagcctgcctgaggaccacttcagcgagctgccccaggtggacaccatcctcttcaaggacaatgatgtggatgatgagcagcagagccccccatctgctgagcagattgactttgtgcctgtgcagcccctgagcagcccccagtgcaacttcagcagtgacctgggcagcaatggcaccaacagcctggagctgcagaaggtgtctggcaaccagcagatcgtgggccagccccagatcgccatcaccggccatgaccagggcctgctggtgcaggagccagatggcctgatggtggccaccccagcccagaccctgacagacaccctggatgacctgattgctgctgtgtccaccagggtgcccaccggcagcaacagcagcagccagaccacagagtgcctgaccccagagagctgcagccagaccaccagcaatgtggccagccagagcatgcctcctgtgtaccccagcgtggacattgatgcccacacagagagcaaccacgacacagccctgaccctggcctgtgccggcggccacgaggagctggtgtctgtgctgattgccagagatgccaagattgagcaccgggacaagaagggcttcacccccctcatcctggccgccacagctggccacgtgggcgtggtggagatcctgctggacaagggcggggacatcgaggcccagagcgagaggaccaaggacacccccctgagcctggcctgcagcggcggccggcaggaggtggtggacctgctgctggcccggggggccaacaaggagcacagaaatgtgtctgactacacccccctgagcctggccgccagcggcggctacgtgaacatcatcaagatcctgctgaatgctggagctgagatcaacagcaggacaggcagcaagctgggcatcagccccctgatgctggccgccatgaatggacatgtgcctgctgtgaagctgctgctggacatgggcagtgacatcaatgcccagatcgagaccaacagaaacacagccctgaccctggcctgcttccagggccgggcagaggtggtgtccctgctgctggacaggaaggccaacgtggagcaccgggccaagacaggcctgacccccctgatggaggccgccagcggcggctatgcagaggtgggccgggtgctgctggacaagggagcagatgtgaatgcccctcctgtgcccagcagccgggacacagccctgaccatcgctgctgacaagggccactacaagttctgtgagctgctgatccacagaggagcccacattgatgtgaggaacaagaagggcaacacccccctgtggctggccagcaatggaggccactttgatgtggtgcagctgctggtgcaggccggggctgatgtggatgctgctgacaacaggaagatcacccccctgatgtctgccttcagaaaaggacatgtgaaggtggtgcagtacctggtgaaggaggtgaaccagttccccagcgacatcgagtgcatgagatacatcgccaccatcacagacaaggagctgctgaagaagtgccaccagtgtgtggagaccatcgtgaaggccaaggaccagcaggccgctgaggccaacaagaatgccagcatcctgctgaaggagctggacctggagaagagccgggaggagagcaggaagcaggccctggccgccaagaggtag

SEQ ID NO: 143643 - DNA, 1863 bp, synthetic construct
  misc_feature 1..1863: note = Description of Artificial Sequence: Synthetic coding sequence
  source 1..1863: mol_type = other DNA
atgagcctggcccagcagaaggctgacaagaacaagatcaacggggagccccggggcggcggggccggcggcaacagcgacagcgacaacctggacagcacagactgcaacagcgagagcagcagcggcggcaagagccaggagctgaactttgtgatggatgtgaacagcagcaagtaccccagcctgctgctgcacagccaggaggagaagaccagcacagccaccagcaagacccagacccggctggagggggaggtgacccccaacagcctgagcaccagctacaagacagtgtccctgcccctgagcagccccaacatcaagctgaacctgaccagccccaagaggggccagaagcgggaggagggctggaaggaggtggtgcggcgcagcaagaagctgtctgtgcctgcctctgtggtgagccgcatcatgggccggggcggctgcaacatcacagccatccaggatgtgactggagcccacattgatgtggacaagcagaaggacaagaatggagagaggatgatcaccatccggggcggcacagagagcaccaggtatgctgtgcagctgatcaatgccctgatccaggaccctgccaaggagctggaggacctgatccccaagaaccacatccgcaccccagccagcaccaagagcatccacgccaacttcagcagtggagtgggcaccacagctgccagcagcaagaatgccttccccctgggcgcccccaccctggtgaccagccaggccaccaccctgagcaccttccagcctgccaacaagctgaacaagaatgtgcccaccaacgtgcgcagcagcttccctgtgtccctgcccctggcctacccccacccccactttgccctgctggccgcccagaccatgcagcagatccgccacccccggctgcccatggcccagtttggaggcaccttcagccccagccccaacacctggggccccttccctgtgcggcctgtgaaccctggcaacaccaacagcagccccaagcacaacaacaccagccggctgcccaaccagaatggcaccgtgctgcccagcgagagcgctggcctggccacagccagctgccccatcaccgtgtcctctgtggtggccgccagccagcagctgtgtgtgaccaacaccaggacccccagctctgtgaggaagcagctgtttgcctgtgtgcccaagaccagccccccagccaccgtcatcagctctgtgaccagcacctgcagcagcctgcccagcgtgagcagcgcccccatcaccagcggccaggcccccaccaccttcctgcctgccagcaccagccaggcccagctgagcagccagaagatggagagcttctctgctgtgccccccaccaaggagaaggtgtccacccaggaccagcccatggccaacctgtgcacccccagcagcacagccaacagctgcagcagcagcgccagcaacacccctggggcccctgagacccaccccagcagcagccccacccccaccagcagcaacacccaggaggaggcccagcccagctctgtgtctgacctgagccccatgtccatgccctttgccagcaacagcgagcccgcccccctgaccctgaccagccccaggatggtggccgctgacaaccaggacaccagcaacctgccccagctggccgtgcctgccccccgggtgagccacaggatgcagccccggggcagcttctacagcatggtgcccaatgccaccatccaccaggacccccagagcatctttgtgaccaaccctgtgaccctgtgggaggccgaggccagcggcctgcacgaggtgcgcagcctgcggcaggcctggtag

SEQ ID NO: 143644 - DNA, 2601 bp, synthetic construct
  misc_feature 1..2601: note = Description of Artificial Sequence: Synthetic coding sequence
  source 1..2601: mol_type = other DNA
atggatgtgaacagcagcaagtaccccagcctgctgctgcacagccaggaggagaagaccagcacagccaccagcaagacccagacccggctggagggggaggtgacccccaacagcctgagcaccagctacaagacagtgtccctgcccctgagcagccccaacatcaagctgaacctgaccagccccaagaggggccagaagcgggaggagggctggaaggaggtggtgcggcgcagcaagaagctgtctgtgcctgcctctgtggtgagccgcatcatgggccggggcggctgcaacatcacagccatccaggatgtgactggagcccacattgatgtggacaagcagaaggacaagaatggagagaggatgatcaccatccggggcggcacagagagcaccaggtatgctgtgcagctgatcaatgccctgatccaggaccctgccaaggagctggaggacctgatccccaagaaccacatccgcaccccagccagcaccaagagcatccacgccaacttcagcagtggagtgggcaccacagctgccagcagcaagaatgccttccccctgggcgcccccaccctggtgaccagccaggccaccaccctgagcaccttccagcctgccaacaagctgaacaagaatgtgcccaccaacgtgcgcagcagcttccctgtgtccctgcccctggcctacccccacccccactttgccctgctggccgcccagaccatgcagcagatccgccacccccggctgcccatggcccagtttggaggcaccttcagccccagccccaacacctggggccccttccctgtgcggcctgtgaaccctggcaacaccaacagcagccccaagcacaacaacaccagccggctgcccaaccagaatggcaccgtgctgcccagcgagagcgctggcctggccacagccagctgccccatcaccgtgtcctctgtggtggccgccagccagcagctgtgtgtgaccaacaccaggacccccagctctgtgaggaagcagctgtttgcctgtgtgcccaagaccagccccccagccaccgtcatcagctctgtgaccagcacctgcagcagcctgcccagcgtgagcagcgcccccatcaccagcggccaggcccccaccaccttcctgcctgccagcaccagccaggcccagctgagcagccagaagatggagagcttctctgctgtgccccccaccaaggagaaggtgtccacccaggaccagcccatggccaacctgtgcacccccagcagcacagccaacagctgcagcagcagcgccagcaacacccctggggcccctgagacccaccccagcagcagccccacccccaccagcagcaacacccaggaggaggcccagcccagctctgtgtctgacctgagccccatgtccatgccctttgccagcaacagcgagcccgcccccctgaccctgaccagccccaggatggtggccgctgacaaccaggacaccagcaacctgccccagctggccgtgcctgccccccgggtgagccacaggatgcagccccggggcagcttctacagcatggtgcccaatgccaccatccaccaggacccccagagcatctttgtgaccaaccctgtgaccctgaccccaccccagggccccccagctgctgtgcagctgagcagcgctgtgaacatcatgaatggcagccagatgcacatcaacccagccaacaagagcctgccccccacctttggacctgccaccctcttcaaccacttcagcagcctgtttgacagcagccaggtgcctgccaaccagggctggggagatggccccctgagcagccgggtggccacagatgccagcttcaccgtgcagagcgccttcctgggcaacagcgtgctgggccacctggagaacatgcacccagacaacagcaaggcccctggcttccggccccccagccagagggtgtccaccagccctgtggccaccagcgccccacccaccctgggccagcccaagggcgtgtctgccagccaggacaggaagatccccccacccatcggcacagagcggctggcccgcatccggcagggcggctctgtggcccaggccccagctggcaccagctttgtggcccctgtgggccacagcggcatctggagctttggagtgaatgctgtgtctgagggcctgagcggctggagccagagcgtgatgggcaaccaccccatgcaccagcagctgagtgaccccagcaccttcagccagcaccagcccatggagagagatgacagcggcatggtggcccccagcaacatcttccaccagcccatggccagcggctttgtggacttcagcaagggcctgcccatctccatgtatggaggcaccatcatccccagccacccccagctggctgatgtgcctgggggccccctcttcaacggcctgcacaacccagaccctgcctggaaccccatgatcaaggtgatccagaacagcacagaatgtacagatgcccagcagatctggccaggcacctgggccccccacatcggcaacatgcacctgaagtatgtgaactag

SEQ ID NO: 143645 - DNA, 2298 bp, synthetic construct
  misc_feature 1..2298: note = Description of Artificial Sequence: Synthetic coding sequence
  source 1..2298: mol_type = other DNA
atggctgctgaccccacagagctgcggctgggcagcctgcccgtcttcaccagagatgactttgaaggagactggaggctggtggccagcggcggcttcagccaggtgttccaggcccggcaccggcgctggaggacagaatatgccatcaagtgtgccccctgcctgcccccagatgctgccagcagtgatgtgaactacctgattgaggaggccgccaagatgaagaagatcaagttccagcacatcgtgtccatctatggagtgtgcaagcagcccctgggcatcgtgatggagttcatggccaacggcagcctggagaaggtgctgagcacccacagcctgtgctggaagctgcgcttccgcatcatccacgagaccagcctggccatgaacttcctgcacagcatcaagccacccctgctgcacctggacctgaagccaggcaacatcctgctggacagcaacatgcacgtgaagatcagtgactttggcctgagcaagtggatggagcagagcaccaggatgcagtacatcgagaggtctgccctgcggggcatgctgagctacatccccccagagatgttcctggagagcaacaaggcccctggccccaagtatgatgtgtacagctttgccatcgtcatctgggagctgctgacccagaagaagccctacagcggcttcaacatgatgatgatcatcatccgggtggccgccggcatgaggcccagcctgcagcctgtgtctgaccagtggcccagcgaggcccagcagatggtggacctgatgaagcgctgctgggaccaggaccccaagaagaggccctgcttcctggacatcaccattgaaacagacatcctgctgagcctgctgcagagccgggtggccgtgcctgagagcaaggccctggccaggaaggtgtcctgcaagctgagcctgcggcagcctggagaggtgaatgaagacatcagccaggagctgatggacagcgacagcggcaactacctgaagagggccctgcagctgagtgacaggaagaacctggtgcccagagatgaggagctgtgcatctatgagaacaaggtgacccccctgcacttcctggtggcccagggctctgtggagcaggtgcggctgctgctggcccacgaggtggatgtggactgccagacagccagcggctacacccccctgctgattgctgcccaggaccagcagcctgacctgtgtgccctgctgctggcccatggagcagatgccaacagagtggatgaagatggctgggcccccctgcactttgctgcccagaatggagatgatggaacagcccggctgctgctggaccacggggcctgtgtggatgcccaggagcgggagggctggacccccctgcacctggccgcccagaacaactttgaaaatgtggcccggctgctggtgtcccggcaggccgaccccaacctgcacgaggccgagggcaagacccccctgcacgtggccgcctacttcggccacgtgtccctggtgaagctgctgaccagccagggcgctgagctggatgcccagcagaggaacctgcggacccccctgcacctggccgtggagcggggcaaggtgcgggccatccagcacctgctgaagtctggagctgtgcctgatgccctggaccagagcggctacggccccctgcacacagctgctgcccggggcaagtacctgatctgcaagatgctgctgcgctacggggccagcctggagctgcccacccaccagggctggacccccctgcacctggccgcctacaagggccacctggagatcatccacctgctggccgagagccacgccaacatgggcgccctgggcgctgtgaactggacccccctgcacctggccgcccggcacggggaggaggccgtggtgtctgccctgctgcagtgtggggctgaccccaatgctgctgagcagagcggctggacccccctgcacctggccgtgcagaggagcaccttcctgagcgtcatcaacctgctggagcaccacgccaacgtgcacgccaggaacaaggtgggctggaccccagcccacctggccgccctgaagggcaacacagccatcctgaaggtgctggtggaggccggggcccagctggatgtgcaggatggagtgtcctgcacccccctgcagctggccctgcggagcaggaagcagggcatcatgtccttcctggagggcaaggagcccagcgtggccaccctgggcggcagcaagccaggagctgagatggagatctag

SEQ ID NO: 143646 - DNA, 1008 bp, synthetic construct
  misc_feature 1..1008: note = Description of Artificial Sequence: Synthetic coding sequence
  source 1..1008: mol_type = other DNA
atggccgagggcggcagcccagatggccgggccggccctggcagcgctggcaggaacctgaaggagtggctgcgggagcagttctgtgaccaccccctggagcactgtgaggacacccggctgcatgatgctgcctacgtgggggacctgcagaccctgcggagcctgctgcaggaggagagctaccgcagccgcatcaatgagaagtctgtgtggtgctgcggctggctgccctgcacccccctgagaattgctgccacagctggccacggcagctgtgtggacttcctgatcagaaaaggagctgaggtggacctggtggatgtgaagggccagacagccctgtatgtggccgtggtgaatggccacctggagagcacccagatcctgctggaggccggggctgaccccaacggcagccgccaccacaggagcacccctgtgtaccacgccagccgggtgggccgggctgacatcctgaaggccctgatccgctacggggctgatgtggatgtgaaccaccacctgaccccagatgtgcagccccgcttcagccggcggctgaccagcctggtggtgtgccccctgtacatctctgctgcctaccacaacctgcagtgcttccggctgctgctgctggccggggccaacccagacttcaactgcaatggacctgtgaacacccagggcttctaccggggcagccctggctgtgtgatggatgctgtgctgcggcacggctgtgaggccgcctttgtgtccctgctggtggagtttggagccaacctgaacctggtgaagtgggagagcctgggccctgagagccggggccgcaggaaggtggaccctgaggccctgcaggtgttcaaggaggcccggtctgtgcccaggaccctgctgtgcctgtgccgggtggccgtgcggcgggccctgggcaagcaccggctgcacctgatccccagcctgcccctgcctgaccccatcaagaagttcctgctgcacgagtag

SEQ ID NO: 143647 - DNA, 909 bp, synthetic construct
  misc_feature 1..909: note = Description of Artificial Sequence: Synthetic coding sequence
  source 1..909: mol_type = other DNA
atgctgcagctgactggagaaaatgagaagaactgtgaggtgtctgagcgcatcagaagaagtggcccctggaaggagatcagctttggagactacatctgccacaccttccagggcgactgctgggccgacaggagccccctgcatgaagctgctgcccagggccgcctgctggccctgaagaccctcatcgcccagggcgtgaatgtgaacctggtgaccatcaacagagtgagcagcctgcacgaggcctgcctgggcggccacgtggcctgtgccaaggccctgctggagaatggagcccacgtgaatggagtgacagtgcatggagccacccccctcttcaatgcctgctgcagcggcagcgctgcctgtgtgaatgtgctgctggagtttggagccaaggcccagctggaggtgcacctggccagccccatccatgaagctgtgaagaggggccaccgggagtgcatggagatcctgctggccaacaacgtgaacatcgaccacgaggtgccccagctgggcacccccctgtatgtggcctgcacctaccagagggtggactgtgtgaagaagctgctggagctgggcgcctctgtggaccacggccagtggctggacacccccctgcatgctgctgcccggcagagcaatgtggaggtgatccacctgctgacagattatggagccaacctgaagagaagaaatgcccagggcaagagcgccctggacctggccgcccccaagagctctgtggagcaggccctgctgctgcgggagggccccccagccctgagccagctgtgccgcctgtgtgtgaggaagtgcctgggccgggcctgccaccaggccatccacaagctgcacctgcctgagcccctggagcgcttcctgctgtaccagtag

SEQ ID NO: 143648 - DNA, 972 bp, synthetic construct
  misc_feature 1..972: note = Description of Artificial Sequence: Synthetic coding sequence
  source 1..972: mol_type = other DNA
atggaggatggccctgtgttctacggcttcaagaacatcttcatcaccatgtttgccaccttcttcttcttcaagctgctgatcaaggtgttcctggccctgctgacccacttctacatcgtgaagggcaacaggaaggaggccgccagaattgctgaggagatctacggcggcatcagtgactgctgggccgacaggagccccctgcacgaggccgccgcccagggccgcctgctggccctgaagaccctgattgcccagggcgtgaatgtgaacctggtgaccatcaacagagtgagcagcctgcacgaggcctgcctgggcggccacgtggcctgtgccaaggccctgctggagaatggagcccacgtgaatggagtgacagtgcacggggccacccccctcttcaatgcctgctgcagcggcagcgctgcctgtgtgaatgtgctgctggagtttggagccaaggcccagctggaggtgcacctggccagccccatccacgaggccgtgaagaggggccaccgggagtgcatggagatcctgctggccaacaacgtgaacatcgaccacgaggtgccccagctgggcacccccctgtatgtggcctgcacctaccagagggtggactgtgtgaagaagctgctggagctgggcgcctctgtggaccacggccagtggctggacacccccctgcacgccgccgcccggcagagcaatgtggaggtgatccacctgctgacagattatggagccaacctgaagagaagaaatgcccagggcaagagcgccctggacctggccgcccccaagagctctgtggagcaggccctgctgctgcgggagggccccccagccctgagccagctgtgccgcctgtgtgtgaggaagtgcctgggccgggcctgccaccaggccatccacaagctgcacctgcctgagcccctggagcgcttcctgctgtaccagtag

SEQ ID NO: 143649 - DNA, 909 bp, synthetic construct; identical to SEQ ID NO: 143647
  misc_feature 1..909: note = Description of Artificial Sequence: Synthetic coding sequence
  source 1..909: mol_type = other DNA

SEQ ID NO: 143650 - DNA, 921 bp, synthetic construct
  misc_feature 1..921: note = Description of Artificial Sequence: Synthetic coding sequence
  source 1..921: mol_type = other DNA
atggaggatggccctgtgttctacggcttcaagaacatcttcatcaccatgtttgccaccttcttcttcttcaagctgctgatcaaggtgttcctggccctgctgacccacttctacatcgtgaagggcaacaggaaggaggccgccagaattgctgaggagatctacggcggcatcagtgactgctgggccgacaggagccccctgcacgaggccgccgcccagggccgcctgctggccctgaagaccctgattgcccaggcctgcctgggcggccacgtggcctgtgccaaggccctgctggagaatggagcccacgtgaatggagtgacagtgcatggagccacccccctcttcaatgcctgctgcagcggcagcgctgcctgtgtgaatgtgctgctggagtttggagccaaggcccagctggaggtgcacctggccagccccatccatgaagctgtgaagaggggccaccgggagtgcatggagatcctgctggccaacaacgtgaacatcgaccacgaggtgccccagctgggcacccccctgtatgtggcctgcacctaccagagggtggactgtgtgaagaagctgctggagctgggcgcctctgtggaccacggccagtggctggacacccccctgcatgctgctgcccggcagagcaatgtggaggtgatccacctgctgacagattatggagccaacctgaagagaagaaatgcccagggcaagagcgccctggacctggccgcccccaagagctctgtggagcaggccctgctgctgcgggagggccccccagccctgagccagctgtgccgcctgtgtgtgaggaagtgcctgggccgggcctgccaccaggccatccacaagctgcacctgcctgagcccctggagcgcttcctgctgtaccagtag

SEQ ID NO: 143651 - DNA, 1764 bp, synthetic construct
  misc_feature 1..1764: note = Description of Artificial Sequence: Synthetic coding sequence
  source 1..1764: mol_type = other DNA
atgacccgcttctcctatgcagagtacttcagcctcttccacagctgcagcgcccccagccgcagcacagcccctcctgagagcagccctgcccgggcccccatgggcctcttccagggcgtgatgcagaagtacagcagcagcctcttcaagaccagccagctggccccagctgaccccctcatcaaggccatcaaggatggagatgaggaggccctgaagaccatgatcaaggagggcaagaacctggccgagcccaacaaggagggctggctgcccctgcatgaagctgcctactacggccaggtgggctgcctgaaggtgctgcagagggcctacccaggcaccatcgaccagaggaccctgcaggaggagacagctgtgtacctggccacctgccggggccacctggactgcctgctgagcctgctgcaggccggggctgagccagacatcagcaacaagagccgggagacccccctgtacaaggcctgtgagaggaagaatgctgaggccgtgaagatcctggtgcagcacaatgctgacaccaaccaccgctgcaacagaggctggacagccctgcatgaatctgtgtccagaaatgacctggaggtgatgcagatcctggtgtctggaggagccaaggtggagagcaagaatgcctacggcatcacccccctgtttgtggccgcccagagcggccagctggaggccctgcgcttcctggccaagtatggagctgacatcaacacccaggccagtgacaatgccagcgccctgtatgaggcctgcaagaatgagcacgaggaggtggtggagttcctgctgagccagggcgcagatgccaacaagaccaacaaggatggcctgctgcccctgcacatcgccagcaagaagggcaactaccgcatcgtgcagatgctgctgcctgtgaccagcaggacccgcatccgccgcagcggcgtgagccccctgcacctggccgctgagagaaatcatgatgaggtgctggaggccctgctgagcgccaggtttgatgtgaacacccccctggcccctgagcgggcccggctgtatgaggaccggcgcagcagcgccctgtactttgctgtggtgaacaacaacgtgtatgccacagagctgctgctgcagcacggggctgaccccaacagagatgtgatcagccccctgctggtggccatcagacatggctgcctgcggaccatgcagctgctgctggaccatggagccaacattgatgcctacatcgccacccaccccacagccttccctgccaccatcatgtttgccatgaagtgcctgagcctgctgaagttcctgatggacctgggctgtgatggagagccctgcttcagctgcctgtatggaaatggcccccaccccccagccccccagcccagcagccgcttcaatgatgccccagctgctgacaaggagcccagcgtggtgcagttctgtgaatttgtgtctgcccctgaggtgagccgctgggccggccccatcattgatgtgctgctggactatgtgggcaatgtgcagctgtgcagccggctgaaggagcacatcgacagctttgaggactgggccgtcatcaaggagaaggccgagcccccccggcccctggcccacctgtgccgcctgcgggtgaggaaggccatcggcaagtaccgcatcaagctgctggacaccctgcccctgcccggccgcctcatccgctacctgaagtatgagaacacccagtag

SEQ ID NO: 143652 - DNA, 1812 bp, synthetic construct
  misc_feature 1..1812: note = Description of Artificial Sequence: Synthetic coding sequence
  source 1..1812: mol_type = other DNA
atggccatcgagcagagcctggccgacaagacccggggccccaccacagctgaggccacagccagcgcctgcaccaaccggcagcctgcccacttctacccctggaccaggagcacagcccctcctgagagcagccctgcccgggcccccatgggcctcttccagggcgtgatgcagaagtacagcagcagcctcttcaagaccagccagctggccccagctgaccccctcatcaaggccatcaaggatggagatgaggaggccctgaagaccatgatcaaggagggcaagaacctggccgagcccaacaaggagggctggctgcccctgcatgaagctgcctactacggccaggtgggctgcctgaaggtgctgcagagggcctacccaggcaccatcgaccagaggaccctgcaggaggagacagctgtgtacctggccacctgccggggccacctggactgcctgctgagcctgctgcaggccggggctgagccagacatcagcaacaagagccgggagacccccctgtacaaggcctgtgagaggaagaatgctgaggccgtgaagatcctggtgcagcacaatgctgacaccaaccaccgctgcaacagaggctggacagccctgcatgaatctgtgtccagaaatgacctggaggtgatgcagatcctggtgtctggaggagccaaggtggagagcaagaatgcctacggcatcacccccctgtttgtggccgcccagagcggccagctggaggccctgcgcttcctggccaagtatggagctgacatcaacacccaggccagtgacaatgccagcgccctgtatgaggcctgcaagaatgagcacgaggaggtggtggagttcctgctgagccagggcgcagatgccaacaagaccaacaaggatggcctgctgcccctgcacatcgccagcaagaagggcaactaccgcatcgtgcagatgctgctgcctgtgaccagcaggacccgcatccgccgcagcggcgtgagccccctgcacctggccgctgagagaaatcatgatgaggtgctggaggccctgctgagcgccaggtttgatgtgaacacccccctggcccctgagcgggcccggctgtatgaggaccggcgcagcagcgccctgtactttgctgtggtgaacaacaacgtgtatgccacagagctgctgctgcagcacggggctgaccccaacagagatgtgatcagccccctgctggtggccatcagacatggctgcctgcggaccatgcagctgctgctggaccatggagccaacattgatgcctacatcgccacccaccccacagccttccctgccaccatcatgtttgccatgaagtgcctgagcctgctgaagttcctgatggacctgggctgtgatggagagccctgcttcagctgcctgtatggaaatggcccccaccccccagccccccagcccagcagccgcttcaatgatgccccagctgctgacaaggagcccagcgtggtgcagttctgtgaatttgtgtctgcccctgaggtgagccgctgggccggccccatcattgatgtgctgctggactatgtgggcaatgtgcagctgtgcagccggctgaaggagcacatcgacagctttgaggactgggccgtcatcaaggagaaggccgagcccccccggcccctggcccacctgtgccgcctgcgggtgaggaaggccatcggcaagtaccgcatcaagctgctggacaccctgcccctgcccggccgcctcatccgctacctgaagtatgagaacacccagtag

SEQ ID NO: 143653 - DNA, 1470 bp, synthetic construct
  misc_feature 1..1470: note = Description of Artificial Sequence: Synthetic coding sequence
  source 1..1470: mol_type = other DNA
atgaggcctgctgaccccctcatcaaggccatcaaggatggagatgaggaggccctgaagaccatgatcaaggagggcaagaacctggccgagcccaacaaggagggctggctgcccctgcatgaagctgcctactacggccaggtgggctgcctgaaggtgctgcagagggcctacccaggcaccatcgaccagaggaccctgcaggaggagacagctgtgtacctggccacctgccggggccacctggactgcctgctgagcctgctgcaggccggggctgagccagacatcagcaacaagagccgggagacccccctgtacaaggcctgtgagaggaagaatgctgaggccgtgaagatcctggtgcagcacaatgctgacaccaaccaccgctgcaacagaggctggacagccctgcatgaatctgtgtccagaaatgacctggaggtgatgcagatcctggtgtctggaggagccaaggtggagagcaagaatgcctacggcatcacccccctgtttgtggccgcccagagcggccagctggaggccctgcgcttcctggccaagtatggagctgacatcaacacccaggccagtgacaatgccagcgccctgtatgaggcctgcaagaatgagcacgaggaggtggtggagttcctgctgagccagggcgcagatgccaacaagaccaacaaggatggcctgctgcccctgcacatcgccagcaagaagggcaactaccgcatcgtgcagatgctgctgcctgtgaccagcaggacccgcatccgccgcagcggcgtgagccccctgcacctggccgctgagagaaatcatgatgaggtgctggaggccctgctgagcgccaggtttgatgtgaacacccccctggcccctgagcgggcccggctgtatgaggaccggcgcagcagcgccctgtactttgctgtggtgaacaacaacgtgtatgccacagagctgctgctgcagcacggggctgaccccaacagagatgtgatcagccccctgctggtggccatcagacatggctgcctgcggaccatgcagctgctgctggaccatggagccaacattgatgcctacatcgccacccaccccacagccttccctgccaccatcatgtttgccatgaagtgcctgagcctgctgaagttcctgatggacctgggctgtgatggagagccctgcttcagctgcctgtatggaaatggcccccaccccccagccccccagcccagcagccgcttcaatgatgccccagctgctgacaaggagcccagcgtggtgcagttctgtgaatttgtgtctgcccctgaggtgagccgctgggccggccccatcattgatgtgctgctggactatgtgggcaatgtgcagctgtgcagccggctgaaggagcacatcgacagctttgaggactgggtgctggagggctttgtgaagtactag

SEQ ID NO: 143654 - DNA, 1908 bp, synthetic construct
  misc_feature 1..1908: note = Description of Artificial Sequence: Synthetic coding sequence
  source 1..1908: mol_type = other DNA
atggccacccagatcagcacccggggcagccagtgcaccatcggccaggaggagtacagcctgtacagcagcctgtctgaagatgagctggtgcagatggccatcgagcagagcctggccgacaagacccggggccccaccacagctgaggccacagccagcgcctgcaccaaccggcagcctgcccacttctacccctggaccaggagcacagcccctcctgagagcagccctgcccgggcccccatgggcctcttccagggcgtgatgcagaagtacagcagcagcctcttcaagaccagccagctggccccagctgaccccctcatcaaggccatcaaggatggagatgaggaggccctgaagaccatgatcaaggagggcaagaacctggccgagcccaacaaggagggctggctgcccctgcatgaagctgcctactacggccaggtgggctgcctgaaggtgctgcagagggcctacccaggcaccatcgaccagaggaccctgcaggaggagacagctgtgtacctggccacctgccggggccacctggactgcctgctgagcctgctgcaggccggggctgagccagacatcagcaacaagagccgggagacccccctgtacaaggcctgtgagaggaagaatgctgaggccgtgaagatcctggtgcagcacaatgctgacaccaaccaccgctgcaacagaggctggacagccctgcatgaatctgtgtccagaaatgacctggaggtgatgcagatcctggtgtctggaggagccaaggtggagagcaagaatgcctacggcatcacccccctgtttgtggccgcccagagcggccagctggaggccctgcgcttcctggccaagtatggagctgacatcaacacccaggccagtgacaatgccagcgccctgtatgaggcctgcaagaatgagcacgaggaggtggtggagttcctgctgagccagggcgcagatgccaacaagaccaacaaggatggcctgctgcccctgcacatcgccagcaagaagggcaactaccgcatcgtgcagatgctgctgcctgtgaccagcaggacccgcatccgccgcagcggcgtgagccccctgcacctggccgctgagagaaatcatgatgaggtgctggaggccctgctgagcgccaggtttgatgtgaacacccccctggcccctgagcgggcccggctgtatgaggaccggcgcagcagcgccctgtactttgctgtggtgaacaacaacgtgtatgccacagagctgctgctgcagcacggggctgaccccaacagagatgtgatcagccccctgctggtggccatcagacatggctgcctgcggaccatgcagctgctgctggaccatggagccaacattgatgcctacatcgccacccaccccacagccttccctgccaccatcatgtttgccatgaagtgcctgagcctgctgaagttcctgatggacctgggctgtgatggagagccctgcttcagctgcctgtatggaaatggcccccaccccccagccccccagcccagcagccgcttcaatgatgccccagctgctgacaaggagcccagcgtggtgcagttctgtgaatttgtgtctgcccctgaggtgagccgctgggccggccccatcattgatgtgctgctggactatgtgggcaatgtgcagctgtgcagccggctgaaggagcacatcgacagctttgaggactgggccgtcatcaaggagaaggccgagcccccccggcccctggcccacctgtgccgcctgcgggtgaggaaggccatcggcaagtaccgcatcaagctgctggacaccctgcccctgcccggccgcctcatccgctacctgaagtatgagaacacccagtag

SEQ ID NO: 143655 - DNA, 1557 bp, synthetic construct
  misc_feature 1..1557: note = Description of Artificial Sequence: Synthetic coding sequence
  source 1..1557: mol_type = other DNA
atggacttcacagaggcctatgctgacacctgcagcacagtgggcctggccgcccgggagggcaatgtgaaggtgctgaggaagctgctgaagaagggccgctctgtggatgtggccgacaacagaggctggatgcccatccacgaggccgcctaccacaacagcgtggagtgcctgcagatgctgatcaatgctgacagcagcgagaactacatcaagatgaagacctttgagggcttctgtgccctgcacctggccgccagccagggccactggaagatcgtgcagatcctgctggaggccggggctgaccccaatgccaccaccctggaggagaccacccccctcttcctggccgtggagaatggccagattgatgtgctgcggctgctgctgcagcacggggccaacgtgaatggcagccacagcatgtgtggctggaacagcctgcaccaggccagcttccaggagaatgctgagatcatcaagctgctgctgaggaagggggccaacaaggagtgccaggatgactttggcatcacccccctgtttgtggccgcccagtatggcaagctggagagcctgagcatcctgatcagcagcggggccaacgtgaactgccaggccctggacaaggccacccccctcttcatcgccgcccaggagggccacaccaagtgtgtggagctgctgctgagcagcggggctgaccctgacctgtactgcaatgaagacagctggcagctgcccatccatgctgctgcccagatgggccacaccaagatcctggacctgctgatccccctgaccaacagagcctgtgacaccggcctgaacaaggtgtcccctgtgtacagcgctgtgtttggaggccacgaggactgcctggagatcctgctgagaaatggctacagcccagatgcccaggcctgcctggtgtttggcttcagcagccctgtgtgcatggccttccagaaggactgtgagttctttggaattgtgaacatcctgctgaagtacggggcccagatcaatgagctgcacctggcctactgcctgaagtatgagaagttcagcatcttccgctacttcctgaggaagggctgcagcctgggcccctggaaccacatctatgaatttgtgaaccacgccatcaaggcccaggccaagtacaaggagtggctgccccacctgctggtggccggctttgaccccctcatcctgctgtgcaacagctggattgacagcgtgtccattgacaccctcatcttcaccctggagttcaccaactggaagaccctggccccagctgtggagaggatgctgagcgcccgggccagcaatgcctggatcctgcagcagcacatcgccaccgtgcccagcctgacccacctgtgccgcctggagatccgcagcagcctgaagtctgagcggctgcggagtgacagctacatcagccagctgcccctgcccaggagcctgcacaactacctgctgtatgaagatgtgctgaggatgtatgaggtgcctgagctggccgccatccaggatggatag

SEQ ID NO: 143656 - DNA, 1671 bp, synthetic construct
  misc_feature 1..1671: note = Description of Artificial Sequence: Synthetic coding sequence
  source 1..1671: mol_type = other DNA
atggccatgatgcccctggtgctgcaccaccctgagcggcaggccgagctgggcagcggcctgagagatggcggcggggccgccctgcggcccccaggccgcctggtgaagcagatggacttcacagaggcctatgctgacacctgcagcacagtgggcctggccgcccgggagggcaatgtgaaggtgctgaggaagctgctgaagaagggccgctctgtggatgtggccgacaacagaggctggatgcccatccacgaggccgcctaccacaacagcgtggagtgcctgcagatgctgatcaatgctgacagcagcgagaactacatcaagatgaagacctttgagggcttctgtgccctgcacctggccgccagccagggccactggaagatcgtgcagatcctgctggaggccggggctgaccccaatgccaccaccctggaggagaccacccccctcttcctggccgtggagaatggccagattgatgtgctgcggctgctgctgcagcacggggccaacgtgaatggcagccacagcatgtgtggctggaacagcctgcaccaggccagcttccaggagaatgctgagatcatcaagctgctgctgaggaagggggccaacaaggagtgccaggatgactttggcatcacccccctgtttgtggccgcccagtatggcaagctggagagcctgagcatcctgatcagcagcggggccaacgtgaactgccaggccctggacaaggccacccccctcttcatcgccgcccaggagggccacaccaagtgtgtggagctgctgctgagcagcggggctgaccctgacctgtactgcaatgaagacagctggcagctgcccatccatgctgctgcccagatgggccacaccaagatcctggacctgctgatccccctgaccaacagagcctgtgacaccggcctgaacaaggtgtcccctgtgtacagcgctgtgtttggaggccacgaggactgcctggagatcctgctgagaaatggctacagcccagatgcccaggcctgcctggtgtttggcttcagcagccctgtgtgcatggccttccagaaggactgtgagttctttggaattgtgaacatcctgctgaagtacggggcccagatcaatgagctgcacctggcctactgcctgaagtatgagaagttcagcatcttccgctacttcctgaggaagggctgcagcctgggcccctggaaccacatctatgaatttgtgaaccacgccatcaaggcccaggccaagtacaaggagtggctgccccacctgctggtggccggctttgaccccctcatcctgctgtgcaacagctggattgacagcgtgtccattgacaccctcatcttcaccctggagttcaccaactggaagaccctggccccagctgtggagaggatgctgagcgcccgggccagcaatgcctggatcctgcagcagcacatcgccaccgtgcccagcctgacccacctgtgccgcctggagatccgcagcagcctgaagtctgagcggctgcggagtgacagctacatcagccagctgcccctgcccaggagcctgcacaactacctgctgtatgaagatgtgctgaggatgtatgaggtgcctgagctggccgccatccaggatggatag

SEQ ID NO: 143657 - DNA, 1338 bp, synthetic construct
  misc_feature 1..1338: note = Description of Artificial Sequence: Synthetic coding sequence
  source 1..1338: mol_type = other DNA
atgaagacctttgagggcttctgtgccctgcacctggccgccagccagggccactggaagatcgtgcagatcctgctggaggccggggctgaccccaatgccaccaccctggaggagaccacccccctcttcctggccgtggagaatggccagattgatgtgctgcggctgctgctgcagcacggggccaacgtgaatggcagccacagcatgtgtggctggaacagcctgcaccaggccagcttccaggagaatgctgagatcatcaagctgctgctgaggaaaggagccaacaaggagtgccaggatgactttggcatcacccccctgtttgtggccgcccagtatggcaagctggagagcctgagcatcctgatcagcagcggggccaacgtgaactgccaggccctggacaaggccacccccctcttcatcgccgcccaggagggccacaccaagtgtgtggagctgctgctgagcagtggagctgaccctgacctgtactgcaatgaagattcctggcagctgcccatccacgccgccgcccagatgggccacaccaagatcctggacctgctgatccccctgaccaacagagcctgtgacaccggcctgaacaaggtgtcccctgtgtacagcgctgtgtttggaggccacgaggactgcctggagatcctgctgagaaatggctacagcccagatgcccaggcctgcctggtgtttggcttcagcagccctgtgtgcatggccttccagaaggactgtgagttcttcggcatcgtgaacatcctgctgaagtatggagcccagatcaatgagctgcacctggcctactgcctgaagtatgagaagttcagcatcttccgctacttcctgaggaagggctgcagcctgggcccctggaaccacatctatgaatttgtgaaccacgccatcaaggcccaggccaagtacaaggagtggctgccccacctgctggtggccggctttgaccccctcatcctgctgtgcaacagctggattgattctgtgtccattgacaccctcatcttcaccctggagttcaccaactggaagaccctggccccagctgtggagaggatgctgagcgcccgggccagcaatgcctggatcctgcagcagcacatcgccaccgtgcccagcctgacccacctgtgccgcctggagatccgcagcagcctgaagtctgagcggctgcggagtgacagctacatcagccagctgcccctgcccaggagcctgcacaactacctgctgtatgaagatgtgctgaggatgtatgaggtgcctgagctggccgccatccaggacggctag

SEQ ID NO: 143658 - DNA, 1662 bp, synthetic construct
  misc_feature 1..1662: note = Description of Artificial Sequence: Synthetic coding sequence
  source 1..1662: mol_type = other DNA
atgcccctggtgctgcaccaccctgagcggcaggccgagctgggcagcggcctgagagatggcggcggggccgccctgcggcccccaggccgcctggtgaagcagatggacttcacagaggcctatgctgacacctgcagcacagtgggcctggccgcccgggagggcaatgtgaaggtgctgaggaagctgctgaagaagggccgctctgtggatgtggccgacaacagaggctggatgcccatccatgaagctgcctaccacaacagcgtggagtgcctgcagatgctgatcaatgctgacagcagcgagaactacatcaagatgaagacctttgagggcttctgtgccctgcacctggccgccagccagggccactggaagatcgtgcagatcctgctggaggccggggctgaccccaatgccaccaccctggaggagaccacccccctcttcctggccgtggagaatggccagattgatgtgctgcggctgctgctgcagcacggggccaacgtgaatggcagccacagcatgtgtggctggaacagcctgcaccaggccagcttccaggagaatgctgagatcatcaagctgctgctgaggaaaggagccaacaaggagtgccaggatgactttggcatcacccccctgtttgtggccgcccagtatggcaagctggagagcctgagcatcctgatcagcagcggggccaacgtgaactgccaggccctggacaaggccacccccctcttcatcgccgcccaggagggccacaccaagtgtgtggagctgctgctgagcagtggagctgaccctgacctgtactgcaatgaagattcctggcagctgcccatccacgccgccgcccagatgggccacaccaagatcctggacctgctgatccccctgaccaacagagcctgtgacaccggcctgaacaaggtgtcccctgtgtacagcgctgtgtttggaggccacgaggactgcctggagatcctgctgagaaatggctacagcccagatgcccaggcctgcctggtgtttggcttcagcagccctgtgtgcatggccttccagaaggactgtgagttcttcggcatcgtgaacatcctgctgaagtatggagcccagatcaatgagctgcacctggcctactgcctgaagtatgagaagttcagcatcttccgctacttcctgaggaagggctgcagcctgggcccctggaaccacatctatgaatttgtgaaccacgccatcaaggcccaggccaagtacaaggagtggctgccccacctgctggtggccggctttgaccccctcatcctgctgtgcaacagctggattgattctgtgtccattgacaccctcatcttcaccctggagttcaccaactggaagaccctggccccagctgtggagaggatgctgagcgcccgggccagcaatgcctggatcctgcagcagcacatcgccaccgtgcccagcctgacccacctgtgccgcctggagatccgcagcagcctgaagtctgagcggctgcggagtgacagctacatcagccagctgcccctgcccaggagcctgcacaactacctgctgtatgaagatgtgctgaggatgtatgaggtgcctgagctggccgccatccaggacggctag

SEQ ID NO: 143659 - DNA, 1338 bp, synthetic construct; identical to SEQ ID NO: 143657
  misc_feature 1..1338: note = Description of Artificial Sequence: Synthetic coding sequence
  source 1..1338: mol_type = other DNA

SEQ ID NO: 143660 - DNA, 1314 bp, synthetic construct
  misc_feature 1..1314: note = Description of Artificial Sequence: Synthetic coding sequence
  source 1..1314: mol_type = other DNA
atggacttcacagaggcctatgctgacacctgcagcacagtgggcctggccgcccgggagggcaatgtgaaggtgctgaggaagctgctgaagaagggccgctctgtggatgtggccgacaacagaggctggatgcccatccacgaggccgcctaccacaacagcgtggagtgcctgcagatgctgatcaatgctgacagcagcgagaactacatcaagatgaagacctttgagggcttctgtgccctgcacctggccgccagccagggccactggaagatcgtgcagatcctgctggaggccggggctgaccccaatgccaccaccctggaggagaccacccccctcttcctgggcgccaacgtgaactgccaggccctggacaaggccacccccctcttcatcgccgcccaggagggccacaccaagtgtgtggagctgctgctgagcagtggagctgaccctgacctgtactgcaatgaagattcctggcagctgcccatccacgccgccgcccagatgggccacaccaagatcctggacctgctgatccccctgaccaacagagcctgtgacaccggcctgaacaaggtgtcccctgtgtacagcgctgtgtttggaggccacgaggactgcctggagatcctgctgagaaatggctacagcccagatgcccaggcctgcctggtgtttggcttcagcagccctgtgtgcatggccttccagaaggagtggagctgtgagttcttcggcatcgtgaacatcctgctgaagtatggagcccagatcaatgagctgcacctggcctactgcctgaagtatgagaagttcagcatcttccgctacttcctgaggaagggctgcagcctgggcccctggaaccacatctatgaatttgtgaaccacgccatcaaggcccaggccaagtacaaggagtggctgccccacctgctggtggccggctttgaccccctcatcctgctgtgcaacagctggattgattctgtgtccattgacaccctcatcttcaccctggagttcaccaactggaagaccctggccccagctgtggagaggatgctgagcgcccgggccagcaatgcctggatcctgcagcagcacatcgccaccgtgcccagcctgacccacctgtgccgcctggagatccgcagcagcctgaagtctgagcggctgcggagtgacagctacatcagccagctgcccctgcccaggagcctgcacaactacctgctgtatgaagatgtgctgaggatgtatgaggtgcctgagctggccgccatccaggacggctag

SEQ ID NO: 143661 - DNA, 1281 bp, synthetic construct
  misc_feature 1..1281: note = Description of Artificial Sequence: Synthetic coding sequence
  source 1..1281: mol_type = other DNA
atggatggcaccacagcccctgtgaccaagtctggagctgccaagctggtgaagaggaacttcctggaggccctgaagagcaatgactttgggaagctgaaggccatcctgatccagaggcagattgatgtggacacagtgtttgaggtggaggatgagaacatggtgctggccagctacaagcagggctactggctgcccagctacaagctgaagagctcctgggccaccggcctgcacctgtctgtgctgtttggacatgtggagtgcctgctggtgctgctggaccacaatgccaccatcaactgccggcccaacgggaagacccccctgcacgtggcctgtgagatggccaacgtggactgtgtgaagatcctgtgtgacagaggagccaagctgaactgctacagcctgagcggccacacagccctgcacttctgcaccacccccagcagcatcctgtgtgccaagcagctggtgtggaggggggccaacgtgaacatgaagaccaacaaccaggatgaggagacccccctgcacacagctgcccacttcggcctgtctgagctggtggccttctacgtggagcacggggccatcgtggacagcgtgaatgcccacatggagacccccctggccatcgccgcctactgggccctgcgcttcaaggagcaggagtacagcacagagcaccacctggtgtgcaggatgctgctggactacaaggccgaggtgaatgccagagatgatgacttcaagagccccctgcacaaggccgcctggaactgtgaccacgtgctgatgcacatgatgctggaggccggggctgaggccaacctgatggacatcaatggctgtgccgccatccagtatgtgctgaaggtgacctctgtgcggcctgctgcccagcctgagatctgctaccagctgctgctgaaccacggggccgcccgcatctacccaccccagttccacaaggtgatccaggcctgccacagctgccccaaggccatcgaggtggtggtgaatgcctatgagcacatccgctggaacaccaagtggaggcgggccatcccagatgatgacctggagaagtactgggacttctaccacagcctcttcaccgtgtgctgcaacagccccaggaccctgatgcacctgagccgctgtgccatccggaggaccctgcacaaccgctgccaccgggccatccccctgctgagcctgcccctgagcctgaagaagtacctgctgctggagcctgagggcatcatctactag

SEQ ID NO: 143662 - DNA, 1050 bp, synthetic construct
  misc_feature 1..1050: note = Description of Artificial Sequence: Synthetic coding sequence
  source 1..1050: mol_type = other DNA
atggatggcaccacagcccctgtgaccaagtctggagctgccaagctggtgaagaggaacttcctggaggccctgaagagcaatgactttgggaagctgaaggccatcctgatccagaggcagattgatgtggacacagtgtttgaggtggaggatgagaacatggtgctggccagctacaagcagggctactggctgcccagctacaagctgaagagctcctgggccaccggcctgcacctgtctgtgctgtttggacatgtggagtgcctgctggtgctgctggaccacaatgccaccatcaactgccggcccaacgggaagacccccctgcacgtggcctgtgagatggccaacgtggactgtgtgaagatcctgtgtgacagaggagccaagctgaactgctacagcctgagcggccacacagccctgcacttctgcaccacccccagcagcatcctgtgtgccaagcagctggtgtggaggggggccaacgtgaacatgaagaccaacaaccaggatgaggagacccccctgcacacagctgcccacttcggcctgtctgagctggtggccttctacgtggagcacggggccatcgtggacagcgtgaatgcccacatggagacccccctggccatcgccgcctactgggccctgcgcttcaaggagcaggagtacagcacagagcaccacctggtgtgcaggatgctgctggactacaaggccgaggtgaatgccagagatgatgacttcaagagccccctgcacaaggccgcctggaactgtgaccacgtgctgatgcacatgatgctggaggccggggctgaggccaacctgatggacatcaatggctgtgccgccatccagtatgtgctgaaggtgacctctgtgcggcctgctgcccagcctgagatctgctaccagctgctgctgaaccacggggccgcccgcatctacccaccccagttccacaaggtgcggctgtgccctgtggtgtcccggctgaggaagatccagatggccgccctgtctgagatcagcaagtag

SEQ ID NO: 143663 - DNA, 3747 bp, synthetic construct
  misc_feature 1..3747: note = Description of Artificial Sequence: Synthetic coding sequence
  source 1..3747: mol_type = other DNA
atgggcaaggaccaggagctgctggaggccgccaggactggaaatgtggccctggtggagaagctgctgagcggcaggaaaggaggcatcctgggcggcggcagcggccccctgcccctgagcaacctgctgagcatctggaggggccccaacgtgaactgcacagacagcagcggctacacagccctgcaccacgccgccctgaatggccacaaggacatcgtgctgaagctgctgcagtatgaggccagcaccaacgtggccgacaacaagggctacttccccatccacctggccgcctggaagggagatgtggagatcgtgaagatcctgatccaccacggccccagccacagccgggtgaatgagcagaacaatgaaaatgaaacagccctgcactgtgccgcccagtatggccacagcgaggtggtggccgtgctgctggaggagctgacagaccccaccatccggaacagcaagctggagacccccctggacctggccgccctgtatggccgcctgcgggtggtgaagatgatcatcagcgcccaccccaacctgatgagctgcaacaccaggaagcacacccccctgcacctggccgccagaaatggccacaaggctgtggtgcaggtgctgctggaggccggcatggatgtgtcctgccagacagagaagggcagcgccctgcatgaagctgccctgtttgggaaggtggatgtggtgcgggtgctgctggagaccggcattgatgccaacatcaaggacagcctgggccgcacagtgctggacatcctgaaggagcaccccagccagaagagcctgcagatcgccaccctgctgcaggagtacctggagggcgtgggccgcagcacagtgctggaggagcctgtgcaggaggatgccacccaggagacccacatcagcagccctgtggagagccccagccagaagaccaagtcagaaacagtgactggagagctgagcaagctgctggatgagatcaagctgtgccaggagaaggactacagctttgaggacctgtgccacaccatcagtgaccactacctggacaacctgagcaagatcagcgaggaggagctgggcaagaatggcagccagagcgtgaggaccagcagcaccatcaacctgagccctggagaggtggaggaggaggatgatgatgagaacacctgtggccccagcggcctgtgggaggccctgaccccctgcaatggctgcaggaacctgggcttccccatgctggcccaggagagctaccccaagaagaggaactacaccatggagatcgtgcccagcgccagcctggacaccttccccagtgaaaatgaaaacttcctgtgtgacctgatggacacagctgtgaccaagaagccctgcagcctggagatcgcccgggcccccagccccaggacagacaatgccagcgaggtggccgtgaccaccccaggcaccagcaaccacaggaacagcagcacaggccccaccccagactgcagcccccccagcccagacacagccctgaagaacatcgtgaaggtgatccggccccagcccaagcagaggaccagcatcgtgagcagcctggacttccacaggatgaaccacaaccaggagtactttgagatcaacaccagcacaggctgcaccagcttcaccgccagccccccagccagcccccccaccagctctgtgggcaccacagaggtgaagaatgaaggcaccaaccacacagatgacctgagccggcaggatgacaatgacccccccaaggagtatgaccccggccagtttgctggcctgctgcacggcagcagccctgcctgtgagagccctgagaaccccttccacctgtatggcaagcgggagcagtgtgagaagggccaggatgaggtgtccctggccaacagccccctgcccttcaagcagagccccatcgagaacaacagcgagcccctggtgaagaagatcaagcccaaggtggtgtccaggaccatcttccacaagaagagcaaccagctggagaaccacaccatcgtgggcaccaggagcaccaggagcggcagcagaaatggagaccagtgggtgatgaatgctgggggctttgtggagcgggcctgcaccctgggccgcatccgcagcctgcccaaggccctgattgacatgcacctgagcaagtctgtgtccaagagtgacagcgacctgattgcctaccccagcaatgagaagaccagccgggtgaactggagcgagagcagcacagctgagcacagcagcaaaggaaacagcgagaggacccccagcttcaccagcgagtgggaggagattgacaagatcatgagcagcattgatgtgggcatcaacaatgagctgaaggagatgaatggagagaccacccggccccgctgccctgtgcagacagtgggccagtggctggagagcatcggcctgccccagtatgagaaccacctgatggccaacggctttgacaacgtgcagttcatgggcagcaatgtgatggaggaccaggacctgctggagatcggcatcctgaacagcggccaccggcagaggatcctgcaggccatccagctgctgcccaagatgaggcccatcggccatgatggctaccaccccacctctgtggccgagtggctggacagcattgagctgggggactacaccaaggccttcctgatcaatggctacacctccatggacctgctgaagaagatctgggaggtggagctgatcaacgtgctgaagatcaacctgattggccacaggaagaggatcctggccagcctgggggaccggctgcatgatgatcctccccagaagcccccaagaagcatcaccctgcgggagcccagcggcaaccacaccccaccccagctgagccccagcctgagccagagcacctacaccaccggcggcagcctggatgtgccccacatcatcatgcagggagatgccaggagaagaagaaatgaaaactactttgatgacatccccaggagcaagctggagcggcagatggcccagacaggagactggggcgagcccagcatcaccctgcggcccccaaatgaggccacagccagcacccctgtgcagtactggcagcaccaccctgagaagctgatcttccagagctgtgactacaaggccttctacctgggctccatgctgatcaaggagctgcggggcacagagagcacccaggatgcctgtgccaagatgagggtgatgtgtgtgaagagcacagagcagatgaagaaggtgcccaccatcatcctgtctgtgtcctacaagggcgtgaagttcattgatgccaccaacaagaacatcatcgccgagcacgagatccggaacatcagctgtgccgcccaggaccctgaggacctgagcacctttgcctacatcaccaaggacctgaagagcaaccaccactactgccacgtgttcaccgcctttgatgtgaacctggcctatgagatcatcctgaccctgggccaggcctttgaggtggcctaccagctggccctgcaggccaggaagggcggccacagcagcaccctgcctgagagctttgagaacaagcccagcaagcccatccccaagccccgggtgtccatcaggaagtctgtggacctgctgcacgccagccacacaggccaggagcccagcgagcggcacacagaggaggccctgaggaagttctag

SEQ ID NO: 143664 - DNA, 1353 bp, synthetic construct
  misc_feature 1..1353: note = Description of Artificial Sequence: Synthetic coding sequence
  source 1..1353: mol_type = other DNA
atgatgtggcagtgccacctgagcgcccaggactaccgctactaccctgtggatggctacagcctgctgaagcgcttccccctgcaccccctgaccggcccccgctgccctgtgcagacagtgggccagtggctggagagcatcggcctgccccagtatgagaaccacctgatggccaacggctttgacaacgtgcagttcatgggcagcaatgtgatggaggaccaggacctgctggagatcggcatcctgaacagcggccaccggcagaggatcctgcaggccatccagctgctgcccaagatgaggcccatcggccatgatggctaccaccccacctctgtggccgagtggctggacagcattgagctgggggactacaccaaggccttcctgatcaatggctacacctccatggacctgctgaagaagatctgggaggtggagctgatcaacgtgctgaagatcaacctgattggccacaggaagaggatcctggccagcctgggggaccggctgcatgatgatcctccccagaagcccccaagaagcatcaccctgcggagctctgtgtgtgagatctggaccaaccagaatgccggcttccccttcagcgccatccaccaggtgcacaacacaggagactggggcgagcccagcatcaccctgcggcccccaaatgaggccacagccagcacccctgtgcagtactggcagcaccaccctgagaagctgatcttccagagctgtgactacaaggccttctacctgggctccatgctgatcaaggagctgcggggcacagagagcacccaggatgcctgtgccaagatgagggccaacatccagaagagcacagagcagatgaagaaggtgcccaccatcatcctgtctgtgtcctacaagggcgtgaagttcattgatgccaccaacaagaacatcatcgccgagcacgagatccggaacatcagctgtgccgcccaggaccctgaggacctgagcacctttgcctacatcaccaaggacctgaagagcaaccaccactactgccacgtgttcaccgcctttgatgtgaacctggcctatgagatcatcctgaccctgggccaggcctttgaggtggcctaccagctggccctgcaggccaggaagggcggccacagcagcaccctgcctgagagctttgagaacaagcccagcaagcccatccccaagccccgggtgtccatcaggaagtctgtgcagattgaccccagcgagcagaagaccctggccaacctgccctggatcgtggagcccggccaggaggccaagaggggcatcaacaccaagtatgagaccaccatcttctag

SEQ ID NO: 143665 - DNA, 765 bp, synthetic construct
  misc_feature 1..765: note = Description of Artificial Sequence: Synthetic coding sequence
  source 1..765: mol_type = other DNA
atgcagggagatgccaggagaagaagaaatgaaaactactttgatgacatccccaggagcaagctggagcggcagatggcccagacaggagactggggcgagcccagcatcaccctgcggcccccaaatgaggccacagccagcacccctgtgcagtactggcagcaccaccctgagaagctgatcttccagagctgtgactacaaggccttctacctgggctccatgctgatcaaggagctgcggggcacagagagcacccaggatgcctgtgccaagatgagggccaactgccagaagagcacagagcagatgaagaaggtgcccaccatcatcctgtctgtgtcctacaagggcgtgaagttcattgatgccaccaacaagaacatcatcgccgagcacgagatccggaacatcagctgtgccgcccaggaccctgaggacctgagcacctttgcctacatcaccaaggacctgaagagcaaccaccactactgccacgtgttcaccgcctttgatgtgaacctggcctatgagatcatcctgaccctgggccaggcctttgaggtggcctaccagctggccctgcaggccaggaagggcggccacagcagcaccctgcctgagagctttgagaacaagcccagcaagcccatccccaagccccgggtgtccatcaggaagtctgtggacctgctgcacgccagccacacaggccaggagcccagcgagcggcacacagaggaggccctgaggaagttctag

SEQ ID NO: 143666 - DNA, 1053 bp, synthetic construct
  misc_feature 1..1053: note = Description of Artificial Sequence: Synthetic coding sequence
  source 1..1053: mol_type = other DNA
gtgctcttccagggcagcaatgtgatggaggaccaggacctgctggagatcggcatcctgaacagcggccaccggcagaggatcctgcaggccatccagctgctgcccaagatgaggcccatcggccatgatggctaccaccccacctctgtggccgagtggctggacagcattgagctgggggactacaccaaggccttcctgatcaatggctacacctccatggacctgctgaagaagatctgggaggtggagctgatcaaccagagctctgtgtgtgagatctggaccaaccagaatgccggcttccccttcagcgccatccaccaggtgcacaacacaggagactggggcgagcccagcatcaccctgcggcccccaaatgaggccacagccagcacccctgtgcagtactggcagcaccaccctgagaagctgatcttccagagctgtgactacaaggccttctacctgggctccatgctgatcaaggagctgcggggcacagagagcacccaggatgcctgtgccaagatgagggccaacatccagaagagcacagagcagatgaagaaggtgcccaccatcatcctgtctgtgtcctacaagggcgtgaagttcattgatgccaccaacaagaacatcatcgccgagcacgagatccggaacatcagctgtgccgcccaggaccctgaggacctgagcacctttgcctacatcaccaaggacctgaagagcaaccaccactactgccacgtgttcaccgcctttgatgtgaacctggcctatgagatcatcctgaccctgggccaggcctttgaggtggcctaccagctggccctgcaggccaggaaaggaggccacagcagcaccctgcctgagagctttgagaacaagcccagcaagcccatccccaagccccgggtgtccatcaggaagagcgtcatcgaccccagcgagcagaagaccctggccaacctgccctggatcgtggagcccggccaggaggccaagaggggcatcaacaccaagtatgagaccaccatcttctag

SEQ ID NO: 143667 - DNA, 2292 bp, synthetic construct
  misc_feature 1..2292: note = Description of Artificial Sequence: Synthetic coding sequence
  source 1..2292: mol_type = other DNA
tccttccaggagagctaccccaagaagaggaactacaccatggagatcgtgcccagcgccagcctggacaccttccccagtgaaaatgaaaacttcctgtgtgacctgatggacacagctgtgaccaagaagccctgcagcctggagatcgcccgggcccccagccccaggacagacaatgccagcgaggtggccgtgaccaccccaggcaccagcaaccacaggaacagcagcacaggccccaccccagactgcagcccccccagcccagacacagccctgaagaacatcgtgaaggtgatccggccccagcccaagcagaggaccagcatcgtgagcagcctggacttccacaggatgaaccacaaccaggagtactttgagatcaacaccagcacaggctgcaccagcttcaccgccagccccccagccagcccccccaccagctctgtgggcaccacagaggtgaagaatgaaggcaccaaccacacagatgacctgagccggcaggatgacaatgacccccccaaggagtatgaccccggccagtttgctggcctgctgcacggcagcagccctgcctgtgagagccctgagaaccccttccacctgtatggcaagcgggagcagtgtgagaagggccaggatgaggtgtccctggccaacagccccctgcccttcaagcagagccccatcgagaacaacagcgagcccctggtgaagaagatcaagcccaaggtggtgtccaggaccatcttccacaagaagagcaaccagctggagaaccacaccatcgtgggcaccaggagcaccaggagcggcagcagaaatggagaccagtgggtgatgaatgccggcggctttgtggagcgggcctgcaccctgggccgcatccgcagcctgcccaaggccctgattgacatgcacctgagcaagtctgtgtccaagagtgacagcgacctgattgcctaccccagcaatgagaagaccagccgggtgaactggagcgagagcagcacagctgagcacagcagcaagggcaacagcgagaggacccccagcttcaccagcgagtgggaggagattgacaagatcatgagcagcattgatgtgggcatcaacaatgagctgaaggagatgaatggcccccgctgccctgtgcagacagtgggccagtggctggagagcatcggcctgccccagtatgagaaccacctgatggccaatggatttgacaacgtgcagttcatgggcagcaatgtgatggaggaccaggacctgctggagatcggcatcctgaacagcggccaccggcagaggatcctgcaggccatccagctgctgcccaagatgaggcccatcggccatgatggctaccaccccacctctgtggccgagtggctggacagcattgagctgggggactacaccaaggccttcctgatcaatggctacacctccatggacctgctgaagaagatctgggaggtggagctgatcaacgtgctgaagatcaacctgattggccacaggaagaggatcctggccagcctgggggaccggctgcatgatgaccccccccagaagccacccaggagcatcaccctgaggactggagactggggcgagcccagcatcaccctgcggcccccaaatgaggccacagccagcacccctgtgcagtactggcagcaccaccctgagaagctgatcttccagagctgtgactacaaggccttctacctgggctccatgctgatcaaggagctgcggggcacagagagcacccaggatgcctgtgccaagatgagggtgatgtgtgtgaagagcacagagcagatgaagaaggtgcccaccatcatcctgtctgtgtcctacaagggcgtgaagttcattgatgccaccaacaagaacatcatcgccgagcacgagatccggaacatcagctgtgccgcccaggaccctgaggacctgagcacctttgcctacatcaccaaggacctgaagagcaaccaccactactgccacgtgttcaccgcctttgatgtgaacctggcctatgagatcatcctgaccctgggccaggcctttgaggtggcctaccagctggccctgcaggccaggaaaggaggccacagcagcaccctgcctgagagctttgagaacaagcccagcaagcccatccccaagccccgggtgtccatcaggaagtctgtggacctgctgcacgccagccacacaggccaggagcccagcgagcggcacacagaggaggccctgaggaagttctag

SEQ ID NO: 143668 - DNA, 1281 bp, synthetic construct
  misc_feature 1..1281: note = Description of Artificial Sequence: Synthetic coding sequence
  source 1..1281: mol_type = other DNA
atgatgtggcagtgccacctgagcgcccaggactaccgctactaccctgtggatggctacagcctgctgaagcgcttccccctgcaccccctgaccggcccccgctgccctgtgcagacagtgggccagtggctggagagcatcggcctgccccagtatgagaaccacctgatggccaacggctttgacaacgtgcagttcatgggcagcaatgtgatggaggaccaggacctgctggagatcggcatcctgaacagcggccaccggcagaggatcctgcaggccatccagctgctgcccaagatgaggcccatcggccatgatggctaccaccccacctctgtggccgagtggctggacagcattgagctgggggactacaccaaggccttcctgatcaatggctacacctccatggacctgctgaagaagatctgggaggtggagctgatcaacgtgctgaagatcaacctgattggccacaggaagaggatcctggccagcctgggggaccggctgcatgatgatcctccccagaagcccccaagaagcatcaccctgaggactggagactggggcgagcccagcatcaccctgcggcccccaaatgaggccacagccagcacccctgtgcagtactggcagcaccaccctgagaagctgatcttccagagctgtgactacaaggccttctacctgggctccatgctgatcaaggagctgcggggcacagagagcacccaggatgcctgtgccaagatgagggccaactgccagaagagcacagagcagatgaagaaggtgcccaccatcatcctgtctgtgtcctacaagggcgtgaagttcattgatgccaccaacaagaacatcatcgccgagcacgagatccggaacatcagctgtgccgcccaggaccctgaggacctgagcacctttgcctacatcaccaaggacctgaagagcaaccaccactactgccacgtgttcaccgcctttgatgtgaacctggcctatgagatcatcctgaccctgggccaggcctttgaggtggcctaccagctggccctgcaggccaggaagggcggccacagcagcaccctgcctgagagctttgagaacaagcccagcaagcccatccccaagccccgggtgtccatcaggaagtctgtgcagattgaccccagcgagcagaagaccctggccaacctgccctggatcgtggagcccggccaggaggccaagaggggcatcaacaccaagtatgagaccaccatcttctag

SEQ ID NO: 143669 - DNA, 1383 bp, synthetic construct
  misc_feature 1..1383: note = Description of Artificial Sequence: Synthetic coding sequence
  source 1..1383: mol_type = other DNA
atgatgtggcagtgccacctgagcgcccaggactaccgctactaccctgtggatggctacagcctgctgaagcgcttccccctgcaccccctgaccggcccccgctgccctgtgcagacagtgggccagtggctggagagcatcggcctgccccagtatgagaaccacctgatggccaacggctttgacaacgtgcagttcatgggcagcaatgtgatggaggaccaggacctgctggagatcggcatcctgaacagcggccaccggcagaggatcctgcaggccatccagctgctgcccaagatgaggcccatcggccatgatggctaccaccccacctctgtggccgagtggctggacagcattgagctgggggactacaccaaggccttcctgatcaatggctacacctccatggacctgctgaagaagatctgggaggtggagctgatcaacgtgctgaagatcaacctgattggccacaggaagaggatcctggccagcctgggggaccggctgcatgatgatcctccccagaagcccccaagaagcatcaccctgcgggagcccagcggcaaccacaccccaccccagctgagccccagcctgagccagagcacctacaccaccggcggcagcctggatgtgccccacatcatcatgcagggagatgccaggagaagaagaaatgaaaactactttgatgacatccccaggagcaagctggagcggcagatggcccagacaggagactggggcgagcccagcatcaccctgcggcccccaaatgaggccacagccagcacccctgtgcagtactggcagcaccaccctgagaagctgatcttccagagctgtgactacaaggccttctacctgggctccatgctgatcaaggagctgcggggcacagagagcacccaggatgcctgtgccaagatgagggccaactgccagaagagcacagagcagatgaagaaggtgcccaccatcatcctgtctgtgtcctacaagggcgtgaagttcattgatgccaccaacaagaacatcatcgccgagcacgagatccggaacatcagctgtgccgcccaggaccctgaggacctgagcacctttgcctacatcaccaaggacctgaagagcaaccaccactactgccacgtgttcaccgcctttgatgtgaacctggcctatgagatcatcctgaccctgggccaggcctttgaggtggcctaccagctggccctgcaggccaggaagggcggccacagcagcaccctgcctgagagctttgagaacaagcccagcaagcccatccccaagccccgggtgtccatcaggaagtctgtgcccttctgcttcaaggctgaccggcccatctag

SEQ ID NO: 143670 - DNA, 2295 bp, synthetic construct
  misc_feature 1..2295: note = Description of Artificial Sequence: Synthetic coding sequence
  source 1..2295: mol_type = other DNA
atgctggcccaggagagctaccccaagaagaggaactacaccatggagatcgtgcccagcgccagcctggacaccttccccagtgaaaatgaaaacttcctgtgtgacctgatggacacagctgtgaccaagaagccctgcagcctggagatcgcccgggcccccagccccaggacagacaatgccagcgaggtggccgtgaccaccccaggcaccagcaaccacaggaacagcagcacaggccccaccccagactgcagcccccccagcccagacacagccctgaagaacatcgtgaaggtgatccggccccagcccaagcagaggaccagcatcgtgagcagcctggacttccacaggatgaaccacaaccaggagtactttgagatcaacaccagcacaggctgcaccagcttcaccgccagccccccagccagcccccccaccagctctgtgggcaccacagaggtgaagaatgaaggcaccaaccacacagatgacctgagccggcaggatgacaatgacccccccaaggagtatgaccccggccagtttgctggcctgctgcacggcagcagccctgcctgtgagagccctgagaaccccttccacctgtatggcaagcgggagcagtgtgagaagggccaggatgaggtgtccctggccaacagccccctgcccttcaagcagagccccatcgagaacaacagcgagcccctggtgaagaagatcaagcccaaggtggtgtccaggaccatcttccacaagaagagcaaccagctggagaaccacaccatcgtgggcaccaggagcaccaggagcggcagcagaaatggagaccagtgggtgatgaatgctgggggctttgtggagcgggcctgcaccctgggccgcatccgcagcctgcccaaggccctgattgacatgcacctgagcaagtctgtgtccaagagtgacagcgacctgattgcctaccccagcaatgagaagaccagccgggtgaactggagcgagagcagcacagctgagcacagcagcaaaggaaacagcgagaggacccccagcttcaccagcgagtgggaggagattgacaagatcatgagcagcattgatgtgggcatcaacaatgagctgaaggagatgaatggcccccgctgccctgtgcagacagtgggccagtggctggagagcatcggcctgccccagtatgagaaccacctgatggccaacggctttgacaacgtgcagttcatgggcagcaatgtgatggaggaccaggacctgctggagatcggcatcctgaacagcggccaccggcagaggatcctgcaggccatccagctgctgcccaagatgaggcccatcggccatgatggctaccaccccacctctgtggccgagtggctggacagcattgagctgggggactacaccaaggccttcctgatcaatggctacacctccatggacctgctgaagaagatctgggaggtggagctgatcaacgtgctgaagatcaacctgattggccacaggaagaggatcctggccagcctgggggaccggctgcatgatgatcctccccagaagcccccaagaagcatcaccctgaggactggagactggggcgagcccagcatcaccctgcggcccccaaatgaggccacagccagcacccctgtgcagtactggcagcaccaccctgagaagctgatcttccagagctgtgactacaaggccttctacctgggctccatgctgatcaaggagctgcggggcacagagagcacccaggatgcctgtgccaagatgagggccaactgccagaagagcacagagcagatgaagaaggtgcccaccatcatcctgtctgtgtcctacaagggcgtgaagttcattgatgccaccaacaagaacatcatcgccgagcacgagatccggaacatcagctgtgccgcccaggaccctgaggacctgagcacctttgcctacatcaccaaggacctgaagagcaaccaccactactgccacgtgttcaccgcctttgatgtgaacctggcctatgagatcatcctgaccctgggccaggcctttgaggtggcctaccagctggccctgcaggccaggaagggcggccacagcagcaccctgcctgagagctttgagaacaagcccagcaagcccatccccaagccccgggtgtccatcaggaagtctgtggacctgctgcacgccagccacacaggccaggagcccagcgagcggcacacagaggaggccctgaggaagttctag

SEQ ID NO: 143671 - DNA, 3747 bp, synthetic construct
  misc_feature 1..3747: note = Description of Artificial Sequence: Synthetic coding sequence
  source 1..3747: mol_type = other DNA
atgggcaaggaccaggagctgctggaggccgccaggactggaaatgtggccctggtggagaagctgctgagcggcaggaaaggaggcatcctgggcggcggcagcggccccctgcccctgagcaacctgctgagcatctggaggggccccaacgtgaactgcacagacagcagcggctacacagccctgcaccacgccgccctgaatggccacaaggacatcgtgctgaagctgctgcagtatgaggccagcaccaacgtggccgacaacaagggctacttccccatccacctggccgcctggaagggagatgtggagatcgtgaagatcctgatccaccacggccccagccacagccgggtgaatgagcagaacaatgaaaatgaaacagccctgcactgtgccgcccagtatggccacagcgaggtggtggccgtgctgctggaggagctgacagaccccaccatccggaacagcaagctggagacccccctggacctggccgccctgtatggccgcctgcgggtggtgaagatgatcatcagcgcccaccccaacctgatgagctgcaacaccaggaagcacacccccctgcacctggccgccagaaatggccacaaggctgtggtgcaggtgctgctggaggccggcatggatgtgtcctgccagacagagaagggcagcgccctgcatgaagctgccctgtttgggaaggtggatgtggtgcgggtgctgctggagaccggcattgatgccaacatcaaggacagcctgggccgcacagtgctggacatcctgaaggagcaccccagccagaagagcctgcagatcgccaccctgctgcaggagtacctggagggcgtgggccgcagcacagtgctggaggagcctgtgcaggaggatgccacccaggagacccacatcagcagccctgtggagagccccagccagaagaccaagtcagaaacagtgactggagagctgagcaagctgctggatgagatcaagctgtgccaggagaaggactacagctttgaggacctgtgccacaccatcagtgaccactacctggacaacctgagcaagatcagcgaggaggagctgggcaagaatggcagccagagcgtgaggaccagcagcaccatcaacctgagccctggagaggtggaggaggaggatgatgatgagaacacctgtggccccagcggcctgtgggaggccctgaccccctgcaatggctgcaggaacctgggcttccccatgctggcccaggagagctaccccaagaagaggaactacaccatggagatcgtgcccagcgccagcctggacaccttccccagtgaaaatgaaaacttcctgtgtgacctgatggacacagctgtgaccaagaagccctgcagcctggagatcgcccgggcccccagccccaggacagacaatgccagcgaggtggccgtgaccaccccaggcaccagcaaccacaggaacagcagcacaggccccaccccagactgcagcccccccagcccagacacagccctgaagaacatcgtgaaggtgatccggccccagcccaagcagaggaccagcatcgtgagcagcctggacttccacaggatgaaccacaaccaggagtactttgagatcaacaccagcacaggctgcaccagcttcaccgccagccccccagccagcccccccaccagctctgtgggcaccacagaggtgaagaatgaaggcaccaaccacacagatgacctgagccggcaggatgacaatgacccccccaaggagtatgaccccggccagtttgctggcctgctgcacggcagcagccctgcctgtgagagccctgagaaccccttccacctgtatggcaagcgggagcagtgtgagaagggccaggatgaggtgtccctggccaacagccccctgcccttcaagcagagccccatcgagaacaacagcgagcccctggtgaagaagatcaagcccaaggtggtgtccaggaccatcttccacaagaagagcaaccagctggagaaccacaccatcgtgggcaccaggagcaccaggagcggcagcagaaatggagaccagtgggtgatgaatgctgggggctttgtggagcgggcctgcaccctgggccgcatccgcagcctgcccaaggccctgattgacatgcacctgagcaagtctgtgtccaagagtgacagcgacctgattgcctaccccagcaatgagaagaccagccgggtgaactggagcgagagcagcacagctgagcacagcagcaaaggaaacagcgagaggacccccagcttcaccagcgagtgggaggagattgacaagatcatgagcagcattgatgtgggcatcaacaatgagctgaaggagatgaatggagagaccacccggccccgctgccctgtgcagacagtgggccagtggctggagagcatcggcctgccccagtatgagaaccacctgatggccaacggctttgacaacgtgcagttcatgggcagcaatgtgatggaggaccaggacctgctggagatcggcatcctgaacagcggccaccggcagaggatcctgcaggccatccagctgctgcccaagatgaggcccatcggccatgatggctaccaccccacctctgtggccgagtggctggacagcattgagctgggggactacaccaaggccttcctgatcaatggctacacctccatggacctgctgaagaagatctgggaggtggagctgatcaacgtgctgaagatcaacctgattggccacaggaagaggatcctggccagcctgggggaccggctgcatgatgatcctccccagaagcccccaagaagcatcaccctgcgggagcccagcggcaaccacaccccaccccagctgagccccagcctgagccagagcacctacaccaccggcggcagcctggatgtgccccacatcatcatgcagggagatgccaggagaagaagaaatgaaaactactttgatgacatccccaggagcaagctggagcggcagatggcccagacaggagactggggcgagcccagcatcaccctgcggcccccaaatgaggccacagccagcacccctgtgcagtactggcagcaccaccctgagaagctgatcttccagagctgtgactacaaggccttctacctgggctccatgctgatcaaggagctgcggggcacagagagcacccaggatgcctgtgccaagatgagggccaactgccagaagagcacagagcagatgaagaaggtgcccaccatcatcctgtctgtgtcctacaagggcgtgaagttcattgatgccaccaacaagaacatcatcgccgagcacgagatccggaacatcagctgtgccgcccaggaccctgaggacctgagcacctttgcctacatcaccaaggacctgaagagcaaccaccactactgccacgtgttcaccgcctttgatgtgaacctggcctatgagatcatcctgaccctgggccaggcctttgaggtggcctaccagctggccctgcaggccaggaagggcggccacagcagcaccctgcctgagagctttgagaacaagcccagcaagcccatccccaagccccgggtgtccatcaggaagtctgtggacctgctgcacgccagccacacaggccaggagcccagcgagcggcacacagaggaggccctgaggaagttctag

SEQ ID NO: 143672 - DNA, 1074 bp, synthetic construct
  misc_feature 1..1074: note = Description of Artificial Sequence: Synthetic coding sequence
  source 1..1074: mol_type = other DNA
atggccaatggatttgacaacgtgcagttcatgggcagcaatgtgatggaggaccaggacctgctggagatcggcatcctgaacagcggccaccggcagaggatcctgcaggccatccagctgctgcccaagatgaggcccatcggccatgatggctaccaccccacctctgtggccgagtggctggacagcattgagctgggggactacaccaaggccttcctgatcaatggctacacctccatggacctgctgaagaagatctgggaggtggagctgatcaaccagagctctgtgtgtgagatctggaccaaccagaatgccggcttccccttcagcgccatccaccaggtgcacaacacaggagactggggcgagcccagcatcaccctgcggcccccaaatgaggccacagccagcacccctgtgcagtactggcagcaccaccctgagaagctgatcttccagagctgtgactacaaggccttctacctgggctccatgctgatcaaggagctgcggggcacagagagcacccaggatgcctgtgccaagatgagggccaactgccagaagagcacagagcagatgaagaaggtgcccaccatcatcctgtctgtgtcctacaagggcgtgaagttcattgatgccaccaacaagaacatcatcgccgagcacgagatccggaacatcagctgtgccgcccaggaccctgaggacctgagcacctttgcctacatcaccaaggacctgaagagcaaccaccactactgccacgtgttcaccgcctttgatgtgaacctggcctatgagatcatcctgaccctgggccaggcctttgaggtggcctaccagctggccctgcaggccaggaagggcggccacagcagcaccctgcctgagagctttgagaacaagcccagcaagcccatccccaagccccgggtgtccatcaggaagtctgtgattgaccccagcgagcagaagaccctggccaacctgccctggatcgtggagcccggccaggaggccaagaggggcatcaacaccaagtatgagaccaccatcttctag

SEQ ID NO: 143673 - DNA, 1533 bp, synthetic construct
  misc_feature 1..1533: note = Description of Artificial Sequence: Synthetic coding sequence
  source 1..1533: mol_type = other DNA
atgatgtggcagtgccacctgagcgcccaggactaccgctactaccctgtggatggctacagcctgctgaagcgcttccccctgcaccccctgaccggcccccgctgccctgtgcagacagtgggccagtggctggagagcatcggcctgccccagtatgagaaccacctgatggccaacggctttgacaacgtgcagttcatgggcagcaatgtgatggaggaccaggacctgctggagatcggcatcctgaacagcggccaccggcagaggatcctgcaggccatccagctgctgcccaagatgaggcccatcggccatgatggctaccaccccacctctgtggccgagtggctggacagcattgagctgggggactacaccaaggccttcctgatcaatggctacacctccatggacctgctgaagaagatctgggaggtggagctgatcaacgtgctgaagatcaacctgattggccacaggaagaggatcctggccagcctgggggaccggctgcatgatgatcctccccagaagcccccaagaagcatcaccctgcgggagcccagcggcaaccacaccccaccccagctgagccccagcctgagccagagcacctacaccaccggcggcagcctggatgtgccccacatcatcatgcagggagatgccaggagaagaagaaatgaaaactactttgatgacatccccaggagcaagctggagcggcagatggcccagagctctgtgtgtgagatctggaccaaccagaatgccggcttccccttcagcgccatccaccaggtgcacaacacaggagactggggcgagcccagcatcaccctgcggcccccaaatgaggccacagccagcacccctgtgcagtactggcagcaccaccctgagaagctgatcttccagagctgtgactacaaggccttctacctgggctccatgctgatcaaggagctgcggggcacagagagcacccaggatgcctgtgccaagatgagggccaactgccagaagagcacagagcagatgaagaaggtgcccaccatcatcctgtctgtgtcctacaagggcgtgaagttcattgatgccaccaacaagaacatcatcgccgagcacgagatccggaacatcagctgtgccgcccaggaccctgaggacctgagcacctttgcctacatcaccaaggacctgaagagcaaccaccactactgccacgtgttcaccgcctttgatgtgaacctggcctatgagatcatcctgaccctgggccaggcctttgaggtggcctaccagctggccctgcaggccaggaagggcggccacagcagcaccctgcctgagagctttgagaacaagcccagcaagcccatccccaagccccgggtgtccatcaggaagtctgtgcagattgaccccagcgagcagaagaccctggccaacctgccctggatcgtggagcccggccaggaggccaagaggggcatcaacaccaagtatgagaccaccatcttctag

SEQ ID NO: 143674 - DNA, 1245 bp, synthetic construct
  misc_feature 1..1245: note = Description of Artificial Sequence: Synthetic coding sequence
  source 1..1245: mol_type = other DNA
atgatgtggcagtgccacctgagcgcccaggactaccgctactaccctgtggatggctacagcctgctgaagcgcttccccctgcaccccctgaccggcccccgctgccctgtgcagacagtgggccagtggctggagagcatcggcctgccccagtatgagaaccacctgatggccaacggctttgacaacgtgcagttcatgggcagcaatgtgatggaggaccaggacctgctggagatcggcatcctgaacagcggccaccggcagaggatcctgcaggccatccagctgctgcccaagatgaggcccatcggccatgatggctaccaccccacctctgtggccgagtggctggacagcattgagctgggggactacaccaaggccttcctgatcaatggctacacctccatggacctgctgaagaagatctgggaggtggagctgatcaacgtgctgaagatcaacctgattggccacaggaagaggatcctggccagcctgggggaccggctgcatgatgatcctccccagaagcccccaagaagcatcaccctgaggactggagactggggcgagcccagcatcaccctgcggcccccaaatgaggccacagccagcacccctgtgcagtactggcagcaccaccctgagaagctgatcttccagagctgtgactacaaggccttctacctgggctccatgctgatcaaggagctgcggggcacagagagcacccaggatgcctgtgccaagatgagggccaactgccagaagagcacagagcagatgaagaaggtgcccaccatcatcctgtctgtgtcctacaagggcgtgaagttcattgatgccaccaacaagaacatcatcgccgagcacgagatccggaacatcagctgtgccgcccaggaccctgaggacctgagcacctttgcctacatcaccaaggacctgaagagcaaccaccactactgccacgtgttcaccgcctttgatgtgaacctggcctatgagatcatcctgaccctgggccaggcctttgaggtggcctaccagctggccctgcaggccaggaagggcggccacagcagcaccctgcctgagagctttgagaacaagcccagcaagcccatccccaagccccgggtgtccatcaggaagtctgtggacctgctgcacgccagccacacaggccaggagcccagcgagcggcacacagaggaggccctgaggaagttctag

SEQ ID NO: 143675 - DNA, 1353 bp, synthetic construct
  misc_feature 1..1353: note = Description of Artificial Sequence: Synthetic coding sequence
  source 1..1353: mol_type = other DNA
atgatgtggcagtgccacctgagcgcccaggactaccgctactaccctgtggatggctacagcctgctgaagcgcttccccctgcaccccctgaccggcccccgctgccctgtgcagacagtgggccagtggctggagagcatcggcctgccccagtatgagaaccacctgatggccaacggctttgacaacgtgcagttcatgggcagcaatgtgatggaggaccaggacctgctggagatcggcatcctgaacagcggccaccggcagaggatcctgcaggccatccagctgctgcccaagatgaggcccatcggccatgatggctaccaccccacctctgtggccgagtggctggacagcattgagctgggggactacaccaaggccttcctgatcaatggctacacctccatggacctgctgaagaagatctgggaggtggagctgatcaacgtgctgaagatcaacctgattggccacaggaagaggatcctggccagcctgggggaccggctgcatgatgatcctccccagaagcccccaagaagcatcaccctgcggagctctgtgtgtgagatctggaccaaccagaatgccggcttccccttcagcgccatccaccaggtgcacaacacaggagactggggcgagcccagcatcaccctgcggcccccaaatgaggccacagccagcacccctgtgcagtactggcagcaccaccctgagaagctgatcttccagagctgtgactacaaggccttctacctgggctccatgctgatcaaggagctgcggggcacagagagcacccaggatgcctgtgccaagatgagggccaactgccagaagagcacagagcagatgaagaaggtgcccaccatcatcctgtctgtgtcctacaagggcgtgaagttcattgatgccaccaacaagaacatcatcgccgagcacgagatccggaacatcagctgtgccgcccaggaccctgaggacctgagcacctttgcctacatcaccaaggacctgaagagcaaccaccactactgccacgtgttcaccgcctttgatgtgaacctggcctatgagatcatcctgaccctgggccaggcctttgaggtggcctaccagctggccctgcaggccaggaagggcggccacagcagcaccctgcctgagagctttgagaacaagcccagcaagcccatccccaagccccgggtgtccatcaggaagtctgtgcagattgaccccagcgagcagaagaccctggccaacctgccctggatcgtggagcccggccaggaggccaagaggggcatcaacaccaagtatgagaccaccatcttctag

SEQ ID NO: 143676 - DNA, 1185 bp, synthetic construct
  misc_feature 1..1185: note = Description of Artificial Sequence: Synthetic coding sequence
  source 1..1185: mol_type = other DNA
atgggcccccgctgccctgtgcagacagtgggccagtggctggagagcatcggcctgccccagtatgagaaccacctgatggccaatggatttgacaacgtgcagttcatgggcagcaatgtgatggaggaccaggacctgctggagatcggcatcctgaacagcggccaccggcagaggatcctgcaggccatccagctgctgcccaagatgaggcccatcggccatgatggctaccaccccacctctgtggccgagtggctggacagcattgagctgggggactacaccaaggccttcctgatcaatggctacacctccatggacctgctgaagaagatctgggaggtggagctgatcaacgtgctgaagatcaacctgattggccacaggaagaggatcctggccagcctgggggaccggctgcatgatgaccccccccagaagccacccaggagcatcaccctgaggactggagactggggcgagcccagcatcaccctgcggcccccaaatgaggccacagccagcacccctgtgcagtactggcagcaccaccctgagaagctgatcttccagagctgtgactacaaggccttctacctgggctccatgctgatcaaggagctgcggggcacagagagcacccaggatgcctgtgccaagatgagggccaactgccagaagagcacagagcagatgaagaaggtgcccaccatcatcctgtctgtgtcctacaagggcgtgaagttcattgatgccaccaacaagaacatcatcgccgagcacgagatccggaacatcagctgtgccgcccaggaccctgaggacctgagcacctttgcctacatcaccaaggacctgaagagcaaccaccactactgccacgtgttcaccgcctttgatgtgaacctggcctatgagatcatcctgaccctgggccaggcctttgaggtggcctaccagctggccctgcaggccaggaaaggaggccacagcagcaccctgcctgagagctttgagaacaagcccagcaagcccatccccaagccccgggtgtccatcaggaagagcgtcatcgaccccagcgagcagaagaccctggccaacctgccctggatcgtggagcccggccaggaggccaagaggggcatcaacaccaagtatgagaccaccatcttctag

SEQ ID NO: 143677 - DNA, 1254 bp, synthetic construct
  misc_feature 1..1254: note = Description of Artificial Sequence: Synthetic coding sequence
  source 1..1254: mol_type = other DNA
atgagcacccgctaccaccaggccgccagtgacagctacctggagctgctgaaggaggccaccaagagggacctgaacctgagtgatgaagatggcatgacccccaccctgctggccgcctaccacggcaacctggaggccctggagatcatctgcagcagaggaggagaccctgacagatgtgacatctggggcaacacccccctgcactttgctgccagcaatggacatgcccactgtgtgtccttcctggtgaactttggagccaacatctttgccctggacaatgacctgcagacccccctggatgctgctgccagccgggagcagaatgaatgtgtggccctgctggacaaggccgccacagcccagaacatcatgaaccccaagaaggtgacccggctgaaggagcaggcccagaagaatgcccggcggcagatcaaggaatgtgagcggctgcaggagaagcaccagaacaagatggcccacacctacagcaaggaggagagcggcaccctgagcagcagcaagggcaccttcagccgcagcagccccagcaatgccagcgcccctggcaccttcggcagcctgagcaagggcatcaaggacaccttcaagatcaagttcaagaagaacaaggacacagctgagcaggtgggcaaggagggccgcagcggccagagaaatgtgatggaggtgttccgggaggaggaggaggacagcttcagcggggacttcaaggagaagctgcagctgtctgctgaggaggatggctctgtgcaccacgagagcatcctgaacagacctggcctgggcagcatcgtgttcagaagaaaccgcatcagcagccctgaggacatcagtgacagcaagcgggagtttggcttcaagctgcccagcgagctgctgcagaggcagggcgccagcgaggctgatgagggcgctgctgatgaggagggggaggagaatggcctgaaggatgacctgccctgggatgatgatgaggtggagtgggaggaggatgtggtggatgccacccccctggaggtgttcctgctgagccagcacctggaggagttcctgcccatcttcaagcgggagcagattgacctggaggccctgctgctgtgcagtgatgaggacctgcagagcatccagatgcagctgggccccaggaagaaggtgctgaatgccatcaacagaaggaagcaggtgctgcagcagcccggccagctggtggacaccagcctgtag

SEQ ID NO: 143678 - DNA, 7992 bp, synthetic construct
  misc_feature 1..7992: note = Description of Artificial Sequence: Synthetic coding sequence
  source 1..7992: mol_type = other DNA
atgcccaagggcggctgccccaaggccccccagcaggaggagctgcccctgagcagtgacatggtggagaagcagacaggcaagaaggacaaggacaaggtgtccctgaccaagacccccaagctggagagaggagatggcggcaaggaggtgcgggagcgggccagcaagaggaagctgcccttcaccgctggggccaatggagagcagaaggacagcgacacagagaagcagggccctgagaggaagaggatcaagaaggagcctgtgaccaggaaggccggcctgctgtttggcatgggcctgagcggcatccgggccggctaccccctgtctgagcggcagcaggtggccctgctgatgcagatgacagctgaggagagcgccaacagccctgtggacaccacccccaagcaccccagccagagcacagtgtgccagaagggcacccccaacagcgccagcaagaccaaggacaaggtgaacaagagaaatgaaagaggagagacccggctgcacagagctgccatcagaggagatgcccggcgcatcaaggagctgatcagcgagggcgcagatgtgaatgtgaaggactttgctggctggacagccctgcacgaggcctgcaacagaggctactatgatgtggccaagcagctgctggccgccggggctgaggtgaacaccaagggcctggatgatgacacccccctgcatgatgctgccaacaacggccactacaaggtggtgaagctgctgctgcgctatggaggcaacccccagcagagcaacaggaagggggagacccccctgaaggtggccaacagccccaccatggtgaacctgctgctgggcaagggcacctacaccagcagcgaggagagcagcacagagagcagcgaggaggaggatgcccccagctttgcccccagcagctctgtggatggcaacaacacagattctgaatttgagaagggcctgaagcacaaggccaagaaccctgagccccagaaggccacagcccctgtgaaggatgaatatgaatttgatgaagatgatgagcaggacagagtgccccctgtggatgacaagcacctgctgaagaaggactacaggaaggagaccaagagcaacagcttcatcagcatccccaagatggaggtgaagagctacaccaagaacaacaccatcgcccccaagaaggccagccaccgcatcctgagtgacaccagtgatgaggaggatgcctctgtgacagtgggcaccggggagaagctgcggctgagcgcccacaccatcctgcccggcagcaagacccgggagcccagcaatgccaagcagcagaaggagaagaacaaggtgaagaagaagaggaagaaggagaccaagggccgggaggtgcgctttgggaagagaagtgacaagttctgcagcagcgagagcgagagcgagagcagcgagagcggggaggatgaccgggacagcctgggcagcagcggctgcctgaagggcagccccctggtgctgaaggaccccagcctcttcagcagcctgagcgccagcagcaccagcagccacggcagcagcgctgcccagaagcagaaccccagccacacagaccagcacaccaagcactggaggacagacaactggaagaccatcagcagccctgcctggagcgaggtgagcagcctgagtgacagcaccaggacccggctgaccagcgagagtgactacagcagcgagggcagctctgtggagagcctgaagcctgtgaggaagaggcaggagcacaggaagagggccagcctgtctgagaagaagagccccttcctgagcagcgctgagggcgctgtgcccaagctggacaaggagggcaaggtggtgaagaagcacaagaccaagcacaagcacaagaacaaggagaagggccagtgcagcatcagccaggagctgaagctgaagagcttcacctatgaatatgaggacagcaagcagaagagtgacaaggccatcctgctggagaatgacctgagcacagagaacaagctgaaggtgctgaagcatgaccgggaccacttcaagaaggaggagaagctgagcaagatgaagctggaggagaaggagtggctgttcaaggatgagaagagcctgaagaggatcaaggacaccaacaaggacatcagccgctccttccgggaggagaaggacaggagcaacaaggccgagaaggagaggagcctgaaggagaagagccccaaggaggagaagctgcggctgtacaaggaggagaggaagaagaagagcaaggaccggcccagcaagctggagaagaagaatgacctgaaggaggacaagatcagcaaggagaaggagaagatcttcaaggaggacaaggagaagctgaagaaggagaaggtgtaccgggaggacagcgcctttgatgagtactgcaacaagaaccagttcctggagaatgaagacaccaagttcagcctgagtgatgaccagagggaccgctggttcagtgacctgagtgacagcagctttgacttcaagggagaagattcctgggacagccctgtgacagactacagagacatgaagagtgacagcgtggccaagctgatcctggagaccgtgaaggaggacagcaaggagaggagaagagacagccgggcccgggagaagagggactaccgggagcccttcttcaggaagaaggaccgggactacctggacaagaacagcgagaagaggaaggagcagacagagaagcacaagtctgtgcccggctacctgtctgagaaggacaagaagagaagagagagcgctgaggccggccgggacaggaaggatgccctggagagctgcaaggagaggagagatggccgggccaagccagaggaggcccaccgggaggagctgaaggaatgtggctgtgagagcggcttcaaggacaagagtgatggagactttgggaagggcctggagccctgggagcggcaccacccagcccgggagaaggagaagaaggatggccctgacaaggagaggaaggagaagaccaagccagagcgctacaaggagaagagcagtgacaaggacaagtctgagaagagcatcctggagaagtgccagaaggacaaggagtttgacaagtgcttcaaggagaagaaggacaccaaggagaagcacaaggacacccacggcaaggacaaggagaggaaggccagcctggaccagggcaaggagaagaaggagaaggccttccctggcatcatcagcgaggacttcagcgagaagaaggatgacaagaagggcaaggagaagtcctggtacatcgctgacatcttcacagatgaaagtgaagatgaccgggacagctgcatgggcagcggcttcaagatgggagaggccagtgacctgcccaggacagatggcctgcaggagaaggaggagggccgggaggcctatgccagtgacagacacaggaagagcagtgacaagcagcaccctgagcggcagaaggacaaggagccccgggacaggaggaaggacagaggagctgctgatgctggccgggacaagaaggagaaggtgtttgagaagcacaaggagaagaaggacaaggagagcacagagaagtacaaggacaggaaggaccgggcctctgtggacagcacccaggacaagaagaacaagcagaagctgcctgagaaggccgagaagaagcatgctgctgaggacaaggccaagagcaagcacaaggagaagagtgacaaggagcacagcaaggagaggaagagcagccgctctgcagatgctgagaagagcctgctggagaagctggaggaggaggccctgcacgagtaccgggaggacagcaatgacaagatcagcgaggtgtccagtgacagcttcacagaccggggccaggagcccggcctgacagccttcctggaggtgtccttcacagagcccccaggagatgacaagccccgggagagcgcctgcctgcctgagaagctgaaggagaaggagcggcaccgccacagcagcagcagcagcaagaagagccatgaccgggagcgggccaagaaggagaaggccgagaagaaggagaagggggaggactacaaggagggcggcagcaggaaggacagcggccagtatgagaaggacttcctggaggctgatgcctacggcgtgtcctacaacatgaaggctgacattgaagatgagctggacaagaccatcgagctgttcagcacagagaagaaggacaagaatgattctgagcgggagcccagcaagaagattgagaaggagctgaagccctacggcagcagcgccatcaacatcctgaaggagaagaagaagcgggagaagcaccgggagaagtggagagatgagaaggagcggcaccgggacagacatgctgatggcctgctgcggcaccacagagatgagctgctgcggcaccacagagatgagcagaagccagccacccgggacaaggacagccccccccgggtgctgaaggacaagagcagagatgagggcccccggctgggagatgccaagctgaaggagaagttcaaggatggagctgagaaggagaagggggaccctgtgaagatgagcaatggaaatgacaaggtggcccccagcaaggaccccgggaagaaggatgcccggccccgggagaagctgctgggagatggagacctgatgatgaccagctttgagaggatgctgagccagaaggacctggagattgaggagcggcacaagaggcacaaggagaggatgaagcagatggagaagctgcggcacaggtctggggaccccaagctgaaggagaaggccaagccagcagatgatggcaggaagaagggcctggacatcccagccaagaagcccccaggcctggacccccccttcaaggacaagaagctgaaggagagcacccccatccccccagctgctgagaacaagctgcacccagccagcggggctgacagcaaggactggctggccggcccccacatgaaggaggtgctgcctgccagccccaggccagaccagagccggcccactggagtgcccacccccacctctgtgctgagctgccccagctatgaggaggtgatgcacacccccaggacccccagctgcagcgcagatgattatgctgacctggtgtttgactgtgccgacagccagcacagcacccctgtgcccacagcccccaccagcgcctgcagccccagcttctttgaccgcttctctgtggccagcagcggcctgtctgaaaatgccagccaggccccagcccggcccctgagcaccaacctgtacagatctgtgtctgtggacatccggaggaccccagaggaggagttctctgtgggggacaagctgttccggcagcagagcgtgcctgctgccagcagctatgacagccccatgccacccagcatggaggaccgggcccccctgccccctgtgcctgctgagaagtttgcctgcctgagccctggctactacagcccagactatggcctgcccagccccaaggtggatgccctgcactgccccccagctgctgtggtgacagtgacccccagccctgagggcgtcttcagcagcctgcaggccaagcccagccccagccccagggctgagctgctggtgcccagcctggagggcgccctgcccccagacctggacaccagcgaggaccagcaggccacagctgccatcatccccccagagcccagctacctggagcccctggatgagggccccttctctgctgtgatcacagaggagcctgtggagtgggcccaccccagcgagcaggccctggccagcagcctgattggaggcaccagcgagaaccctgtgtcctggcctgtgggcagtgacctgctgctgaagagcccccagcgcttccctgagagccccaagcgcttctgcccagctgaccccctgcacagcgctgcccctggccccttcagcgccagcgaggccccctacccagcccccccagccagccctgccccctatgccctgcctgtggccgagcccggcctggaggatgtgaaggatggagtggatgctgtgcctgctgccatcagcaccagcgaggccgccccctatgccccacccagcggcctggagagcttcttcagcaactgcaagagcctgcctgaggcccccctggatgtggcccctgagcccgcctgtgtggccgctgtggcccaggtggaggccctgggccccctggagaacagcttcctggatggcagccggggcctgagccacctgggccaggtggagcctgtgccctgggcagatgcctttgctggcccagaagatgacctggacctgggccccttcagcctgcctgagctgcccctgcagaccaaggatgctgctgatggagaggccgagcctgtggaggagagcctggcccctcctgaggagatgcctcctggggcccctggggtcatcaatggaggagatgtgtccacagtggtggccgaggagcccccagccctgcccccagaccaggccagcacccggctgcctgctgagctggagcctgagcccagcggggagcccaagctggatgtggccctggaggccgctgtggaggccgagaccgtgcctgaggagcgggcccggggggaccctgacagctctgtggagcccgcccctgtgcccccagagcagaggcccctgggcagcggggaccagggcgctgaggccgagggccccccagctgccagcctgtgtgccccagatggccctgcccccaacacagtggcccaggcccaggccgcagatggagctggcccagaagatgacacagaggccagcagagctgctgccccagctgagggccccccaggcggcatccagcctgaggccgctgagcccaagcccacagctgaggcccccaaggccccccgggtggaggagatcccccagaggatgaccaggaacagagcccagatgctggccaaccagagcaagcagggccccccaccttctgagaaggaatgtgcccccaccccagcccctgtgacccgggccaaggcccggggctctgaagatgatgatgcccaggcccagcaccccaggaagaggcgcttccagaggagcacccagcagctgcagcagcagctgaacaccagcacccagcagacccgggaggtgatccagcagaccctggccgccatcgtggatgccatcaagctggatgccatcgagccctaccacagcgaccgggccaacccctactttgagtacctgcagatcaggaagaagattgaggagaagaggaagatcctgtgctgcatcaccccccaggccccccagtgctacgcagaatatgtgacctacacaggcagctacctgctggatggcaagcccctgagcaagctgcacatccctgtgattgcccccccacccagcctggccgagcccctgaaggagctgttccggcagcaggaggccgtgcggggcaagctgcggctgcagcacagcattgagcgggagaagctgattgtgtcctgtgagcaggagatcctgcgggtgcactgcagagctgcccggaccatcgccaaccaggccgtgcccttcagcgcctgcaccatgctgctggacagcgaggtgtacaacatgcccctggagagccagggagatgagaacaagtctgtgcgggaccgcttcaatgcccggcagttcatctcctggctgcaggatgtggatgacaagtatgacaggatgaagacctgcctgctgatgaggcagcagcatgaagctgctgccctgaatgctgtgcagaggatggagtggcagctgaaggtgcaggagctggaccctgctggccacaagagcctgtgtgtgaatgaggtgcccagcttctacgtgcccatggtggatgtgaatgatgactttgtgctgctgcctgcctag

SEQ ID NO: 143679 - DNA, 1836 bp, synthetic construct
  misc_feature 1..1836: note = Description of Artificial Sequence: Synthetic coding sequence
  source 1..1836: mol_type = other DNA
tccatccccaagatggaggtgaagagctacaccaagaacaacaccatcgcccccaagaaggccagccaccgcatcctgagtgacaccagtgatgaagaagatgcctctgtgacagtgggcactggagagaagctgcggctgagcgcccacaccatcctgcccggcagcaagacccgggagcccagcaatgccaagcagcagaaggagaagaacaaggtgaagaagaagaggaagaaggagaccaagggccgggaggtgcgctttgggaagagaagtgacaagttctgcagcagcgagagcgagagcgagagcagcgagagcggagaagatgaccgggacagcctgggcagcagcggctgcctgaagggcagccccctggtgctgaaggaccccagcctcttcagcagcctgagcgccagcagcaccagcagccacggcagcagcgctgcccagaagcagaaccccagccacacagaccagcacaccaagcactggaggacagacaactggaagaccatcagcagccctgcctggagcgaggtgagcagcctgagtgacagcaccaggacccggctgaccagcgagagtgactacagcagcgagggcagctctgtggagagcctgaagcctgtgaggaagaggcaggagcacaggaagagggccagcctgtctgagaagaagagccccttcctgagcagcgctgagggcgctgtgcccaagctggacaaggagggcaaggtggtgaagaagcacaagaccaagcacaagcacaagaacaaggagaagggccagtgcagcatcagccaggagctgaagctgaagagcttcacctatgaatatgaggacagcaagcagaagagtgacaaggccatcctgctggagaatgacctgagcacagagaacaagctgaaggtgctgaagcatgaccgggaccacttcaagaaggaggagaagctgagcaagatgaagctggaggagaaggagtggctgttcaaggatgagaagagcctgaagaggatcaaggacaccaacaaggacatcagccgctccttccgggaggagaaggacaggagcaacaaggccgagaaggagaggagcctgaaggagaagagccccaaggaggagaagctgcggctgtacaaggaggagaggaagaagaagagcaaggaccggcccagcaagctggagaagaagaatgacctgaaggaggacaagatcagcaaggagaaggagaagatcttcaaggaggacaaggagaagctgaagaaggagaaggtgtacagagaagattctgcctttgatgagtactgcaacaagaaccagttcctggagaatgaagacaccaagttcagcctgagtgatgaccagagggaccgctggttcagtgacctgagtgacagcagctttgacttcaagggggaggacagctgggacagccctgtgacagactacagagacatgaagagtgacagcgtggccaagctgatcctggagaccgtgaaggaggacagcaaggagcggcggcgggacagccgggcccgggagaagagggactaccgggagcccttcttcaggaagaaggaccgggactacctggacaagaacagcgagaagaggaaggagcagacagagaagcacaagtctgtgcccggctacctgtctgagaagcatgaaagaagaagaagaaggatggcccccatcagaaaaggaagaagacggcagaaccagaaggacaccaagagaaatcctgtgaccaggaccaaggtgaggaaccagagctggaagaatgtgcggaggaccaagaacctgatcaacgtgctgaagaggaagaagtag

SEQ ID NO: 143680 - DNA, 7992 bp, synthetic construct; identical to SEQ ID NO: 143678
  misc_feature 1..7992: note = Description of Artificial Sequence: Synthetic coding sequence
  source 1..7992: mol_type = other DNA

SEQ ID NO: 143681 - DNA, 1317 bp, synthetic construct
  misc_feature 1..1317: note = Description of Artificial Sequence: Synthetic coding sequence
  source 1..1317: mol_type = other DNA
tctgctggccgggtgaatgaagatagagtgcgcagcaggaccatgcccaagggcggctgccccaaggccccccagcaggaggagctgcccctgagcagtgacatggtggagaagcagacaggcaagaaggacaaggacaaggtgtccctgaccaagacccccaagctggagagaggagatggcggcaaggaggtgcgggagcgggccagcaagaggaagctgcccttcaccgctggggccaatggagagcagaaggacagcgacacagagaagcagggccctgagaggaagaggatcaagaaggagcctgtgaccaggaaggccggcctgctgtttggcatgggcctgagcggcatccgggccggctaccccctgtctgagcggcagcaggtggccctgctgatgcagatgacagctgaggagagcgccaacagccctgtggacaccacccccaagcaccccagccagagcacagtgtgccagaagggcacccccaacagcgccagcaagaccaaggacaaggtgaacaagagaaatgaaagaggagagacccggctgcacagagctgccatcagaggagatgcccggcgcatcaaggagctgatcagcgagggcgcagatgtgaatgtgaaggactttgctggctggacagccctgcacgaggcctgcaacagaggctactatgatgtggccaagcagctgctggccgccggggctgaggtgaacaccaagggcctggatgatgacacccccctgcatgatgctgccaacaacggccactacaaggtggtgaagctgctgctgcgctatggaggcaacccccagcagagcaacaggaagggggagacccccctgaaggtggccaacagccccaccatggtgaacctgctgctgggcaagggcacctacaccagcagcgaggagagcagcacagagagcagcgaggaggaggatgcccccagctttgcccccagcagctctgtggatggcaacaacacagattctgaatttgagaagggcctgaagcacaaggccaagaaccctgagccccagaaggccacagcccctgtgaaggatgaatatgaatttgatgaagatgatgagcaggacagagtgccccctgtggatgacaagcacctgctgaagaaggactacaggaaggagaccaagagcaacagcttcatcagcatccccaagatggagaaggtgaccctgaagatcacccggctgcaccagaggaagaggcccatcgtgtcctgccagaccaggaggaccaggaggaccagggtgagcccctggggccaggagaggagctag

SEQ ID NO: 143682 - DNA, 6189 bp, synthetic construct
  misc_feature 1..6189: note = Description of Artificial Sequence: Synthetic coding sequence
  source 1..6189: mol_type = other DNA
atgcccaagagcggcttcaccaagcccatccagagtgaaaattctgacagcgacagcaacatggtggagaagccctacggcaggaagagcaaggacaagatcgccagctacagcaagacccccaagattgaaagaagtgatgtgtccaaggagatgaaggagaagagctccatgaagaggaagctgcccttcaccatcagccccagcagaaatgaggagcgggacagcgacacagacagcgaccccggccacaccagcgagaactggggcgagcggctcatcagcagctaccgcacctacagcgagaaggagggccctgagaagaagaagaccaagaaggaggccggcaacaagaagagcacccctgtgtccatcctgtttggctaccccctgtctgagaggaagcagatggccctgctgatgcagatgacagcccgggacaacagcccagacagcacccccaaccaccccagccagaccaccccagcccagaagaagacccccagcagcagcagccggcagaaggacaaggtgaacaagagaaatgaaagaggagagacccccctgcacatggccgccatcagaggagatgtgaagcaggtgaaggagctgatcagcctgggcgccaacgtgaatgtgaaggactttgctggctggacccccctgcacgaggcctgcaatgtgggctactatgatgtggccaagatcctgattgctgctggagcagatgtgaacacccagggcctggatgatgacacccccctgcatgacagcgccagcagcggccaccgggacatcgtgaagctgctgctgcggcatggaggcaaccccttccaggccaacaagcatggagagaggcctgtggatgtggccgagacagaggagctggagctgctgctgaagcgggaggtgcccctgagtgatgatgatgagagctacacagacagcgaggaggcccagagcgtgaaccccagctctgtggatgaaaatattgattctgaaacagagaaggacagcctcatctgtgagagcaagcagatcctgcccagcaagacccccctgcccagcgccctggatgaatatgagttcaaggatgatgatgatgaggagatcaacaagatgattgatgacagacacatcctgaggaaggagcagaggaaagaaaatgaacctgaggccgagaagacccacctgtttgccaagcaggagaaggccttctaccccaagagcttcaagagcaagaagcagaagcccagccgggtgctgtacagcagcacagagagcagtgatgaggaggccctgcagaacaagaagatcagcaccagctgcagcgtcatccctgagaccagcaacagcgacatgcagaccaagaaggagtatgtggtgtctggagagcacaagcagaagggcaaggtgaagaggaagctgaagaaccagaacaagaacaaggagaaccaggagctgaagcaggagaaggagggcaaggagaacacccgcatcaccaacctgactgtgaacacaggcctggactgcagcgagaagacccgggaggagggcaacttcaggaagagcttcagccccaaggatgacaccagcctgcacctgttccacatcagcacaggcaagagccccaagcacagctgtggcctgtctgagaagcagagcacccccctgaagcaggagcacaccaagacctgcctgagccctggcagcagcgagatgagcctgcagcctgacctggtgcgctatgacaacacagagagcgagttcctgcctgagagcagctctgtgaagagctgcaagcacaaggagaagagcaagcaccagaaggacttccacctggagtttggagagaagagcaatgccaagatcaaggatgaggaccacagccccacctttgagaacagcgactgcaccctgaagaagatggacaaggagggcaagaccctgaagaagcacaagctgaagcacaaggagcgggagaaggagaagcacaagaaggagattgaaggagagaaggagaagtacaagaccaaggacagcgccaaggagctgcagaggtctgtggagtttgaccgggagttctggaaggagaacttcttcaagagtgatgaaacagaagatctcttcctgaacatggagcacgagagcctgaccctggagaagaagagcaagctggagaagaacatcaaggatgacaagagcaccaaggagaagcacgtgtccaaggagaggaacttcaaggaggagcgggacaagatcaagaaggagagcgagaagagcttccgggaggagaagatcaaggacctgaaggaggagcgggagaacatccccacagacaaggacagcgagttcaccagcctgggcatgtctgccatcgaggagagcatcggcctgcacctggtggagaaggagattgacatcgagaagcaggagaagcacatcaaggagagcaaggagaagccagagaagaggagccagatcaaggagaaggacatcgagaagatggagaggaagacctttgagaaggagaagaagatcaagcatgagcacaagtctgagaaggacaagctggacctgtctgaatgtgtggacaagatcaaggagaaggacaagctgtacagccaccacacagagaagtgccacaaggagggggagaagagcaagaacacagctgccatcaagaagacagatgaccgggagaagagccgggagaagatggacaggaagcatgacaaggagaagccagagaaggagcggcacctggccgagagcaaggagaagcacctgatggagaagaagaacaagcagagcgacaacagcgagtacagcaagtctgagaagggcaagaacaaggagaaggaccgggagctggacaagaaggagaagagccgggacaaggagagcatcaacatcaccaacagcaagcacatccaggaggagaagaagagcagcatcgtggatggcaacaaggcccagcacgagaagcccctgagcctgaaggagaagaccaaggatgagcccctgaagaccccagatggcaaggagaaggacaagaaggacaaggacatcgaccgctacaaggagcgggacaagcacaaggacaagatccagatcaacagcctgctgaagctgaagtctgaggccgacaagcccaagcccaagagcagccctgccagcaaggacacccggcccaaggagaagaggctggtgaatgatgacctgatgcagaccagctttgagaggatgctgagcctgaaggacctggagattgagcagtggcacaagaagcacaaggagaagatcaagcagaaggagaaggagcggctgaggaacagaaactgcctggagctgaagatcaaggacaaggagaagaccaagcacacccccacagagagcaagaacaaggagctgaccaggagcaagagcagcgaggtgacagatgcctacaccaaggagaagcagcccaaggatgctgtgagcaacagaagccagagcgtggacaccaagaatgtgatgaccctgggcaagagcagctttgtgtctgacaacagcctgaacagaagccccaggagtgaaaatgagaagccaggcctgagcagccgctctgtgtccatgatctctgtggccagcagcgaggacagctgccacaccaccgtgaccacccccaggcctcctgtggagtatgacagcgacttcatgctggagagcagcgagagccagatgtccttcagccagagccccttcctgagcatcgccaagagccctgccctgcacgagcgggagctggacagcctggccgacctgcctgagcgcatcaagccaccctatgccaaccggctgagcaccagccacctgcggagcagctctgtggaggatgtgaagctgatcatcagcgagggccggcccaccatcgaggtgcggcgctgcagcatgcccagcgtcatctgtgagcacaccaagcagttccagaccatcagcgaggagagcaaccagggcagcctgctgactgtgcctggggacaccagccccagccccaagccagaggtgttcagcaatgtgcctgagcgggacctgagcaatgtgagcaacatccacagcagctttgccaccagccccaccggggccagcaacagcaaatatgtgtctgctgacaggaacctgatcaagaacacagcccctgtgaacacagtgatggacagccctgtgcacctggagcccagcagccaggtgggcgtcatccagaacaagtcctgggagatgcctgtggaccggctggagaccctgagcacccgggacttcatctgccccaacagcaacatcccagaccaggagagcagcctgcagagcttctgcaacagcgagaacaaggtgctgaaggaaaatgctgacttcctgagcctgcggcagacagagctgcccggcaacagctgtgcccaggaccctgccagcttcatgccaccccagcagccctgcagcttccccagccagagcctgagtgatgctgagagcatcagcaagcacatgagcctgtcctatgtggccaaccaggagcccggcatcctgcagcagaagaatgctgtgcagatcatcagcagcgccctggacacagacaatgaaagcaccaaggacacagagaacacctttgtgctgggagatgtgcagaagacagatgcctttgtgcctgtgtacagcgacagcaccatccaggaggccagccccaactttgagaaggcctacaccctgcctgtgctgcccagcgagaaggacttcaacggcagtgatgccagcacccagctgaacacccactacgccttcagcaagctgacctacaagagcagcagcggccacgaggtggagaacagcaccacagacacccaggtgatcagccatgagaaggagaacaagctggagagcctggtgctgacccacctgagccgctgtgacagcgacctgtgtgagatgaatgccggcatgcccaagggcaacctgaatgagcaggaccccaagcactgcccagagagcgagaagtgcctgctgagcattgaagatgaggagagccagcagagcatcctgagcagcctggagaaccacagccagcagagcacccagcctgagatgcacaagtatggccagctggtgaaggtggagctggaggagaatgcagaagatgacaagacagagaaccagatcccccagaggatgaccaggaacaaggccaacaccatggccaaccagagcaagcagatcctggccagctgcaccctgctgtctgagaaggacagcgagagcagcagcccccggggccgcatccggctgacagaagatgatgacccccagatccaccaccccaggaagaggaaggtgtcccgggtgccccagcctgtgcaggtgagccccagcctgctgcaggccaaggagaagacccagcagagcctggccgccatcgtggacagcctgaagctggatgagatccagccctacagcagcgagcgggccaacccctactttgagtacctgcacatcaggaagaagattgaggagaagaggaagctgctgtgcagcgtcatcccccaggccccccagtactatgatgaatatgtgaccttcaacggcagctacctgctggatggcaaccccctgagcaagatctgcatccccaccatcaccccaccacccagcctgagtgaccccctgaaggagctgttccggcagcaggaggtggtgaggatgaagctgcggctgcagcacagcattgagcgggagaagctgattgtgtccaatgagcaggaggtgctgcgggtgcactacagagctgcccggaccctggccaaccagaccctgcccttcagcgcctgcaccgtgctgctggatgctgaggtgtacaacgtgcccctggacagccagagtgatgacagcaagacctctgtgcgggaccgcttcaatgcccggcagttcatgtcctggctgcaggatgtggatgacaagtttgacaagctgaagacctgcctgctgatgaggcagcagcacgaggccgccgccctgaatgctgtgcagaggctggagtggcagctgaagctgcaggagctggaccctgccacctacaagagcatcagcatctatgagatccaggagttctacgtgcccctggtggatgtgaatgatgactttgagctgacccccatctag

SEQ ID NO: 143683 - DNA, 1317 bp, synthetic construct
  misc_feature 1..1317: note = Description of Artificial Sequence: Synthetic coding sequence
  source 1..1317: mol_type = other DNA
atggtgaatgtgcctgagctgctgctgggccagagccccagcagaaatgacaccaagatcatcaacagcgaggaggcccagagcgtgaaccccagctctgtggatgagaacatcgacagcgagacagagaaggacagcctcatctgtgagagcaagcagatcctgcccagcaagacccccctgcccagcgccctggatgaatatgagttcaaggatgatgatgatgaggagatcaacaagatgattgatgacagacacatcctgaggaaggagcagaggaaagaaaatgaacctgaggccgagaagacccacctgtttgccaagcaggagaaggccttctaccccaagagcttcaagagcaagaagcagaagcccagccgggtgctgtacagcagcacagagagcagtgatgaggaggccctgcagaacaagaagatcagcaccagctgcagcgtcatccctgagaccagcaacagcgacatgcagaccaagaaggagtatgtggtgtctggagagcacaagcagaagggcaaggtgaagaggaagctgaagaaccagaacaagaacaaggagaaccaggagctgaagcaggagaaggagggcaaggagaacacccgcatcaccaacctgactgtgaacacaggcctggactgcagcgagaagacccgggaggagggcaacttcaggaagagcttcagccccaaggatgacaccagcctgcacctgttccacatcagcacaggcaagagccccaagcacagctgtggcctgtctgagaagcagagcacccccctgaagcaggagcacaccaagacctgcctgagccctggcagcagcgagatgagcctgcagcctgacctggtgcgctatgacaacacagaaagtgagttcctgcctgagagcagctctgtgaagagctgcaagcacaaggagaagagcaagcaccagaaggacttccacctggagtttggagagaagagcaatgccaagatcaaggatgaggaccacagccccacctttgaaaattctgactgcaccctgaagaagatggacaaggagggcaagaccctgaagaagcacaagctgaagcacaaggagcgggagaaggagaagcacaagaaggagattgaaggagagaaggagaagtacaagaccaaggacagcgccaaggagctgcagaggtctgtggagtttgaccgggagttctggaaggagaacttcttcaagagtgatgaaacagaggacctcttcctgaacatggagcacgagagcctgaccctggagaagatcaagattggcaagaagcaccagaggtag

SEQ ID NO: 143684 - DNA, 6120 bp, synthetic construct
  misc_feature 1..6120: note = Description of Artificial Sequence: Synthetic coding sequence
  source 1..6120: mol_type = other DNA
atgcccaagagcggcttcaccaagcccatccagagtgaaaattctgacagcgacagcaacatggtggagaagccctacggcaggaagagcaaggacaagatcgccagctacagcaagacccccaagattgaaagaagtgatgtgtccaaggagatgaaggagaagagctccatgaagaggaagctgcccttcaccatcagccccagcagaaatgaggagcgggacagcgacacagagaaggagggccctgagaagaagaagaccaagaaggaggccggcaacaagaagagcacccctgtgtccatcctgtttggctaccccctgtctgagaggaagcagatggccctgctgatgcagatgacagcccgggacaacagcccagacagcacccccaaccaccccagccagaccaccccagcccagaagaagacccccagcagcagcagccggcagaaggacaaggtgaacaagagaaatgaaagaggagagacccccctgcacatggccgccatcagaggagatgtgaagcaggtgaaggagctgatcagcctgggcgccaacgtgaatgtgaaggactttgctggctggacccccctgcacgaggcctgcaatgtgggctactatgatgtggccaagatcctgattgctgctggagcagatgtgaacacccagggcctggatgatgacacccccctgcatgattctgccagcagcggccaccgggacatcgtgaagctgctgctgcggcacggcggcaaccccttccaggccaacaagcacggggagaggcctgtggatgtggccgagacagaggagctggagctgctgctgaagcgggaggtgcccctgagtgatgatgatgagagctacacagattctgaggaggcccagagcgtgaaccccagctctgtggatgagaacatcgacagcgagacagagaaggacagcctcatctgtgagagcaagcagatcctgcccagcaagacccccctgcccagcgccctggatgaatatgagttcaaggatgatgatgatgaggagatcaacaagatgattgatgacagacacatcctgaggaaggagcagaggaaagaaaatgaacctgaggccgagaagacccacctgtttgccaagcaggagaaggccttctaccccaagagcttcaagagcaagaagcagaagcccagccgggtgctgtacagcagcacagagagcagtgatgaggaggccctgcagaacaagaagatcagcaccagctgcagcgtcatccctgagaccagcaacagcgacatgcagaccaagaaggagtatgtggtgtctggagagcacaagcagaagggcaaggtgaagaggaagctgaagaaccagaacaagaacaaggagaaccaggagctgaagcaggagaaggagggcaaggagaacacccgcatcaccaacctgactgtgaacacaggcctggactgcagcgagaagacccgggaggagggcaacttcaggaagagcttcagccccaaggatgacaccagcctgcacctgttccacatcagcacaggcaagagccccaagcacagctgtggcctgtctgagaagcagagcacccccctgaagcaggagcacaccaagacctgcctgagccctggcagcagcgagatgagcctgcagcctgacctggtgcgctatgacaacacagaaagtgagttcctgcctgagagcagctctgtgaagagctgcaagcacaaggagaagagcaagcaccagaaggacttccacctggagtttggagagaagagcaatgccaagatcaaggatgaggaccacagccccacctttgaaaattctgactgcaccctgaagaagatggacaaggagggcaagaccctgaagaagcacaagctgaagcacaaggagcgggagaaggagaagcacaagaaggagattgaaggagagaaggagaagtacaagaccaaggacagcgccaaggagctgcagaggtctgtggagtttgaccgggagttctggaaggagaacttcttcaagagtgatgaaacagaggacctcttcctgaacatggagcacgagagcctgaccctggagaagaagagcaagctggagaagaacatcaaggatgacaagagcaccaaggagaagcacgtgtccaaggagaggaacttcaaggaggagcgggacaagatcaagaaggagagcgagaagagcttccgggaggagaagatcaaggacctgaaggaggagcgggagaacatccccacagacaaggacagcgagttcaccagcctgggcatgtctgccatcgaggagagcatcggcctgcacctggtggagaaggagattgatattgagaagcaggagaagcacatcaaggagagcaaggagaagccagagaagaggagccagatcaaggagaaggacatcgagaagatggagaggaagacctttgagaaggagaagaagatcaagcatgagcacaagtctgagaaggacaagctggacctgtctgaatgtgtggacaagatcaaggagaaggacaagctgtacagccaccacacagagaagtgccacaaggagggggagaagagcaagaacacagctgccatcaagaagacagatgaccgggagaagagccgggagaagatggacaggaagcatgacaaggagaagccagagaaggagcggcacctggccgagagcaaggagaagcacctgatggagaagaagaacaagcagagcgacaacagcgagtacagcaagtctgagaagggcaagaacaaggagaaggaccgggagctggacaagaaggagaagagccgggacaaggagagcatcaacatcaccaacagcaagcacatccaggaggagaagaagagcagcatcgtggatggcaacaaggcccagcacgagaagcccctgagcctgaaggagaagaccaaggatgagcccctgaagaccccagatggcaaggagaaggacaagaaggacaaggacatcgaccgctacaaggagcgggacaagcacaaggacaagatccagatcaacagcctgctgaagctgaagtctgaggccgacaagcccaagcccaagagcagccctgccagcaaggacacccggcccaaggagaagaggctggtgaatgatgacctgatgcagaccagctttgagaggatgctgagcctgaaggacctggagattgagcagtggcacaagaagcacaaggagaagatcaagcagaaggagaaggagcggctgaggaacagaaactgcctggagctgaagatcaaggacaaggagaagaccaagcacacccccacagagagcaagaacaaggagctgaccaggagcaagagcagcgaggtgacagatgcctacaccaaggagaagcagcccaaggatgctgtgagcaacagaagccagagcgtggacaccaagaatgtgatgaccctgggcaagagcagctttgtgtctgacaacagcctgaacagaagccccaggagtgaaaatgagaagccaggcctgagcagccgctctgtgtccatgatctctgtggccagcagcgaggacagctgccacaccaccgtgaccaccccccggccccctgtggagtatgacagcgacttcatgctggagagcagcgagagccagatgtccttcagccagagccccttcctgagcatcgccaagagccctgccctgcacgagcgggagctggacagcctggccgacctgcctgagcgcatcaagccaccctatgccaaccggctgagcaccagccacctgcggagcagctctgtggaggatgtgaagctgatcatcagcgagggccggcccaccatcgaggtgcggcgctgcagcatgcccagcgtcatctgtgagcacaccaagcagttccagaccatcagcgaggagagcaaccagggcagcctgctgactgtgcctggggacaccagccccagccccaagccagaggtgttcagcaatgtgcctgagcgggacctgagcaatgtgagcaacatccacagcagctttgccaccagccccactggagccagcaacagcaaatatgtgtctgctgacaggaacctgatcaagaacacagcccctgtgaacacagtgatggacagccctgtgcacctggagcccagcagccaggtgggcgtcatccagaacaagtcctgggagatgcctgtggaccggctggagaccctgagcacccgggacttcatctgccccaacagcaacatcccagaccaggagagcagcctgcagagcttctgcaacagcgagaacaaggtgctgaaggaaaatgctgacttcctgagcctgcggcagacagagctgcccggcaacagctgtgcccaggaccctgccagcttcatgccaccccagcagccctgcagcttccccagccagagcctgagtgatgctgagagcatcagcaagcacatgagcctgtcctatgtggccaaccaggagcccggcatcctgcagcagaagaatgctgtgcagatcatcagcagcgccctggacacagacaatgaaagcaccaaggacacagagaacacctttgtgctgggagatgtgcagaagacagatgcctttgtgcctgtgtacagcgacagcaccatccaggaggccagccccaactttgagaaggcctacaccctgcctgtgctgcccagcgagaaggacttcaatggaagtgatgccagcacccagctgaacacccactacgccttcagcaagctgacctacaagagcagcagcggccacgaggtggagaacagcaccacagacacccaggtgatcagccatgagaaggagaacaagctggagagcctggtgctgacccacctgagccgctgtgacagcgacctgtgtgagatgaatgccggcatgcccaagggcaacctgaatgagcaggaccccaagcactgcccagagagcgagaagtgcctgctgagcattgaagatgaggagagccagcagagcatcctgagcagcctggagaaccacagccagcagagcacccagcctgagatgcacaagtatggccagctggtgaaggtggagctggaggagaatgcagaagatgacaagacagagaaccagatcccccagaggatgaccaggaacaaggccaacaccatggccaaccagagcaagcagatcctggccagctgcaccctgctgtctgagaaggacagcgagagcagcagcccccggggccgcatccggctgacagaagatgatgacccccagatccaccaccccaggaagaggaaggtgtcccgggtgccccagcctgtgcaggtgagccccagcctgctgcaggccaaggagaagacccagcagagcctggccgccatcgtggacagcctgaagctggatgagatccagccctacagcagcgagcgggccaacccctactttgagtacctgcacatcaggaagaagattgaggagaagaggaagctgctgtgcagcgtcatcccccaggccccccagtactatgatgaatatgtgaccttcaacggcagctacctgctggatggcaaccccctgagcaagatctgcatccccaccatcaccccaccacccagcctgagtgaccccctgaaggagctgttccggcagcaggaggtggtgaggatgaagctgcggctgcagcacagcattgaaagagagaagctgattgtgtccaatgagcaggaggtgctgcgggtgcactaccgggccgcccggaccctggccaaccagaccctgcccttcagcgcctgcaccgtgctgctggatgctgaggtgtacaacgtgcccctggacagccagagtgatgacagcaagacctctgtgcgggaccgcttcaatgcccggcagttcatgtcctggctgcaggatgtggatgacaagtttgacaagctgaagacctgcctgctgatgaggcagcagcatgaagctgctgccctgaatgctgtgcagaggctggagtggcagctgaagctgcaggagctggaccctgccacctacaagagcatcagcatctatgagatccaggagttctacgtgcccctggtggatgtgaatgatgactttgagctgacccccatctag

SEQ ID NO: 143685 - DNA, 372 bp, synthetic construct
  misc_feature 1..372: note = Description of Artificial Sequence: Synthetic coding sequence
  source 1..372: mol_type = other DNA
acagaggacctcttcctgaacatggagcacgagagcctgaccctggagaagaagagcaagctggagaagaacatcaaggatgacaagagcaccaaggagaagcacgtgtccaaggagaggaacttcaaggaggagcgggacaagatcaagaaggagagcgagaagagcttccgggagggcatgtctgccatcgaggagagcatcggcctgcacctggtggagaaggagattgatattgagaagcaggagaagcacatcaaggagagcaaggagaagccagagaagaggagccagatcaaggagaaggacatcgagaagatggagaggaagacctttgagaagggcaccagctacatccgcatcacccagtag

SEQ ID NO: 143686 - DNA, 993 bp, synthetic construct
  misc_feature 1..993: note = Description of Artificial Sequence: Synthetic coding sequence
  source 1..993: mol_type = other DNA
atgcccaagagcggcttcaccaagcccatccagagtgaaaattctgacagcgacagcaacatggtggagaagccctacggcaggaagagcaaggacaagatcgccagctacagcaagacccccaagattgaaagaagtgatgtgtccaaggagatgaaggagaagagctccatgaagaggaagctgcccttcaccatcagccccagcagaaatgaggagcgggacagcgacacagacagcgaccccggccacaccagcgagaactggggcgagcggctcatcagcagctaccgcacctacagcgagaaggagggccctgagaagaagaagaccaagaaggaggccggcaacaagaagagcacccctgtgtccatcctgtttggctaccccctgtctgagaggaagcagatggccctgctgatgcagatgacagcccgggacaacagcccagacagcacccccaaccaccccagccagaccaccccagcccagaagaagacccccagcagcagcagccggcagaaggacaaggtgaacaagagaaatgaaagaggagagacccccctgcacatggccgccatcagaggagatgtgaagcaggtgaaggagctgatcagcctgggcgccaacgtgaatgtgaaggactttgctggctggacccccctgcacgaggcctgcaatgtgggctactatgatgtggccaagatcctgattgctgctggagcagatgtgaacacccagggcctggatgatgacacccccctgcatgacagcgccagcagcggccaccgggacatcgtgaagctgctgctgcggcatggaggcaaccccttccaggccaacaagcatggagagaggcctgtggatgtggccgagacagaggagctggagctgctgctgaagcgggaggtgcccctgagtgatgatgatgagagctacacaggcagcagctaccagtttgctggaaatgccaagctgagcggggccagctag

SEQ ID NO: 143687 - DNA, 1116 bp, synthetic construct
  misc_feature 1..1116: note = Description of Artificial Sequence: Synthetic coding sequence
  source 1..1116: mol_type = other DNA
atgcccaagagcggcttcaccaagcccatccagagtgaaaattctgacagcgacagcaacatggtggagaagccctacggcaggaagagcaaggacaagatcgccagctacagcaagacccccaagattgaaagaagtgatgtgtccaaggagatgaaggagaagagctccatgaagaggaagctgcccttcaccatcagccccagcagaaatgaggagcgggacagcgacacagagaaggagggccctgagaagaagaagaccaagaaggaggccggcaacaagaagagcacccctgtgtccatcctgtttggctaccccctgtctgagaggaagcagatggccctgctgatgcagatgacagcccgggacaacagcccagacagcacccccaaccaccccagccagaccaccccagcccagaagaagacccccagcagcagcagccggcagaaggacaaggtgaacaagagaaatgaaagaggagagacccccctgcacatggccgccatcagaggagatgtgaagcaggtgaaggagctgatcagcctgggcgccaacgtgaatgtgaaggactttgctggctggacccccctgcacgaggcctgcaatgtgggctactatgatgtggccaagatcctgattgctgctggagcagatgtgaacacccagggcctggatgatgacacccccctgcatgattctgccagcagcggccaccgggacatcgtgaagctgctgctgcggcacggcggcaaccccttccaggccaacaagcacggggagaggcctgtggatgtggccgagacagaggagctggagctgctgctgaagcgggaggtgcccctgagtgatgatgatgagagctacacagattctgaggaggcccagagcgtgaaccccagctctgtggatgagaacatcgacagcgagacagagaaggacagcctcatctgtgagagcaagcagatcctgcccagcaagacccccctgcccagcgccctggatgaatatgagttcaaggatgatgatgatgaggagatcaacaagatgattgatgacagacacatcctgaggaaggagcagaggaagaagaagaggaaggagaagaagtag

SEQ ID NO: 143688 - DNA, 984 bp, synthetic construct
  misc_feature 1..984: note = Description of Artificial Sequence: Synthetic coding sequence
  source 1..984: mol_type = other DNA
atggccaaggcccccagctgggccggcgtgggcgccctggcctacaaggcccctgaggccctgtggccagctgaggccgtgatggatggcaccatggaggacagcgaggccgtgcagagggccacagccctgattgagcagaggctggcccaggaggaggagaatgagaagctgcggggagatgcccggcagaagctgcccatggacctgctggtgctggaggatgagaagcaccacggggcccagagcgctgccctgcagaaggtgaagggccaggagcgggtgaggaagaccagcctggacctgcggcgggagatcattgatgtgggcggcatccagaacctgattgagctgaggaagaagaggaagcagaagaagagagatgccctggccgccagccatgagcccccacctgagcctgaggagatcaccggccctgtggatgaggagaccttcctgaaggctgctgtggagggcaagatgaaggtgattgagaagttcctggctgatggcggcagcgctgacacctgtgaccagttcagaagaacagccctgcaccgggccagcctggagggccacatggagatcctggagaagctgctggacaatggagccaccgtggacttccaggaccggctggactgcacagccatgcactgggcctgccggggcggccacctggaggtggtgaagctgctgcagagccacggggctgacaccaacgtgcgggacaaggagggggacacagccctgcatgatgctgtgcggctgaaccgctacaagatcatcaagctgctgctgctgcatggagctgacatgatgaccaagaacctggccggcaagacccccacagacctggtgcagctgtggcaggccgacaccaggcatgccctggagcaccctgagcctggagctgagcacaacggcctggagggccccaatgacagcggccgggagaccccccagcctgtgcctgcccagtag

SEQ ID NO: 143689 - DNA, 1083 bp, synthetic construct
  misc_feature 1..1083: note = Description of Artificial Sequence: Synthetic coding sequence
  source 1..1083: mol_type = other DNA
atggccaaggcccccagctgggccggcgtgggcgccctggcctacaaggcccctgaggccctgtggccagctgaggccgtgatggatggcaccatggaggacagcgaggccgtgcagagggccacagccctgattgagcagaggctggcccaggaggaggagaatgagaagctgcggggagatgcccggcagaagctgcccatggacctgctggtgctggaggatgagaagcaccacggggcccagagcgctgccctgcagaaggtgaagggccaggagcgggtgaggaagaccagcctggacctgcggcgggagatcattgatgtgggcggcatccagaacctgattgagctgaggaagaagaggaagcagaagaagagagatgccctggccgccagccatgagcccccacctgagcctgaggagatcaccggccctgtggatgaggagaccttcctgaaggctgctgtggagggcaagatgaaggtgattgagaagttcctggctgatggcggcagcgctgacacctgtgaccagttcagaagaacagccctgcaccgggccagcctggagggccacatggagatcctggagaagctgctggacaatggagccaccgtggacttccaggaccggctggactgcacagccatgcactgggcctgccggggcggccacctggaggtggtgaagctgctgcagagccacggggctgacaccaacgtgcgggacaagctgctgagcacccccctgcacgtggccgtgaggacaggccaggtggagatcgtggagcacttcctgagcctgggcctggagatcaatgcccgggaccgggagggggacacagccctgcatgatgctgtgcggctgaaccgctacaagatcatcaagctgctgctgctgcacggggctgacatgatgaccaagaacctggccggcaagacccccacagacctggtgcagctgtggcaggccgacaccaggcatgccctggagcaccctgagcccggggctgagcacaacggcctggagggccccaatgattctggccgggagaccccccagcctgtgcctgcccagtag

SEQ ID NO: 143690 - DNA, 1002 bp, synthetic construct
  misc_feature 1..1002: note = Description of Artificial Sequence: Synthetic coding sequence
  source 1..1002: mol_type = other DNA
atggatggcaccatggaggacagcgaggccgtgcagagggccacagccctgattgagcagaggctggcccaggaggaggagaatgagaagctgcggggagatgcccggcagaagctgcccatggacctgctggtgctggaggatgagaagcaccacggggcccagagcgctgccctgcagaaggtgaagggccaggagcgggtgaggaagaccagcctggacctgcggcgggagatcattgatgtgggcggcatccagaacctgattgagctgaggaagaagaggaagcagaagaagagagatgccctggccgccagccatgagcccccacctgagcctgaggagatcactggacctgtggatgaggagaccttcctgaaggctgctgtggagggcaagatgaaggtgattgagaagttcctggctgatggcggcagcgctgacacctgtgaccagttccggaggacagccctgcaccgggccagcctggagggccacatggagatcctggagaagctgctggacaacggggccaccgtggacttccaggaccggctggactgcacagccatgcactgggcctgccggggcggccacctggaggtggtgaagctgctgcagagccatggagctgacaccaacgtgcgggacaagctgctgagcacccccctgcacgtggccgtgaggacaggccaggtggagatcgtggagcacttcctgagcctgggcctggagatcaatgcccgggaccgggagggggacacagccctgcatgatgctgtgcggctgaaccgctacaagatcatcaagctgctgctgctgcatggagctgacatgatgaccaagaacctggccggcaagacccccacagacctggtgcagctgtggcaggccgacaccaggcatgccctggagcaccctgagcctggagctgagcacaacggcctggagggccccaatgacagcggccgggagaccccccagcctgtgcctgcccagtag

SEQ ID NO: 143691 - DNA, 903 bp, synthetic construct
  misc_feature 1..903: note = Description of Artificial Sequence: Synthetic coding sequence
  source 1..903: mol_type = other DNA
atggatggcaccatggaggacagcgaggccgtgcagagggccacagccctgattgagcagaggctggcccaggaggaggagaatgagaagctgcggggagatgcccggcagaagctgcccatggacctgctggtgctggaggatgagaagcaccacggggcccagagcgctgccctgcagaaggtgaagggccaggagcgggtgaggaagaccagcctggacctgcggcgggagatcattgatgtgggcggcatccagaacctgattgagctgaggaagaagaggaagcagaagaagagagatgccctggccgccagccatgagcccccacctgagcctgaggagatcactggacctgtggatgaggagaccttcctgaaggctgctgtggagggcaagatgaaggtgattgagaagttcctggctgatggcggcagcgctgacacctgtgaccagttccggaggacagccctgcaccgggccagcctggagggccacatggagatcctggagaagctgctggacaacggggccaccgtggacttccaggaccggctggactgcacagccatgcactgggcctgccggggcggccacctggaggtggtgaagctgctgcagagccatggagctgacaccaacgtgcgggacaaggagggggacacagccctgcatgatgctgtgcggctgaaccgctacaagatcatcaagctgctgctgctgcacggggctgacatgatgaccaagaacctggccggcaagacccccacagacctggtgcagctgtggcaggccgacaccaggcatgccctggagcaccctgagcccggggctgagcacaacggcctggagggccccaatgattctggccgggagaccccccagcctgtgcctgcccagtag

SEQ ID NO: 143692 - DNA, 918 bp, synthetic construct
  misc_feature 1..918: note = Description of Artificial Sequence: Synthetic coding sequence
  source 1..918: mol_type = other DNA
atggacttcatcagcatccagcagctggtgtctggagagcgggtggagggcaaggtgctgggcttcggccacggcgtgcctgaccccggggcctggcccagcgactggaggcggggcccccaggaggccgtggcccgggagaagctgaagctggaggaggagaagaagaagaagctggagcgcttcaacagcacccgcttcaacctggacaacctggccgacctggagaacctggtgcagaggaggaagaagaggctgcggcaccgggtgccccccaggaagccagagcccctggtgaagccccagagccaggcccaggtggagcctgtgggcctggagatgttcctgaaggctgctgctgagaaccaggagtacctgattgacaagtacctgacagatggaggagaccccaatgcccatgacaagctgcacaggacagccctgcactgggcctgcctgaagggccacagccagctggtgaacaagctgctggtggccggggccaccgtggatgcccgggacctgctggacaggacccctgtgttctgggcctgccggggcggccacctggtgatcctgaagcagctgctgaaccagggcgcccgggtgaatgcccgggacaagattggcagcacccccctgcacgtggccgtgaggaccaggcacccagactgcctggagcacctgattgaatgtggggcccacctgaatgcccaggacaaggagggggacacagccctgcacgaggccgtgagacatggcagctacaaggccatgaagctgctgctgctgtatggagctgagctgggcgtgagaaatgctgcctctgtgacccctgtgcagctggcccgggactggcagaggggcatccgggaggccctgcaggcccacgtggcccaccccaggacccgctgctag

SEQ ID NO: 143693 - DNA, 792 bp, synthetic construct
  misc_feature 1..792: note = Description of Artificial Sequence: Synthetic coding sequence
  source 1..792: mol_type = other DNA
atggacttcatcagcatccagcagctggtgtctggagagcgggtggagggcaaggtgctgggcttcggccacggcgtgcctgaccccggggcctggcccagcgactggaggcggggcccccaggaggccgtggcccgggagaagctgaagctggaggaggagaagaagaagaagctggagcgcttcaacagcacccgcttcaacctggacaacctggccgacctggagaacctggtgcagaggaggaagaagaggctgcggcaccgggtgccccccaggaagccagagcccctggtgaagctgcacaggacagccctgcactgggcctgcctgaagggccacagccagctggtgaacaagctgctggtggccggggccaccgtggatgcccgggacctgctggacaggacccctgtgttctgggcctgccggggcggccacctggtgatcctgaagcagctgctgaaccagggcgcccgggtgaatgcccgggacaagattggcagcacccccctgcacgtggccgtgaggaccaggcacccagactgcctggagcacctgattgaatgtggggcccacctgaatgcccaggacaaggagggggacacagccctgcacgaggccgtgagacatggcagctacaaggccatgaagctgctgctgctgtatggagctgagctgggcgtgagaaatgctgcctctgtgacccctgtgcagctggcccgggactggcagaggggcatccgggaggccctgcaggcccacgtggcccaccccaggacccgctgctag

SEQ ID NO: 143694 - DNA, 918 bp, synthetic construct; identical to SEQ ID NO: 143692
  misc_feature 1..918: note = Description of Artificial Sequence: Synthetic coding sequence
  source 1..918: mol_type = other DNA

SEQ ID NO: 143695 - DNA, 3804 bp, synthetic construct
  misc_feature 1..3804: note = Description of Artificial Sequence: Synthetic coding sequence
  source 1..3804: mol_type = other DNA
atgaaccacatgttccacatcaagaggcacagcatctctgctggaacagatgcctacaagaagaccaagcccatccagaacctcttccagaagcccctgtatgaccactgcagcgccaacaactacaagtccatggagcctgagctggagaatgtgcgcagcagcccccccaggggggacaggaccagcaaggtgtccctgaaggaggagctgcagcaggacatgcagcgcttcaagaatgagatcggcatgctgaaggtggagttccaggccctggagaaggagaaggtgcagctgcagaaggaggtggaggaggagaggaagaagcacagaaataatgagatggaggtgtctgccaacatccatgatggagccacagatgatgctgaagatgatgatgatgatgatggcctcatccagaagaggaagagcggggagacagaccaccagcagttccccaggaaggagaacaaggagtatgccagcagcggccctgccctgcagatgaaggaggtgaagagcacagagaaggagaagaggaccagcaaggagagcgtgaacagccctgtgtttgggaaggccagcctgctgaccggcggcctgctgcaggtggatgatgacagcagcctgtctgaaattgatgaagatgagggccggcccaccaagaagaccagcaatgagaagaacaaggtgaagaaccagatccagagcatggatgatgtggatgacctgacccagagcagcgagacagccagcgaggactgtgagctgccccacagcagctacaagaacttcatgctgctgattgagcagctgggcatggagtgcaaggacagcgtgtccctgctgaagatccaggatgctgccctgagctgtgagcggctgctggagctgaagaagaaccactgtgagctgctgactgtgaagatcaagaagatggaggacaaggtgaatgtgctgcagcgggagctgtctgagaccaaggagatcaagagccagctggagcaccagaaggtggagtgggagcgggagctgtgcagcctgcgcttcagcctgaaccaggaggaggagaagagaagaaatgctgacaccctgtatgagaagatccgggagcagctgcggaggaaggaggagcagtacaggaaggaggtggaggtgaagcagcagctggagctgagcctgcagaccctggagatggagctgaggacagtgaagagcaacctgaaccaggtggtgcaggagagaaatgatgcccagaggcagctgagccgggagcagaatgccaggatgctgcaggacggcatcctgaccaaccacctgagcaagcagaaggagattgagatggcccagaagaagatgaacagcgagaacagccacagccatgaggaggagaaggacctgagccacaagaacagcatgctgcaggaggagatcgccatgctgcggctggagattgacaccatcaagaaccagaaccaggagaaggagaagaagtgctttgaggacctgaagatcgtgaaggagaagaatgaagacctgcagaagaccatcaagcagaatgaggagaccctgacccagaccatcagccagtacaacggccgcctgtctgtgctgacagcagaaaatgccatgctgaacagcaagctggagaatgagaagcagagcaaggagcggctggaggccgaggtggagagctaccacagccggctggccgccgccatccatgaccgggaccagagcgagaccagcaagcgggagctggagctggccttccagagggccagagatgaatgttcccggctgcaggacaagatgaactttgatgtgagcaacctgaaggacaacaatgagatcctgagccagcagctgttcaagacagagagcaagctgaacagcctggagattgagttccaccacaccagagatgccctgcgggagaagaccctgggcctggagcgggtgcagaaggacctgagccagacccagtgccagatgaaggagatggagcagaagtaccagaatgagcaggtgaaggtgaacaagtacatcggcaagcaggagagcgtggaggagcggctgagccagctgcagagcgagaacatgctgctgcggcagcagctggatgatgcccacaacaaggctgacaacaaggagaagacagtcatcaacatccaggaccagttccacgccatcgtgcagaagctgcaggccgagagcgagaagcagagcctgctgctggaggagaggaacaaggagctgatcagcgagtgcaaccacctgaaggagcggcagtaccagtatgaaaatgagaaggccgagcgggaggtggtggtgcggcagctgcagcaggagctggccgacaccctgaagaagcagagcatgtctgaggccagcctggaggtgaccagccgctaccgcatcaacctggaggatgagacccaggacctgaagaagaagctgggccagatccggaaccagctgcaggaggcccaggacagacacacagaagctgtgcgctgtgccgagaagatgcaggaccacaagcagaagctggagaaggacaatgccaagctgaaggtgacagtgaagaagcagatggacaagattgaggagctgcagaagaacctgctgaatgccaacctgtctgaagatgagaaggagcagctgaagaagctgatggagctgaagcagagcctggagtgcaacctggaccaggagatgaagaagaatgtggagctggagcgggagatcaccggcttcaagaacctgctgaagatgaccaggaagaagctgaatgaatatgaaaatggagagttctccttccacggggacctgaagaccagccagtttgagatggacatccagatcaacaagctgaagcacaagattgatgacctgacagctgagctggagacagctggcagcaagtgcctgcacctggacaccaagaaccagatcctgcaggaggagctgctgtccatgaagacagtgcagaagaagtgtgagaagctgcagaagaacaagaagaagctggagcaggaggtgatcaacctgcggagccacatcgagaggaacatggtggagctgggccaggtgaagcagtacaagcaggagattgaggagcgggcccggcaggagattgctgagaagctgaaggaggtgaacctcttcctgcaggcccaggccgccagccaggagaacctggagcagttccgggagaacaactttgcctccatgaagagccagatggagctgcgcatcaaggacctggagagcgagctgagcaagatcaagaccagccaggaggacttcaacaagacagagctggagaagtacaagcagctgtacctggaggagctgaaggtgaggaagagcctgagcagcaagctgaccaagaccaatgaaaggctggccgaggtgaacaccaagctgctggtggagaagcagcagagccgcagcctcttcaccaccctgaccaccaggcctgtgatggagcccccctgtgtgggcaacctgaacaacagcctggacctgaacaggaagctgatcccccgggagaacctggtgatcagcaccagcaacccccgggccagcaacaacagcatggagaactacctgagcaagatgcagcaggagctggagaagaacatcacccgggagctgaaggaggccgctgctgagctggagagcggcagcatcgccagccccctgggcagcacagatgagagcaacctgaaccaggacctggtgtggaaggccagccgggagtatgtgcaggtgctgaagaagaactacatgatctag

SEQ ID NO: 143696 - DNA, 5133 bp, synthetic construct
  misc_feature 1..5133: note = Description of Artificial Sequence: Synthetic coding sequence
  source 1..5133: mol_type = other DNA
atgaagaagatcttcagcaagaagggggagagccccctgggcagctttgcccggcggcagaggagcagcgctgggggcggcggggagcccggggagggcgcctacagccagcccggctaccacgtgcgggaccgggacctgggcaagatccacaaggccgccagcgctggaaatgtggccaaggtgcagcagatcctgctgctgaggaagaatggcctgaatgaccgggacaagatgaacagaacagccctgcacctggcctgtgccaacggccaccctgaggtggtgaccctgctggtggacaggaagtgccagctgaatgtgtgtgacaatgaaaatagaacagccctgatgaaggctgtgcagtgccaggaggagaagtgtgccaccatcctgctggagcacggggctgaccccaacctggctgatgtgcacggcaacacagccctgcactatgctgtgtacaatgaagacatctctgtggccaccaagctgctgctgtatgatgccaacatcgaggccaagaacaaggatgacctgacccccctgctgctggccgtgtctgggaagaagcagcagatggtggagttcctgatcaagaagaaggccaacgtgaatgctgtggacaagctggagagcagccaccagctgatcagcgagtacaaggaggagcgcatccccaagcacagcagccagaacagcaacagcgtggatgagagcagcgaggacagcctgagccggctgagcggcaagccaggagtggatgacagctggcccaccagtgatgatgaggacctgaactttgacaccaagaatgtgcccaagcccagcctggccaagctgatgacagccagccagcagagcaggaagaacctggaggccacctacggcaccgtgaggactggaaacagaaccctgtttgaggaccgggacagcgacagccaggatgaggtggtggtggagagcctgcccaccaccagcatcaaggtgcagtgcttcagccaccccacctaccagagcccagacctgctgcccaagcccagccacaagagcctggccaaccctggcctgatgaaggaggagcccaccaagccaggcatcgccaagaaggaaaatggcatcgacatcattgaaagtgcccccctggagcagaccaacaatgacaacctgacctacgtggatgaggtgcacaagaacaacagaagtgacatgatgtctgccctgggcctgggccaggaggaggacatcgagagcccctgggacagcgagagcatcagcgagaacttcccccagaagtatgtggaccccctggccggggctgctgatggcaaggagaagaacattggaaatgagcaggccgaggatgtgttctacatccccagctgcatgagcggcagcaggaacttcaagatggccaagctggaggacaccagaaatgtgggcatgcctgtggcccacatggagagccctgagcgctacctgcacctgaagcccaccatcgagatgaaggacagcgtgcccaacaaggccggcggcatgaaggatgtgcagaccagcaaggctgctgagcatgacctggaggtggccagcgaggaggagcaggagcgggagggcagcgagaacaaccagccccaggtggaggaggagaggaagaagcacaggaacaatgagatggaggtgtctgccaacatccatgatggagccacagatgatgctgaagatgatgatgatgatgatggcctcatccagaagaggaagtctggagaaacagaccaccagcagttccccaggaaagaaaacaaggagtatgccagcagcggccctgccctgcagatgaaggaggtgaagagcacagagaaggagaagaggaccagcaaggagagcgtgaacagccctgtgtttgggaaggccagcctgctgactggaggcctgctgcaggtggatgatgacagcagcctgtctgaaattgatgaagatgagggccggcccaccaagaagaccagcaatgagaagaacaaggtgaagaaccagatccagagcatggatgatgtggatgacctgacccagagcagcgagacagccagcgaggactgtgagctgccccacagcagctacaagaacttcatgctgctgattgagcagctgggcatggagtgcaaggacagcgtgtccctgctgaagatccaggatgctgccctgagctgtgagcggctgctggagctgaagaagaaccactgtgagctgctgactgtgaagatcaagaagatggaggacaaggtgaatgtgctgcagcgggagctgtctgagaccaaggagatcaagagccagctggagcaccagaaggtggagtgggagcgggagctgtgcagcctgcgcttcagcctgaaccaggaggaggagaagagaagaaatgctgacaccctgtatgagaagatccgggagcagctgcggaggaaggaggagcagtacaggaaggaggtggaggtgaagcagcagctggagctgagcctgcagaccctggagatggagctgaggacagtgaagagcaacctgaaccaggtggtgcaggagagaaatgatgcccagaggcagctgagccgggagcagaatgccaggatgctgcaggacggcatcctgaccaaccacctgagcaagcagaaggagattgagatggcccagaagaagatgaacagcgagaacagccacagccatgaggaggagaaggacctgagccacaagaacagcatgctgcaggaggagatcgccatgctgcggctggagattgacaccatcaagaaccagaaccaggagaaggagaagaagtgctttgaggacctgaagatcgtgaaggagaagaatgaagacctgcagaagaccatcaagcagaatgaggagaccctgacccagaccatcagccagtacaacggccgcctgtctgtgctgacagcagaaaatgccatgctgaacagcaagctggagaatgagaagcagagcaaggagcggctggaggccgaggtggagagctaccacagccggctggccgccgccatccatgaccgggaccagagcgagaccagcaagcgggagctggagctggccttccagagggccagagatgagtgcagccggctgcaggacaagatgaactttgatgtgagcaacctgaaggacaacaatgagatcctgagccagcagctgttcaagacagagagcaagctgaacagcctggagattgagttccaccacaccagagatgccctgcgggagaagaccctgggcctggagcgggtgcagaaggacctgagccagacccagtgccagatgaaggagatggagcagaagtaccagaatgagcaggtgaaggtgaacaagtacatcggcaagcaggagagcgtggaggagcggctgagccagctgcagagcgagaacatgctgctgcggcagcagctggatgatgcccacaacaaggctgacaacaaggagaagacagtcatcaacatccaggaccagttccacgccatcgtgcagaagctgcaggccgagagcgagaagcagagcctgctgctggaggagaggaacaaggagctgatcagcgagtgcaaccacctgaaggagcggcagtaccagtatgaaaatgagaaggccgagcgggaggtggtggtgcggcagctgcagcaggagctggccgacaccctgaagaagcagagcatgtctgaggccagcctggaggtgaccagccgctaccgcatcaacctggaggatgagacccaggacctgaagaagaagctgggccagatccggaaccagctgcaggaggcccaggacagacacacagaggccgtgcgctgtgccgagaagatgcaggaccacaagcagaagctggagaaggacaatgccaagctgaaggtgacagtgaagaagcagatggacaagattgaggagctgcagaagaacctgctgaatgccaacctgtctgaagatgagaaggagcagctgaagaagctgatggagctgaagcagagcctggagtgcaacctggaccaggagatgaagaagaatgtggagctggagcgggagatcaccggcttcaagaacctgctgaagatgaccaggaagaagctgaatgaatatgaaaatggagagttctccttccatggagacctgaagaccagccagtttgagatggacatccagatcaacaagctgaagcacaagattgatgacctgacagctgagctggagacagctggcagcaagtgcctgcacctggacaccaagaaccagatcctgcaggaggagctgctgtccatgaagacagtgcagaagaagtgtgagaagctgcagaagaacaagaagaagctggagcaggaggtgatcaacctgcggagccacattgaaagaaacatggtggagctgggccaggtgaagcagtacaagcaggagattgaggagcgggcccggcaggagattgctgagaagctgaaggaggtgaacctcttcctgcaggcccaggccgccagccaggagaacctggagcagttccgggagaacaactttgcctccatgaagagccagatggagctgcgcatcaaggacctggagagcgagctgagcaagatcaagaccagccaggaggacttcaacaagacagagctggagaagtacaagcagctgtacctggaggagctgaaggtgaggaagagcctgagcagcaagctgaccaagaccaatgaaaggctggccgaggtgaacaccaagctgctggtggagaagcagcagagccgcagcctcttcaccaccctgaccaccaggcctgtgatggagcccccctgtgtgggcaacctgaacaacagcctggacctgaacaggaagctgatcccccgggagaacctggtgatcagcaccagcaacccccgggccagcaacaacagcatggagaactacctgagcaagatgcagcaggagctggagaagaacatcacccgggagctgaaggaggccgctgctgagctggagagcggcagcatcgccagccccctgggcagcacagatgagagcaacctgaaccaggacctggtgtggaaggccagccgggagtatgtgcaggtgctgaagaagaactacatgatctag

SEQ ID NO: 143697 - DNA, 5181 bp, synthetic construct
  misc_feature 1..5181: note = Description of Artificial Sequence: Synthetic coding sequence
  source 1..5181: mol_type = other DNA
atgaagaagatcttcagcaagaagggggagagccccctgggcagctttgcccggcggcagaggagcagcgctgggggcggcggggagcccggggagggcgcctacagccagcccggctaccacgtgcgggaccgggacctgggcaagatccacaaggccgccagcgctggaaatgtggccaaggtgcagcagatcctgctgctgaggaagaatggcctgaatgaccgggacaagatgaacagaacagccctgcacctggcctgtgccaacggccaccctgaggtggtgaccctgctggtggacaggaagtgccagctgaatgtgtgtgacaatgaaaatagaacagccctgatgaaggctgtgcagtgccaggaggagaagtgtgccaccatcctgctggagcacggggctgaccccaacctggctgatgtgcacggcaacacagccctgcactatgctgtgtacaatgaagacatctctgtggccaccaagctgctgctgtatgatgccaacatcgaggccaagaacaaggatgacctgacccccctgctgctggccgtgtctgggaagaagcagcagatggtggagttcctgatcaagaagaaggccaacgtgaatgctgtggacaagctggagagcagccaccagctgatcagcgagtacaaggaggagcgcatccccaagcacagcagccagaacagcaacagcgtggatgagagcagcgaggacagcctgagcagcctcttctacttcatcttctttgagaccaagagctgcaccgtggcccaggccggcgtgctgcagcacgacctgagcagcctgcagagcctgctgcccggcttcacccagttcttctgcctgcacctgcccagctcctgggaccaccggctgagcggcaagccaggagtggatgacagctggcccaccagtgatgatgaggacctgaactttgacaccaagaatgtgcccaagcccagcctggccaagctgatgacagccagccagcagagcaggaagaacctggaggccacctatggaacagtgaggacaggcaacagaaccctgtttgaagatcgggacagcgacagccaggatgaggtggtggtggagagcctgcccaccaccagcatcaaggtgcagtgcttcagccaccccacctaccagagcccagacctgctgcccaagcccagccacaagagcctggccaaccctggcctgatgaaggaggagcccaccaagccaggcatcgccaagaaggaaaatggaattgacatcatcgagagcgcccccctggagcagaccaacaatgacaacctgacctacgtggatgaggtgcacaagaacaacagaagtgacatgatgtctgccctgggcctgggccaggaggaggacatcgagagcccctgggacagcgagagcatcagcgagaacttcccccagaagtatgtggaccccctggccggggctgctgatggcaaggagaagaacattggaaatgagcaggccgaggagagccctgagcgctacctgcacctgaagcccaccatcgagatgaaggacagcgtgcccaacaaggccggcggcatgaaggatgtgcagaccagcaaggctgctgagcatgacctggaggtggccagcgaggaggagcaggagcgggagggcagcgagaacaaccagccccaggtggaggaggagaggaagaagcacaggaacaatgagatggaggtgtctgccaacatccatgatggagccacagatgatgctgaagatgatgatgatgatgatggcctcatccagaagaggaagtctggagaaacagaccaccagcagttccccaggaaagaaaacaaggagtatgccagcagcggccctgccctgcagatgaaggaggtgaagagcacagagaaggagaagaggaccagcaaggagagcgtgaacagccctgtgtttgggaaggccagcctgctgactggaggcctgctgcaggtggatgatgacagcagcctgtctgaaattgatgaagatgagggccggcccaccaagaagaccagcaatgagaagaacaaggtgaagaaccagatccagagcatggatgatgtggatgacctgacccagagcagcgagacagccagcgaggactgtgagctgccccacagcagctacaagaacttcatgctgctgattgagcagctgggcatggagtgcaaggacagcgtgtccctgctgaagatccaggatgctgccctgagctgtgagcggctgctggagctgaagaagaaccactgtgagctgctgactgtgaagatcaagaagatggaggacaaggtgaatgtgctgcagcgggagctgtctgagaccaaggagatcaagagccagctggagcaccagaaggtggagtgggagcgggagctgtgcagcctgcgcttcagcctgaaccaggaggaggagaagagaagaaatgctgacaccctgtatgagaagatccgggagcagctgcggaggaaggaggagcagtacaggaaggaggtggaggtgaagcagcagctggagctgagcctgcagaccctggagatggagctgaggacagtgaagagcaacctgaaccaggtggtgcaggagagaaatgatgcccagaggcagctgagccgggagcagaatgccaggatgctgcaggacggcatcctgaccaaccacctgagcaagcagaaggagattgagatggcccagaagaagatgaacagcgagaacagccacagccatgaggaggagaaggacctgagccacaagaacagcatgctgcaggaggagatcgccatgctgcggctggagattgacaccatcaagaaccagaaccaggagaaggagaagaagtgctttgaggacctgaagatcgtgaaggagaagaatgaagacctgcagaagaccatcaagcagaatgaggagaccctgacccagaccatcagccagtacaacggccgcctgtctgtgctgacagcagaaaatgccatgctgaacagcaagctggagaatgagaagcagagcaaggagcggctggaggccgaggtggagagctaccacagccggctggccgccgccatccatgaccgggaccagagcgagaccagcaagcgggagctggagctggccttccagagggccagagatgagtgcagccggctgcaggacaagatgaactttgatgtgagcaacctgaaggacaacaatgagatcctgagccagcagctgttcaagacagagagcaagctgaacagcctggagattgagttccaccacaccagagatgccctgcgggagaagaccctgggcctggagcgggtgcagaaggacctgagccagacccagtgccagatgaaggagatggagcagaagtaccagaatgagcaggtgaaggtgaacaagtacatcggcaagcaggagagcgtggaggagcggctgagccagctgcagagcgagaacatgctgctgcggcagcagctggatgatgcccacaacaaggctgacaacaaggagaagacagtcatcaacatccaggaccagttccacgccatcgtgcagaagctgcaggccgagagcgagaagcagagcctgctgctggaggagaggaacaaggagctgatcagcgagtgcaaccacctgaaggagcggcagtaccagtatgaaaatgagaaggccgagcgggaggtggtggtgcggcagctgcagcaggagctggccgacaccctgaagaagcagagcatgtctgaggccagcctggaggtgaccagccgctaccgcatcaacctggaggatgagacccaggacctgaagaagaagctgggccagatccggaaccagctgcaggaggcccaggacagacacacagaggccgtgcgctgtgccgagaagatgcaggaccacaagcagaagctggagaaggacaatgccaagctgaaggtgacagtgaagaagcagatggacaagattgaggagctgcagaagaacctgctgaatgccaacctgtctgaagatgagaaggagcagctgaagaagctgatggagctgaagcagagcctggagtgcaacctggaccaggagatgaagaagaatgtggagctggagcgggagatcaccggcttcaagaacctgctgaagatgaccaggaagaagctgaatgaatatgaaaatggagagttctccttccatggagacctgaagaccagccagtttgagatggacatccagatcaacaagctgaagcacaagattgatgacctgacagctgagctggagacagctggcagcaagtgcctgcacctggacaccaagaaccagatcctgcaggaggagctgctgtccatgaagacagtgcagaagaagtgtgagaagctgcagaagaacaagaagaagctggagcaggaggtgatcaacctgcggagccacattgaaagaaacatggtggagctgggccaggtgaagcagtacaagcaggagattgaggagcgggcccggcaggagattgctgagaagctgaaggaggtgaacctcttcctgcaggcccaggccgccagccaggagaacctggagcagttccgggagaacaactttgcctccatgaagagccagatggagctgcgcatcaaggacctggagagcgagctgagcaagatcaagaccagccaggaggacttcaacaagacagagctggagaagtacaagcagctgtacctggaggagctgaaggtgaggaagagcctgagcagcaagctgaccaagaccaatgaaaggctggccgaggtgaacaccaagctgctggtggagaagcagcagagccgcagcctcttcaccaccctgaccaccaggcctgtgatggagcccccctgtgtgggcaacctgaacaacagcctggacctgaacaggaagctgatcccccgggagaacctggtgatcagcaccagcaacccccgggccagcaacaacagcatggagaactacctgagcaagatgcagcaggagctggagaagaacatcacccgggagctgaaggaggccgctgctgagctggagagcggcagcatcgccagccccctgggcagcacagatgagagcaacctgaaccaggacctggtgtggaaggccagccgggagtatgtgcaggtgctgaagaagaactacatgatctag

SEQ ID NO: 143698 - DNA, 642 bp, synthetic construct
  misc_feature 1..642: note = Description of Artificial Sequence: Synthetic coding sequence
  source 1..642: mol_type = other DNA
tgattccgggagaacaactttgcctccatgaagagccagatggagctgcgcatcaaggacctggagagcgagctgagcaagatcaagaccagccaggaggacttcaacaagacagagctggagaagtacaagcagctgtacctggaggagctgaaggtgaggaagagcctgagcagcaagctgaccaagaccaatgaaaggctggccgaggtgaacaccaagctgctggtggagaagcagcagagccgcagcctcttcaccaccctgaccaccaggcctgtgatggagcccccctgtgtgggcaacctgaacaacagcctggacctgaacaggaagctgatcccccgggagaacctggtgatcagcaccagcaacccccgggccagcaacaacagcatggagaactacctgagcaagatgcagcaggagctggagaagaacatcacccgggagctgaaggaggccgctgctgagctggagagcggcagcatcgccagccccctgggcagcacagatgagagcaacctgaaccaggacctggtgtggaaggccagccgggagtatggccccagtgatgagacccctcatgactatgtgctgatgacagaccagtgcctgaccagcaggacagacctgcagtag

SEQ ID NO: 143699 - DNA, 3261 bp, synthetic construct
  misc_feature 1..3261: note = Description of Artificial Sequence: Synthetic coding sequence
  source 1..3261: mol_type = other DNA
atgagccgggtgtgcatcgtggtgctggaggaggtggaggatgagagccctgccttcatcagcaagctgccccaggagaacaagagcctgcacagccccccatctggaaatgtgctggtgcgctaccccagcctggtgcaggccatcttcaatggagaccctgatgaggtgcgggccctgatcttcaagaaggaggatgtgaacttccaggacaatgagaagaggacccccctgcacgccgccgcctacctgggagatgctgagatcatcgagctgctgatcctgagcggggcccgggtgaatgccaaggacagcaagtggctgacccccctgcacagagctgtggccagctgcagcgaggaggccgtgcaggtgctgctgaagcacagcgcagatgtgaatgcccgggacaagaactggcagacccccctgcacatcgccgccgccaacaaggctgtgaagtgtgccgaggccctggtgcccctgctgagcaatgtgaatgtgtctgaccgggccggccgcacagccctgcaccacgccgccttcagcggccatggagagatggtgaagctgctgctgagcagaggagccaacatcaatgcctttgacaagaaggacagaagagccatccactgggccgcctacatgggccacatcgaggtggtgaagctgctggtgagccacggggctgaggtgacctgcaaggacaagaagagctacacccccctgcatgctgctgccagcagcggcatgatctctgtggtgaagtacctgctggacctgggcgtggacatgaatgagcccaatgcctacggcaacacccccctgcacgtggcctgctacaacggccaggatgtggtggtgaatgagctgattgactgtggggccatcgtgaaccagaagaatgagaagggcttcacccccctgcactttgctgctgccagcacccatggagccctgtgcctggagctgctggtgggcaatggagcagatgtgaacatgaagagcaaggatggcaagacccccctgcacatgacagccctgcacggccgcttcagccgcagccagaccatcatccagagcggggctgtgattgactgtgaggacaagaatggaaacacccccctgcacatcgccgcccgctatggccacgagctgctgatcaacaccctcatcaccagcggggctgacacagccaagaggggcatccacggcatgttccccctgcacctggccgccctgagcggcttcagtgactgctgcaggaagctgctgagcagcggctttgatattgacaccccagatgactttggaagaacctgcctgcacgccgctgctgctgggggcaacctggagtgcctgaacctgctgctgaacacaggagctgacttcaacaagaaggacaagtttggccgcagccccctgcactacgccgccgccaactgcaactaccagtgcctgtttgccctggtgggcagcggggcctctgtgaatgacctggatgagcggggctgcacccccctgcactatgctgccaccagtgacacagatggcaagtgcctggagtacctgctgagaaatgatgccaaccctggcatccgggacaagcagggctacaatgctgtgcactacagcgctgcctacggccaccggctgtgcctgcagctgattgccagcgagacccccctggatgtgctgatggagaccagcggcacagacatgctgagtgacagcgacaacagagccaccatcagccccctgcacctggccgcctaccacggccaccaccaggccctggaggtgctggtgcagagcctgctggacctggatgtgaggaacagcagcggccgcacccccctggacctggccgccttcaagggccacgtggagtgtgtggatgtgctgatcaaccagggcgccagcatcctggtgaaggactacatcctgaagaggacccccatccacgccgccgccaccaacggccacagcgagtgcctgcggctgctgattggaaatgctgagccccagaatgctgtggacatccaggatggaaatggccagacccccctgatgctgtctgtgctgaatggccacacagactgtgtgtacagcctgctgaacaagggggccaacgtggatgccaaggacaagtggggccgcacagccctgcacagaggagctgtgactggacatgaagaatgtgtggatgccctgctgcagcacggggccaagtgcctgctgcgggacagccggggccgcacccccatccacctgtctgctgcctgtggccacatcggcgtgctgggcgccctgctgcagagcgctgcctccatggatgccaacccagccacagctgacaaccacggctacacagccctgcactgggcctgctacaatggacatgagacctgtgtggagctgctgctggagcaggaggtgttccagaagacagagggcaatgccttcagccccctgcactgtgccgtcatcaatgacaatgaaggagctgctgagatgctgattgacaccctgggcgccagcatcgtgaatgccacagacagcaaaggaagaacacccctgcacgccgccgccttcacagaccacgtggagtgcctgcagctgctgctgagccacaatgcccaggtgaacagcgtggacagcacaggcaagacccccctgatgatggctgctgaaaatggccagaccaacacagtggagatgctggtgtcctctgccagcgctgagctgaccctgcaggacaacagcaagaacacagccctgcacctggcctgcagcaaaggacatgagaccagcgccctgctgatcctggagaagatcacagacaggaacctgatcaatgccaccaatgctgccctgcagacccccctgcacgtggccgccagaaatggcctgaccatggtggtgcaggagctgctgggcaaaggagcctctgtgctggccgtggatgaaaatggctacaccccagccctggcctgtgcccccaacaaggatgtggccgactgcctggccctgatcctggccaccatgatgcctgtgagcagcagcagccccctgagcagcctgaccttcaatgccatcaaccgctacaccaacaccagcaagacagtgtcctttgaggccctgcccatcatgagaaatgagcccagcagctactgcagcttcaacaacatcggcggggagcaggagtacctgtacacagatgtggatgagctgaatgacagcgacagcgagacctactag

SEQ ID NO: 143700 - DNA, 3162 bp, synthetic construct
  misc_feature 1..3162: note = Description of Artificial Sequence: Synthetic coding sequence
  source 1..3162: mol_type = other DNA
atggccttcctgaagctgcgggaccagcccagcctggtgcaggccatcttcaacggggaccctgatgaggtgcgggccctgatcttcaagaaggaggatgtgaacttccaggacaatgagaagaggacccccctgcatgctgctgcctacctgggagatgctgagatcatcgagctgctgatcctgagcggggcccgggtgaatgccaaggacagcaagtggctgacccccctgcacagagctgtggccagctgcagcgaggaggccgtgcaggtgctgctgaagcacagcgcagatgtgaatgcccgggacaagaactggcagacccccctgcacatcgctgctgccaacaaggctgtgaagtgtgccgaggccctggtgcccctgctgagcaatgtgaatgtgtctgacagagctggccgcacagccctgcaccacgccgccttcagcggccacggggagatggtgaagctgctgctgagcagaggagccaacatcaatgcctttgacaagaaggaccggcgggccatccactgggccgcctacatgggccacatcgaggtggtgaagctgctggtgtcccatggagctgaggtgacctgcaaggacaagaagagctacacccccctgcacgccgccgccagcagcggcatgatctctgtggtgaagtacctgctggacctgggcgtggacatgaatgagcccaatgcctacggcaacacccccctgcacgtggcctgctacaacggccaggatgtggtggtgaatgagctgattgactgtggggccatcgtgaaccagaagaatgagaagggcttcacccccctgcactttgctgctgccagcacccacggggccctgtgcctggagctgctggtgggcaatggagcagatgtgaacatgaagagcaaggatggcaagacccccctgcacatgacagccctgcacggccgcttcagccgcagccagaccatcatccagagcggggccgtcatcgactgtgaggacaagaatggaaacacccccctgcacatcgccgcccgctatggccacgagctgctgatcaacaccctcatcaccagcggggctgacacagccaagaggggcatccacggcatgttccccctgcacctggccgccctgagcggcttcagtgactgctgcaggaagctgctgagcagcggctttgacatcgacaccccagatgactttggccgcacctgcctgcatgctgctgctgctgggggcaacctggagtgcctgaacctgctgctgaacacaggagctgacttcaacaagaaggacaagtttggccgcagccccctgcactatgctgctgccaactgcaactaccagtgcctgtttgccctggtgggcagcggggcctctgtgaatgacctggatgagcggggctgcacccccctgcactacgccgccaccagtgacacagatggcaagtgcctggagtacctgctgagaaatgatgccaaccctggcatccgggacaagcagggctacaatgctgtgcactacagcgctgcctacggccaccggctgtgcctgcagctgattgccagcgagacccccctggatgtgctgatggagaccagcggcacagacatgctgagtgacagcgacaacagagccaccatcagccccctgcacctggccgcctaccacggccaccaccaggccctggaggtgctggtgcagagcctgctggacctggatgtgaggaacagcagcggccgcacccccctggacctggccgccttcaagggccacgtggagtgtgtggatgtgctgatcaaccagggcgccagcatcctggtgaaggactacatcctgaagaggacccccatccatgctgctgccaccaacggccacagtgaatgtctgcggctgctgattggaaatgctgagccccagaatgctgtggacatccaggatggaaatggccagacccccctgatgctgtctgtgctgaatggccacacagactgtgtgtacagcctgctgaacaagggggccaacgtggatgccaaggacaagtggggccgcacagccctgcacagaggagctgtgacaggccacgaggagtgtgtggatgccctgctgcagcacggggccaagtgcctgctgcgggacagccggggccgcacccccatccacctgtctgctgcctgtggccacatcggcgtgctgggcgccctgctgcagagcgctgcctccatggatgccaacccagccacagctgacaaccacggctacacagccctgcactgggcctgctacaacggccacgagacctgtgtggagctgctgctggagcaggaggtgttccagaagacagagggcaatgccttcagccccctgcactgtgctgtgatcaatgacaatgaaggagctgctgagatgctgattgacaccctgggcgccagcatcgtgaatgccacagacagcaagggccgcacccccctgcatgctgctgccttcacagaccacgtggagtgcctgcagctgctgctgagccacaatgcccaggtgaacagcgtggacagcacaggcaagacccccctgatgatggccgcagaaaatggccagaccaacacagtggagatgctggtgagcagcgccagcgctgagctgaccctgcaggacaacagcaagaacacagccctgcacctggcctgcagcaagggccacgagaccagcgccctgctgatcctggagaagatcacagacaggaacctgatcaatgccaccaatgctgccctgcagacccccctgcacgtggccgccagaaatggcctgaccatggtggtgcaggagctgctgggcaagggggcctctgtgctggccgtggatgaaaatggctacaccccagccctggcctgtgcccccaacaaggatgtggccgactgcctggccctgatcctggccaccatgatgcctgtgagcagcagcagccccctgagcagcctgaccttcaatgccatcaaccgctacaccaacaccagcaagacagtgtcctttgaggccctgcccatcatgagaaatgagcccagcagctactgcagcttcaacaacattggaggagagcaggagtacctgtacacagatgtggatgagctgaatgacagcgacagcgagacctactag

SEQ ID NO: 143701 - DNA, 3162 bp, synthetic construct; identical to SEQ ID NO: 143700
  misc_feature 1..3162: note = Description of Artificial Sequence: Synthetic coding sequence
  source 1..3162: mol_type = other DNA

SEQ ID NO: 143702 - DNA, 4026 bp, synthetic construct
  misc_feature 1..4026: note = Description of Artificial Sequence: Synthetic coding sequence
  source 1..4026: mol_type = other DNA
atgaccaagaggaagaagaccatcaacctgaacatccaggatgcccagaagaggacagccctgcactgggcctgtgtgaatggacatgaggaggtggtgaccttcctggtggacaggaagtgccagctggatgtgctggatggagagcacaggacccccctgatgaaggccctgcagtgccaccaggaggcctgtgccaacatcctgattgacagcggggctgacatcaacctggtggatgtgtatggcaacacagccctgcactatgctgtgtacagcgagatcctgtctgtggtggccaagctgctgagccatggagctgtgattgaggtgcacaacaaggccagcctgacccccctgctgctgagcatcaccaagaggtctgagcagatcgtggagttcctgctgatcaagaatgccaatgccaatgctgtgaacaagtacaagtgcacagccctgatgctggccgtgtgccacggcagcagcgagatcgtgggcatgctgctgcagcagaatgtggatgtgtttgctgctgacatctgtggggtgacagctgagcactatgctgtgacctgtggcttccaccacatccacgagcagatcatggagtacatcaggaagctgagcaagaaccaccagaacaccaaccctgagggcaccagcgctggcaccccagatgaggccgcccccctggccgagaggaccccagacacagctgagagcctggtggagaagaccccagatgaggccgcccccctggtggagaggaccccagacacagctgagagcctggtggagaagaccccagatgaggccgccagcctggtggagggcaccagtgacaagatccagtgcctggagaaggccaccagcggcaagtttgagcagagcgctgaggagaccccccgggagatcaccagccctgccaaggagaccagcgagaagttcacctggccagccaagggccggcccaggaagatcgcctgggagaagaaggaggacaccccccgggagatcatgagccctgccaaggagaccagcgagaagttcacctgggccgccaagggccggcccaggaagatcgcctgggagaagaaggagacccctgtgaagacaggctgtgtggcccgggtgaccagcaacaagaccaaggtgctggagaagggccgcagcaagatgattgcctgccccaccaaggagagcagcaccaaggccagcgccaatgaccagcgcttccccagcgagagcaagcaggaggaggatgaggagtacagctgtgacagccgcagcctgtttgagagcagcgccaagatccaggtgtgcatccctgagagcatctaccagaaggtgatggagatcaaccgggaggtggaggagccccccaagaagcccagcgccttcaagccagccatcgagatgcagaacagcgtgcccaacaaggcctttgagctgaagaatgagcagaccctgcgggctgaccccatgtttcctcctgagagcaagcagaaggactatgaagaaaattcctgggacagcgagagcctgtgtgagaccgtgtcccagaaggatgtgtgcctgcccaaggccacccaccagaaggagattgacaagatcaatggcaagctggaggagagccccaacaaggatggcctgctgaaggccacctgtggcatgaaggtgtccatccccaccaaggccctggagctgaaggacatgcagaccttcaaggccgagcccccaggcaagcccagcgcctttgagcccgccacagagatgcagaagtctgtgcccaacaaggccctggagctgaagaatgagcagaccctgcgggcagatgagatcctgcccagcgagagcaagcagaaggactatgaggagaacagctgggacacagagagcctgtgtgaaacagtgtcccagaaggatgtgtgcctgcccaaggccgcccaccagaaggagattgacaagatcaacgggaagctggagggcagccctgtgaaggatggcctgctgaaggccaactgtggcatgaaggtgtccatccccaccaaggccctggagctgatggacatgcagaccttcaaggccgagcccccagagaagcccagcgcctttgagcccgccatcgagatgcagaagtctgtgcccaacaaggccctggagctgaagaatgagcagaccctgcgggcagatgagatcctgcccagcgagagcaagcagaaggactatgaggagagctcctgggacagcgagagcctgtgtgagaccgtgtcccagaaggatgtgtgcctgcccaaggccacccaccagaaggagattgacaagatcaatggcaagctggaggagagcccagacaatgatggcttcctgaaggccccctgcaggatgaaggtgtccatccccaccaaggccctggagctgatggacatgcagaccttcaaggccgagcccccagagaagcccagcgcctttgagcccgccatcgagatgcagaagtctgtgcccaacaaggccctggagctgaagaatgagcagaccctgcgggctgaccagatgttccccagcgagagcaagcagaagaaggtggaggagaacagctgggacagcgagagcctgcgggagaccgtgtcccagaaggatgtgtgtgtgcccaaggccacccaccagaaggagatggacaagatcagcggcaagctggaggacagcaccagcctgagcaagatcctggacacagtgcacagctgtgagcgggcccgggagctgcagaaggaccactgtgagcagaggacaggcaagatggagcagatgaagaagaagttctgtgtgctgaagaagaagctgtctgaggccaaggagatcaagagccagctggagaaccagaaggtgaagtgggagcaggagctgtgcagcgtgcggctgaccctgaaccaggaggaggagaagagaagaaatgctgacatcctgaatgagaagatccgggaggagctgggcagaattgaggagcagcacaggaaggagctggaggtgaagcagcagctggagcaggccctgcgcatccaggacatcgagctgaagtctgtggagagcaacctgaaccaggtgagccacacccatgaaaatgaaaactacctgctgcacgagaactgcatgctgaagaaggagatcgccatgctgaagctggagatcgccaccctgaagcaccagtaccaggagaaggagaacaagtactttgaggacatcaagatcctgaaggagaagaatgctgagctgcagatgaccctgaagctgaaggaggagagcctgaccaagagggccagccagtacagcggccagctgaaggtgctgattgctgagaacaccatgctgaccagcaagctgaaggagaagcaggacaaggagatcctggaggccgagattgagagccaccacccccggctggccagcgctgtgcaggaccatgaccagatcgtgaccagcaggaagagccaggagcccgccttccacatcgctggagatgcctgcctgcagaggaagatgaatgtggatgtgagcagcaccatctacaacaatgaggtgctgcaccagcccctgtctgaggcccagaggaagagcaagagcctgaagatcaacctgaactatgctggagatgccctgcgggagaacaccctggtgtctgaacatgcccagagggaccagcgggagacccagtgccagatgaaggaggccgagcacatgtaccagaatgagcaggacaacgtgaacaagcacacagagcagcaggagagcctggaccagaagctgttccagctgcagagcaagaacatgtggctgcagcagcagctggtgcacgcccacaagaaggctgacaacaagagcaagatcaccatcgacatccacttcctggagaggaagatgcagcaccacctgctgaaggagaagaatgaggagatcttcaactacaacaaccacctgaagaaccgcatctaccagtatgagaaggagaaggccgagacagagaacagctag

SEQ ID NO: 143703 - DNA, 360 bp, synthetic construct
  misc_feature 1..360: note = Description of Artificial Sequence: Synthetic coding sequence
  source 1..360: mol_type = other DNA
atgggcaccaggaccctgcagtttgagatcagtgacagccatgagaaggaggaggacctgctgcacaagaaccacctgatgcaggatgaaattgcccggctgcggctggagatccacaccatcaagaaccagatcctggagaagaagtacctgaaggacatcgagatcatcaagaggaagcatgaggacctgcagaaggccctgaagcagaatggagagaagagcaccaagaccatcgcccactacagcggccagctgacagccctgacagatgagaacaccatgctgcggagcaagctggagaaggagaagcagagccggcagaggctgaccaagtggaaccacaccatcgtggactag

SEQ ID NO: 143704 - DNA, 759 bp, synthetic construct
  misc_feature 1..759: note = Description of Artificial Sequence: Synthetic coding sequence
  source 1..759: mol_type = other DNA
atgagccaggccgccaaggccagcgccagcgccaccgtggccgtgaaccctggccctgacaccaagggcaagggggcccctcctgctggcaccagccccagccctggcaccaccctggcccccaccaccgtgcccatcaccagcgccaaggctgctgagctgcccccaggcaactaccgcctggtggtgtttgagctggagaacttccagggccggcgggcagagttctctggagaatgtagcaacctggccgaccggggctttgacagagtgcgcagcatcatcgtgtctgctggcccctgggtggcctttgagcagagcaacttccggggggagatgttcatcctggagaagggggagtacccccgctggaacacctggagcagcagctacagaagtgaccggctgatgtccttccggcccatcaagatggatgcccaggagcacaagatcagcctgtttgagggcgccaacttcaagggcaacaccatcgagatccagggagatgatgcccccagcctgtgggtgtatggcttcagtgacagagtgggctctgtgaaggtgagcagcggcacctgggtgggctaccagtacccaggctaccggggctaccagtacctgctggagcccggggacttccgccactggaatgagtggggcgccttccagccccagatgcagagcctgcggcggctgcgggacaagcagtggcacctggagggcagcttccctgtgctggccacagagccccccaagtag

SEQ ID NO: 143705 - DNA, 627 bp, synthetic construct
  misc_feature 1..627: note = Description of Artificial Sequence: Synthetic coding sequence
  source 1..627: mol_type = other DNA
tgaagagatgagctgcgctgcaagatcccagctggccgcctgcggcgggccgcccggccccaccggcggctgggccccaccgggaaggaggtgcacgccctgaagaggctgcgggacagcgccaatgccaatgatgtggagaccgtgcagcagctgctggaggatggagctgacccctgtgccgcagatgacaagggccgcacagccctgcactttgccagctgcaatggaaatgaccagatcgtgcagctgctgctggaccacggggctgaccccaaccagagagatggcctgggcaacacccccctgcacctggagtgcagcccccagctggtgcctgctggggcccgggtggatgccctggaccgggccggccgcacccccctgcacctggccaagagcaagctgaacatcctgcaggagggccacgcccagtgcctggaggccgtgcggctggaggtgaagcagatcatccacatgctgcgggagtacctggagcggctgggccagcacgagcagcgggagcggctggatgacctgtgcacccggctgcagatgaccagcaccaaggagcaggtggatgaggtgacagacctgctggccagcttcaccagcctgagcctgtag

SEQ ID NO: 143706 - DNA, 2184 bp, synthetic construct
  misc_feature 1..2184: note = Description of Artificial Sequence: Synthetic coding sequence
  source 1..2184: mol_type = other DNA
atgagccagcaggatgctgtggccgccctgtctgagcggctgctggtggccgcctacaagggccagacagaaaatgtggtgcagctgatcaacaagggggcccgggtggccgtgaccaagcacggccgcacccccctgcacctggccgccaacaagggccacctgcctgtggtgcagatcctgctgaaggccggctgtgacctggatgtgcaggatgatggagaccagacagccctgcaccgggccaccgtggtgggcaacacagagatcatcgccgccctgatccacgagggctgtgccctggaccggcaggacaaggatggcaacacagccctgcacgaggcctcctggcacggcttcagccagagcgccaagctgctgatcaaggccggggccaacgtgctggccaagaacaaggccggcaacacagccctgcacctggcctgccagaacagccacagccagagcaccagggtgctgctgctggccggcagcagagctgacctgaagaacaatgctggggacacctgcctgcacgtggccgcccgctacaaccacctgagcatcatccggctgctgctgacagccttctgcagcgtgcatgagaagaaccaggccggggacacagccctgcacgtggccgccgccctgaaccacaagaaggtggccaagatcctgctggaggccggggctgacaccaccatcgtgaacaatgccggccagacccccctggagacagcccgctaccacaacaaccctgaggtggccctgctgctgaccaaggccccccaggtgctgcgcttcagccggggccgcagcctgaggaagaagcgggagcggctgaaggaggagcggcgggcccagagcgtgcccagagatgaggtggcccagagcaaaggatctgtgtctgctggggacacccccagcagcgagcaggccgtggccaggaaggaggaggcccgggaggagttcctgagcgccagccctgagccccgggccaaggatgacagaagaaggaagagccggcccaaggtgtctgccttcagtgaccccaccccacctgctgaccagcagcccggccaccagaagaacctgcacgcccacaaccaccccaagaagaggaacagacaccgctgcagcagccccccacctcctcatgagttccgggcctaccagctgtacaccctgtaccggggcaaggatggcaaggtgatgcaggcccccatcaatggctgccgctgtgagcccctcatcaacaagctggagaaccagctggaggccaccgtggaggagatcaaggccgagctgggctctgtgcaggacaagatgaacaccaagctgggccagatggagaacaagacccagcaccagatgagggtgctggacaagctgatggtggagcggctgtctgctgagaggacagaatgtctgaaccggctgcagcagcacagcgacacagagaagcatgaaggagagaagaggcagatcagcctggtggatgagctgaagacctggtgcatgctgaagatccagaacctggagcagaagctgagcggggacagccgggcctgccgggccaagagcacccccagcacctgtgagagcagcactggagtggaccagctggtggtgacagctggccctgctgctgccagtgacagcagcccccctgtggtgcggcccaaggagaaggccctgaacagcacagccacccagaggctgcagcaggagctgagcagcagtgactgcaccggcagccggctgagaaatgtgaaggtgcagacagccctgctgcccatgaatgaagctgcccggagtgaccagcaggccggcccctgtgtgaacagaggcacccagaccaagaagagcggcaagagcggccccaccaggcaccgggcccagcagcctgctgccagcagcacctgtggccagcccccaccagccactggaagtgagcagacaggcccccacatccgggacaccagccaggccctggagctgacccagtacttctttgaggccgtgtccacccagatggagaagtggtatgaaaggaagattgaggaggcccggagccaggccaaccagaaggcccagcaggacaaggccaccctgaaggagcacatcaagagcctggaggaggagctggccaagctgcggaccagggtgcagaaggagaactag

SEQ ID NO: 143707 - DNA, 2079 bp, synthetic construct
  misc_feature 1..2079: note = Description of Artificial Sequence: Synthetic coding sequence
  source 1..2079: mol_type = other DNA
atgagccagcaggatgctgtggccgccctgtctgagcggctgctggtggccgcctacaagggccagacagaaaatgtggtgcagctgatcaacaagggggcccgggtggccgtgaccaagcacggccgcacccccctgcacctggccgccaacaagggccacctgcctgtggtgcagatcctgctgaaggccggctgtgacctggatgtgcaggatgatggagaccagacagccctgcaccgggccaccgtggtgggcaacacagagatcatcgccgccctgatccacgagggctgtgccctggaccggcaggacaaggatggcaacacagccctgcacgaggcctcctggcacggcttcagccagagcgccaagctgctgatcaaggccggggccaacgtgctggccaagaacaaggccggcaacacagccctgcacctggcctgccagaacagccacagccagagcaccagggtgctgctgctggccggcagcagagctgacctgaagaacaatgctggggacacctgcctgcacgtggccgcccgctacaaccacctgagcatcatccggctgctgctgacagccttctgcagcgtgcatgagaagaaccaggccggggacacagccctgcacgtggccgccgccctgaaccacaagaaggtggccaagatcctgctggaggccggggctgacaccaccatcgtgaacaatgccggccagacccccctggagacagcccgctaccacaacaaccctgaggtggccctgctgctgaccaaggccccccagggctctgtgtctgctggggacacccccagcagcgagcaggccgtggccaggaaggaggaggcccgggaggagttcctgagcgccagccctgagccccgggccaaggatgacagaagaaggaagagccggcccaaggtgtctgccttcagtgaccccaccccacctgctgaccagcagcccggccaccagaagaacctgcacgcccacaaccaccccaagaagaggaacagacaccgctgcagcagccccccacctcctcatgagttccgggcctaccagctgtacaccctgtaccggggcaaggatggcaaggtgatgcaggcccccatcaatggctgccgctgtgagcccctcatcaacaagctggagaaccagctggaggccaccgtggaggagatcaaggccgagctgggctctgtgcaggacaagatgaacaccaagctgggccagatggagaacaagacccagcaccagatgagggtgctggacaagctgatggtggagcggctgtctgctgagaggacagagtgcctgaaccggctgcagcagcacagcgacacagagaagcatgaaggagagaagaggcagatcagcctggtggatgagctgaagacctggtgcatgctgaagatccagaacctggagcagaagctgagcggggacagccgggcctgccgggccaagagcacccccagcacctgtgagagcagcactggagtggaccagctggtggtgacagctggccctgctgctgccagtgacagcagcccccctgtggtgcggcccaaggagaaggccctgaacagcacagccacccagaggctgcagcaggagctgagcagcagtgactgcaccggcagccggctgagaaatgtgaaggtgcagacagccctgctgcccatgaatgaggccgcccggagtgaccagcaggccggcccctgtgtgaacagaggcacccagaccaagaagagcggcaagagcggccccaccaggcaccgggcccagcagcctgctgccagcagcacctgtggccagcccccaccagccaccggcagcgagcagacaggcccccacatccgggacaccagccaggccctggagctgacccagtacttctttgaagctgtgtccacccagatggagaagtggtatgaaaggaagattgaggaggcccggagccaggccaaccagaaggcccagcaggacaaggccaccctgaaggagcacatcaagagcctggaggaggagctggccaagctgcggaccagggtgcagaaggaaaattag

SEQ ID NO: 143708 - DNA, 2169 bp, synthetic construct
  misc_feature 1..2169: note = Description of Artificial Sequence: Synthetic coding sequence
  source 1..2169: mol_type = other DNA
atgagccagcaggatgctgtggccgccctgtctgagcggctgctggtggccgcctacaagggccagacagaaaatgtggtgcagctgatcaacaagggggcccgggtggccgtgaccaagcacggccgcacccccctgcacctggccgccaacaagggccacctgcctgtggtgcagatcctgctgaaggccggctgtgacctggatgtgcaggatgatggagaccagacagccctgcaccgggccaccgtggtgggcaacacagagatcatcgccgccctgatccacgagggctgtgccctggaccggcaggacaaggatggcaacacagccctgcacgaggcctcctggcacggcttcagccagagcgccaagctgctgatcaaggccggggccaacgtgctggccaagaacaaggccggcaacacagccctgcacctggcctgccagaacagccacagccagagcaccagggtgctgctgctggccggcagcagagctgacctgaagaacaatgctggggacacctgcctgcacgtggccgcccgctacaaccacctgagcatcatccggctgctgctgacagccttctgcagcgtgcatgagaagaaccaggccggggacacagccctgcacgtggccgccgccctgaaccacaagaaggtggccaagatcctgctggaggccggggctgacaccaccatcgtgaacaatgccggccagacccccctggagacagcccgctaccacaacaaccctgaggtggccctgctgctgaccaaggccccccaggtgctgcgcttcagccggggccgcagcctgaggaagaagcgggagcggctgaaggaggagcggcgggcccagagcgtgcccagagatgaggtggcccagagcaaaggatctgtgtctgctggggacacccccagcagcgagcaggccgtggccaggaaggaggaggcccgggaggagttcctgagcgccagccctgagccccgggccaaggatgacagaagaaggaagagccggcccaaggtgtctgccttcagtgaccccaccccacctgctgaccagcagcccggccaccagaagaacctgcacgcccacaaccaccccaagaagaggaacagacaccgctgcagcagccccccacctcctcatgagttccgggcctaccagctgtacaccctgtaccggggcaaggatggcaaggtgatgcaggcccccatcaatggctgccgctgtgagcccctcatcaacaagctggagaaccagctggaggccaccgtggaggagatcaaggccgagctgggctctgtgcaggacaagatgaacaccaagctgggccagatggagaacaagacccagcaccagatgagggtgctggacaagctgatggtggagcggctgtctgctgagaggacagaatgtctgaaccggctgcagcagcacagcgacacagagaagcatgaaggagagaagaggcagatcagcctggtggatgagctgaagacctggtgcatgctgaagatccagaacctggagcagaagctgagcggggacagccgggcctgccgggccaagagcacccccagcacctgtgtggaccagctggtggtgacagctggccctgctgctgccagtgacagcagcccccctgtggtgcggcccaaggagaaggccctgaacagcacagccacccagaggctgcagcaggagctgagcagcagtgactgcaccggcagccggctgagaaatgtgaaggtgcagacagccctgctgcccatgaatgaggccgcccggagtgaccagcaggccggcccctgtgtgaacagaggcacccagaccaagaagagcggcaagagcggccccaccaggcaccgggcccagcagcctgctgccagcagcacctgtggccagcccccaccagccaccggcagcgagcagacaggcccccacatccgggacaccagccaggccctggagctgacccagtacttctttgaagctgtgtccacccagatggagaagtggtatgaaaggaagattgaggaggcccggagccaggccaaccagaaggcccagcaggacaaggccaccctgaaggagcacatcaagagcctggaggaggagctggccaagctgcggaccagggtgcagaaggaaaattag

SEQ ID NO: 143709 - DNA, 528 bp, synthetic construct
  misc_feature 1..528: note = Description of Artificial Sequence: Synthetic coding sequence
  source 1..528: mol_type = other DNA
atgagccagcaggatgctgtggccgccctgtctgagcggctgctggtggccgcctacaagggccagacagaaaatgtggtgcagctgatcaacaagggggcccgggtggccgtgaccaagcacggccgcacccccctgcacctggccgccaacaagggccacctgcctgtggtgcagatcctgctgaaggccggctgtgacctggatgtgcaggatgatggagaccagacagccctgcaccgggccaccgtggtgggcaacacagagatcatcgccgccctgatccacgagggctgtgccctggaccggcaggacaaggatggcaacacagccctgcacgaggcctcctggcacggcttcagccagagcgccaagctgctgatcaaggccggggccaacgtgctggccaagaacaaggccggcaacacagccctgcacctggcctgccagaacagccacagccagagcaccagggtgctgctgctggccggcagcagagctgacctgaagaacaatgctggggactag

SEQ ID NO: 143710 - DNA, 243 bp, synthetic construct
  misc_feature 1..243: note = Description of Artificial Sequence: Synthetic coding sequence
  source 1..243: mol_type = other DNA
atgagccagcaggatgctgtggccgccctgtctgagcggctgctggtggccgcctacaagggccagacagaaaatgtggtgcagctgatcaacaagggggcccgggtggccgtgaccaagcacggccgcacccccctgcacctggccgccaacaagggccacctgcctgtggtgcagatcctgctgaaggccggctgtgacctggatgtgcaggatgatggagaccagacagccctgcactag

SEQ ID NO: 143711 - DNA, 2184 bp, synthetic construct; identical to SEQ ID NO: 143706
  misc_feature 1..2184: note = Description of Artificial Sequence: Synthetic coding sequence
  source 1..2184: mol_type = other DNA

SEQ ID NO: 143712 - DNA, 357 bp, synthetic construct
  misc_feature 1..357: note = Description of Artificial Sequence: Synthetic coding sequence
  source 1..357: mol_type = other DNA
atgagccagcaggatgctgtggccgccctgtctgagcggctgctggtggccgcctacaagggccagacagaaaatgtggtgcagctgatcaacaagggggcccgggtggccgtgaccaagcacggccgcacccccctgcacctggccgccaacaagggccacctgcctgtggtgcagatcctgctgaaggccggctgtgacctggatgtgcaggatgatggagaccagacagccctgcaccgggccaccgtggtgggcaacacagagatcatcgccgccctgatccacgagggctgtgccctggaccggcaggacaaggatggcaacacagccctgcacgaggcctcctggcactag

SEQ ID NO: 143713 - DNA, 309 bp, synthetic construct
  misc_feature 1..309: note = Description of Artificial Sequence: Synthetic coding sequence
  source 1..309: mol_type = other DNA
atgagccagcaggatgctgtggccgccctgtctgagcggctgctggtggccgcctacaagggccagacagaaaatgtggtgcagctgatcaacaagggggcccgggtggccgtgaccaagcacggccgcacccccctgcacctggccgccaacaagggccacctgcctgtggtgcagatcctgctgaaggccggctgtgacctggatgtgcaggatgatggagaccagacagccctgcaccgggccaccgtggtgggcaacacagagatcatcgccgccctgatccacgagggctgtgccctggactag

SEQ ID NO: 143714 - DNA, 1992 bp, synthetic construct
  misc_feature 1..1992: note = Description of Artificial Sequence: Synthetic coding sequence
  source 1..1992: mol_type = other DNA
atgagccagcaggatgctgtggccgccctgtctgagcggctgctggtggccgcctacaagggccagacagaaaatgtggtgcagctgatcaacaagggggcccgggtggccgtgaccaagcacggccgcacccccctgcacctggccgccaacaagggccacctgcctgtggtgcagatcctgctgaaggccggctgtgacctggatgtgcaggatgatggagaccagacagccctgcaccgggccaccgtggtgggcaacacagagatcatcgccgccctgatccacgagggctgtgccctggaccggcaggacaaggccggcaacacagccctgcacctggcctgccagaacagccacagccagagcaccagggtgctgctgctggccggcagcagagctgacctgaagaacaatgctggggacacctgcctgcacgtggccgcccgctacaaccacctgagcatcatccggctgctgctgacagccttctgcagcgtgcatgagaagaaccaggccggggacacagccctgcacgtggccgccgccctgaaccacaagaaggtggccaagatcctgctggaggccggggctgacaccaccatcgtgaacaacgtgctgcgcttcagccggggccgcagcctgaggaagaagcgggagcggctgaaggaggagcggcgggcccagagcgtgcccagagatgaggtggcccagagcaagggctctgtgtctgctggggacacccccagcagcgagcaggccgtggccaggaaggaggaggcccgggaggagttcctgagcgccagccctgagccccgggccaaggatgacagaagaaggaagagccggcccaaggtgtctgccttcagtgaccccaccccacctgctgaccagcagcccggccaccagaagaacctgcacgcccacaaccaccccaagaagaggaacagacaccgctgcagcagccccccacctcctcatgagttccgggcctaccagctgtacaccctgtaccggggcaaggatggcaaggtgatgcaggcccccatcaatggctgccgctgtgagcccctcatcaacaagctggagaaccagctggaggccaccgtggaggagatcaaggccgagctgggctctgtgcaggacaagatgaacaccaagctgggccagatggagaacaagacccagcaccagatgagggtgctggacaagctgatggtggagcggctgtctgctgagaggacagagtgcctgaaccggctgcagcagcacagcgacacagagaagcatgaaggagagaagaggcagatcagcctggtggatgagctgaagacctggtgcatgctgaagatccagaacctggagcagaagctgagcggggacagccgggcctgccgggccaagagcacccccagcacctgtgtggaccagctggtggtgacagctggccctgctgctgccagtgacagcagcccccctgtggtgcggcccaaggagaaggccctgaacagcacagccacccagaggctgcagcaggagctgagcagcagtgactgcaccggcagccggctgagaaatgtgaaggtgcagacagccctgctgcccatgaatgaagctgcccggagtgaccagcaggccggcccctgtgtgaacagaggcacccagaccaagaagagcggcaagagcggccccaccaggcaccgggcccagcagcctgctgccagcagcacctgtggccagcccccaccagccactggaagtgagcagacaggcccccacatccgggacaccagccaggccctggagctgacccagtacttctttgaggccgtgtccacccagatggagaagtggtatgaaaggaagattgaggaggcccggagccaggccaaccagaaggcccagcaggacaaggccaccctgaaggagcacatcaagagcctggaggaggagctggccaagctgcggaccagggtgcagaaggagaactag

SEQ ID NO: 143715 - DNA, 765 bp, synthetic construct
  misc_feature 1..765: note = Description of Artificial Sequence: Synthetic coding sequence
  source 1..765: mol_type = other DNA
atgaacaagctgttctccttctggaagaggaagaatgagaccaggagccagggctacaacctgcgggagaaggacctgaagaagctgcaccgggccgcctctgtgggggacctgaagaagctgaaggagtacctgcagatcaagaagtatgatgtgaacatgcaggacaagaagtaccgcacccccctgcacctggcctgtgccaacggccacacagatgtggtgctcttcctgattgagcagcagtgcaagatcaacgtgcgggacagcgagaacaagagccccctcatcaaggctgtgcagtgccagaatgaagactgtgccaccatcctgctgaactttggagctgaccctgacctgcgggacatccgctacaacacagtgctgcactatgctgtgtgtggccagagcctgagcctggtggagaagctgctggagtatgaagctgacctggaggccaagaacaaggatggctacacccccctgctggtggccgtcatcaacaacaaccccaagatggtgaagttcctgctggagaagggagcagatgtgaatgccagtgacaactaccagaggacagccctgatcctggccgtgtctggagagcccccctgcctggtgaagctgctgctgcagcagggcgtggagctgtgctatgagggcatcgtggacagccagctgaggaacatgttcatctccatggtgctgctgcaccgctacccccagttcaccgccagccacggcaagaagaagcacgccaagtag

SEQ ID NO: 143716 - DNA, 825 bp, synthetic construct
  misc_feature 1..825: note = Description of Artificial Sequence: Synthetic coding sequence
  source 1..825: mol_type = other DNA
atgaacaagctgttctccttctggaagaggaagaatgagaccaggagccagggctacaacctgcgggagaaggacctgaagaagctgcaccgggccgcctctgtgggggacctgaagaagctgaaggagtacctgcagatcaagaagtatgatgtgaacatgcaggacaagaagtacagcgtggtgcagagcagccgctggctgctgagctacaccacccccctgaatgacttcatccgcacccccctgcacctggcctgtgccaacggccacacagatgtggtgctcttcctgattgagcagcagtgcaagatcaacgtgcgggacagcgagaacaagagccccctcatcaaggctgtgcagtgccagaatgaagactgtgccaccatcctgctgaactttggagctgaccctgacctgcgggacatccgctacaacacagtgctgcactatgctgtgtgtggccagagcctgagcctggtggagaagctgctggagtatgaagctgacctggaggccaagaacaaggatggctacacccccctgctggtggccgtcatcaacaacaaccccaagatggtgaagttcctgctggagaagggagcagatgtgaatgccagtgacaactaccagaggacagccctgatcctggccgtgtctggagagcccccctgcctggtgaagctgctgctgcagcagggcgtggagctgtgctatgagggcatcgtggacagccagctgaggaacatgttcatctccatggtgctgctgcaccgctacccccagttcaccgccagccacggcaagaagaagcacgccaagtag

SEQ ID NO: 143717 - DNA, 606 bp, synthetic construct
  misc_feature 1..606: note = Description of Artificial Sequence: Synthetic coding sequence
  source 1..606: mol_type = other DNA
atgcaggacaagaagtaccgcacccccctgcacctggcctgtgccaacggccacacagatgtggtgctcttcctgattgagcagcagtgcaagatcaacgtgcgggacagcgagaacaagagccccctcatcaaggctgtgcagtgccagaatgaagactgtgccaccatcctgctgaactttggagctgaccctgacctgcgggacatccgctacaacacagtgctgcactatgctgtgtgtggccagagcctgagcctggtggagaagctgctggagtatgaggccgacctggaggccaagaacaaggatggctacacccccctgctggtggccgtcatcaacaacaaccccaagatggtgaagttcctgctggagaagggagcagatgtgaatgccagtgacaactaccagaggacagccctgatcctggccgtgtctggagagcccccctgcctggtgaagctgctgctgcagcagggcgtggagctgtgctatgagggcatcgtggacagccagctgaggaacatgttcatctccatggtgctgctgcaccgctacccccagttcaccgccagccacggcaagaagaagcacgccaagtag

SEQ ID NO: 143718 - DNA, 942 bp, synthetic construct
  misc_feature 1..942: note = Description of Artificial Sequence: Synthetic coding sequence
  source 1..942: mol_type = other DNA
atggacaccagcaccaacctggacattggagcccagctgattgtggaggagtgccccagcacctacagcctgaccggcatgccagacatcaagattgagcaccccctggaccccaacagcgaggagggcagcgcccagggcgtggccatgggcatgaagttcatcctgcccaacagatttgacatgaatgtgtgcagcagatttgtgaagagcctgaatgaggaggacagcaagaacatccaggaccaggtgaacagcgacctggaggtggcctctgtgctcttcaaggccgagtgcaacatccacaccagccccagccctggcatccaggtgagacatgtgtacacccccagcaccaccaagcacttcagccccatcaagcagagcaccaccctgaccaacaagcacagaggaaatgaggtgtccaccacccccctgctggccaacagcctgtctgtgcaccagctggccgcccagggcgagatgctgtacctggccaccagaattgagcaggagaatgtcatcaaccacacagatgaggagggcttcacccccctgatgtgggccgccgcccacggccagattgctgtggtggagttcctgctgcagaatggagctgacccccagctgctgggcaagggccgggagagcgccctgagcctggcctgcagcaagggctacacagacatcgtgaagatgctgctggactgtggggtggatgtgaatgaatatgactggaatggaggcacccccctgctgtatgctgtgcacggcaaccacgtgaagtgtgtgaagatgctgctggagagcggggctgaccccaccatcgagacagacagcggctacaacagcatggacctggccgtggccctgggctacagatctgtgcagcaggtgattgagagccacctgctgaagctgctgcagaacatcaaggagtag

SEQ ID NO: 143719 - DNA, 1428 bp, synthetic construct
  misc_feature 1..1428: note = Description of Artificial Sequence: Synthetic coding sequence
  source 1..1428: mol_type = other DNA
atggccgccagcgccctgcggggcctgcctgtggccggcggcggggagagcagcgagagtgaagatgatggctgggagatcggctacctggacaggaccagccagaagctgaagaggctgctgcccatcgaggagaagaaggagaagttcaagaaggccatgaccatcggagatgtgtccctggtgcaggagctgctggacagcggcatctctgtggacagcaacttccagtatggctggacccccctgatgtatgctgcctctgtggccaatgctgagctggtgcgggtgctgctggacagaggagccaatgccagctttgagaaggacaagcagagcatcctgatcacagcctgcagcgcccacggcagcgaggagcagatcctgaagtgtgtggagctgctgctgagcagaaatgctgaccccaacgtggcctgccggcggctgatgacccccatcatgtatgctgccagagatggccacacccaggtggtggccctgctggtggcccatggagctgaggtgaacacccaggatgaaaatggctacacagccctgacctgggccgcccggcagggccacaagaacatcgtgctgaagctgctggagctgggcgccaacaagatgctgcagaccaaggatggcaagatgcccagcgagatcgccaagaggaacaagcaccacgagatcttcaacctgctgtccttcaccctgaaccccctggagggcaagctgcagcagctgaccaaggaggacaccatctgcaagatcctgaccacagacagcgaccgggagaaggaccacatcttcagcagctacacagccttcggggacctggaggtgttcctgcacggcctgggcctggagcacatgacagacctgctgaaggagcgggacatcaccctgcggcacctgctgaccatgagagaagatgagttcaccaagaatggcatcaccagcaaggaccagcagaagatcctggccgccctgaaggagctgcaggtggaggagatccagtttggagagctgtctgaggagaccaagctggagatctctggagatgagttcctgaacttcctgctgaagctgaacaagcagtgtggccacctgatcacagctgtgcagaatgtcatcacagagctgcctgtgaacagccagaagatcaccctggagtgggccagcccccagaacttcacctctgtgtgtgaggagctggtgaacaacgtggaggacctgtctgagaaggtgtgcaagctgaaggacctgatccagaagctgcagaatgaaagagaaaatgaccccacccacatccagctgcgggaggaggtgtccacctggaacagccgcatcctgaagaggacagccatcaccatctgtggcttcggcttcctgctcttcatctgcaagctgaccttccagaggaagtag

SEQ ID NO: 143720 - DNA, 1041 bp, synthetic construct
  misc_feature 1..1041: note = Description of Artificial Sequence: Synthetic coding sequence
  source 1..1041: mol_type = other DNA
atggccatggtgtctgagttcctgaagcaggcctggttcattgaaaatgaggagcaggagtatgtgcagacagtgaagagcagcaaaggaggccctggcagcgctgtgagcccctaccccaccttcaaccccagcagtgatgtggccgccctgcacaaggccatcatggtgaagggcgtggatgaggccaccatcatcgacatcctgaccaagaggaacaatgcccagaggcagcagatcaaggccgcctacctgcaggagaccgggaagcccctggatgagaccctgaagaaggccctgaccggccacctggaggaggtggtgctggccctgctgaagaccccagcccagtttgatgctgatgagctgcgggccgccatgaagggcctgggcacagatgaggacaccctcatcgagatcctggccagcaggaccaacaaggagatccgggacatcaacagagtgtaccgggaggagctgaagagggacctggccaaggacatcaccagtgacaccagcggggacttcagaaatgccctgctgagcctggccaagggggacagaagtgaggactttggagtgaatgaagacctggccgacagtgatgcccgggccctgtatgaagctggggagaggaggaagggcacagatgtgaatgtgttcaacaccatcctgaccaccaggagctacccccagctgcggcgggtcttccagaagtacaccaagtacagcaagcatgacatgaacaaggtgctggacctggagctgaagggggacatcgagaagtgcctgacagccatcgtgaagtgtgccaccagcaagccagccttctttgctgagaagctgcaccaggccatgaagggcgtgggcaccaggcacaaggccctgatccgcatcatggtgagccgctcagaaattgacatgaatgacatcaaggccttctaccagaagatgtatggcatcagcctgtgccaggccatcctggatgagaccaagggggactatgagaagatcctggtggccctgtgtggcggcaactag

SEQ ID NO: 143721 - DNA, 1041 bp, synthetic construct; identical to SEQ ID NO: 143720
  misc_feature 1..1041: note = Description of Artificial Sequence: Synthetic coding sequence
  source 1..1041: mol_type = other DNA

SEQ ID NO: 143722 - DNA, 348 bp, synthetic construct
  misc_feature 1..348: note = Description of Artificial Sequence: Synthetic coding sequence
  source 1..348: mol_type = other DNA
atggccatggtgtctgagttcctgaagcaggcctggttcattgaaaatgaggagcaggagtatgtgcagacagtgaagagcagcaaaggaggccctggcagcgctgtgagcccctaccccaccttcaaccccagcagtgatgtggccgccctgcacaaggccatcatggtgaagggcgtggatgaggccaccatcatcgacatcctgaccaagaggaacaatgcccagaggcagcagatcaaggccgcctacctgcaggagaccgggaagcccctggatgagaccctgaagaaggccctgaccggccacctggaggaggtggtgctggccctgctgaagaccccctag

SEQ ID NO: 143723 - DNA, 615 bp, synthetic construct
  misc_feature 1..615: note = Description of Artificial Sequence: Synthetic coding sequence
  source 1..615: mol_type = other DNA
atgaacctgatcctgcgctacaccttcagcaagatggccatggtgtctgagttcctgaagcaggcctggttcattgaaaatgaggagcaggagtatgtgcagacagtgaagagcagcaagggcggccctggcagcgctgtgagcccctaccccaccttcaaccccagcagtgatgtggccgccctgcacaaggccatcatggtgaagggcgtggatgaggccaccatcatcgacatcctgaccaagagaaataatgcccagaggcagcagatcaaggccgcctacctgcaggagaccgggaagcccctggatgagaccctgaagaaggccctgaccggccacctggaggaggtggtgctggccctgctgaagaccccagcccagtttgatgctgatgagctgcgggccgccatgaagggcctgggcacagatgaggacaccctgattgagatcctggccagcaggaccaacaaggagatccgggacatcaacagagtgtaccgggaggagctgaagagggacctggccaaggacatcaccagtgacaccagcggggacttcagaaatgccctgctgagcctggccaagggggacagaagtgaagattttggatag

SEQ ID NO: 143724 - DNA, 975 bp, synthetic construct
  misc_feature 1..975: note = Description of Artificial Sequence: Synthetic coding sequence
  source 1..975: mol_type = other DNA
atgttctgtggggactatgtgcagggcaccatcttccctgcccccaacttcaaccccatcatggatgcccagatgctgggcggggccctgcagggctttgactgtgacaaggacatgctgatcaacatcctgacccagcgctgcaatgcccagaggatgatgattgctgaggcctaccagagcatgtatggccgggacctgattggagacatgagggagcagctgagtgaccacttcaaggatgtgatggccggcctgatgtaccccccacccctgtatgatgcccacgagctgtggcacgccatgaagggcgtgggcacagatgagaactgcctgattgagatcctggccagcaggaccaatggagagatcttccagatgagggaggcctactgcctgcagtacagcaacaacctgcaggaggacatctacagcgagaccagcggccacttccgggacaccctgatgaacctggtgcagggcacccgggaggagggctacacagatcctgccatggccgcccaggatgccatggtgctgtgggaggcctgccagcagaagacaggagagcacaagaccatgctgcagatgatcctgtgcaacaagagctaccagcagctgcggctggtgttccaggagttccagaacatcagcggccaggacatggtggatgccatcaatgaatgttatgatggctacttccaggagctgctggtggccatcgtgctgtgtgtgcgggacaagccagcctactttgcctaccgcctgtacagcgccatccatgactttggcttccacaacaagacagtcatccgcatcctgattgcccggagtgaaattgacctgctgaccatcaggaagcgctacaaggagagatatggcaagagcctcttccatgacatccggaactttgccagcggccactacaagaaggccctgctggccatctgtgctggagatgctgaggactactag

SEQ ID NO: 143725 - DNA, 975 bp, synthetic construct
  misc_feature 1..975: note = Description of Artificial Sequence: Synthetic coding sequence
  source 1..975: mol_type = other DNA
atgttctgcagcaacctggtgcagggcaccatcttccctgcccccaacttcaaccccatcatggatgcccagatgctgggcggggccctgcagggctttgactgtgacaaggacatgctgatcaacatcctgacccagcgctgcaatgcccagaggatgatgattgctgaggcctaccagagcatgtatggccgggacctgattggagacatgagggagcagctgagtgaccacttcaaggatgtgatggccggcctgatgtaccccccacccctgtatgatgcccacgagctgtggcacgccatgaagggcgtgggcacagatgagaactgcctgattgagatcctggccagcaggaccaatggagagatcttccagatgagggaggcctactgcctgcagtacagcaacaacctgcaggaggacatctacagcgagaccagcggccacttccgggacaccctgatgaacctggtgcagggcacccgggaggagggctacacagatcctgccatggccgcccaggatgccatggtgctgtgggaggcctgccagcagaagacaggagagcacaagaccatgctgcagatgatcctgtgcaacaagagctaccagcagctgcggctggtgttccaggagttccagaacatcagcggccaggacatggtggatgccatcaatgaatgttatgatggctacttccaggagctgctggtggccatcgtgctgtgtgtgcgggacaagccagcctactttgcctaccgcctgtacagcgccatccatgactttggcttccacaacaagacagtcatccgcatcctgattgcccggagtgaaattgacctgctgaccatcaggaagcgctacaaggagagatatggcaagagcctcttccatgacatccggaactttgccagcggccactacaagaaggccctgctggccatctgtgctggagatgctgaggactactag

SEQ ID NO: 143726 - DNA, 1518 bp, synthetic construct
  misc_feature 1..1518: note = Description of Artificial Sequence: Synthetic coding sequence
  source 1..1518: mol_type = other DNA
atgagctacccaggctacccacctcctcctgggggctaccccccagctgcccctgggggcggcccctggggcggggccgcctacccacctcctccttccatgccacccatcggcctggacaacgtggccacctacgccggccagttcaaccaggactacctgagcggcatggccgccaacatgagcggcacctttggaggagccaacatgcccaacctgtacccaggggcccctggggccggctacccacctgtgcccccaggcggcttcggccagcccccatctgcccagcagcctgtgcccccctacggcatgtacccacctcctgggggcaacccccccagcaggatgcccagctacccaccctacccaggggcccctgtgcccggccagcccatgcctcctcctggccagcagcccccaggggcctacccaggccagccccctgtgacctacccaggccagccccctgtgcccctgcccggccagcagcagcctgtgcccagctacccaggctacccaggcagcggcaccgtgaccccagctgtgccccccacccagtttggcagccggggcaccatcacagatgcccctggctttgaccccctgagagatgctgaggtgctgaggaaggccatgaagggcttcggcacagatgagcaggccatcatcgactgcctgggcagccgcagcaacaagcagaggcagcagatcctgctgtccttcaagacagcctacggcaaggacctgatcaaggacctgaagtctgagctgagcggcaactttgagaagaccatcctggccctgatgaagacccctgtgctgtttgacatctatgagatcaaggaggccatcaagggcgtgggcacagatgaggcctgcctgattgagatcctggccagccgcagcaatgagcacatccgggagctgaacagagcctacaaggccgagttcaagaagaccctggaggaggccatccgcagtgacaccagcggccacttccagaggctgctgatcagcctgagccagggcaacagagatgagagcaccaacgtggacatgagcctggcccagagagatgcccaggagctgtatgctgctggagaaaatcggctgggcacagatgagagcaagttcaatgctgtgctgtgcagccgcagccgggcccacctggtggccgtgttcaatgagtaccagaggatgacaggccgggacatcgagaagagcatctgccgggagatgtctggggacctggaggagggcatgctggccgtggtgaagtgcctgaagaacaccccagccttctttgctgagcggctgaacaaggccatgagaggagctggcaccaaggacaggaccctcatccgcatcatggtgagccgctcagaaacagacctgctggacatccgctctgagtacaagaggatgtatggcaagagcctgtaccatgacatcagcggggacaccagcggggactacaggaagatcctgctgaagatctgtggcggcaatgactag

SEQ ID NO: 143727 - DNA, 1518 bp, synthetic construct; identical to SEQ ID NO: 143726
  misc_feature 1..1518: note = Description of Artificial Sequence: Synthetic coding sequence
  source 1..1518: mol_type = other DNA

SEQ ID NO: 143728 - DNA, 489 bp, synthetic construct
  misc_feature 1..489: note = Description of Artificial Sequence: Synthetic coding sequence
  source 1..489: mol_type = other DNA
atgagcctggcccagagagatgcccaggagctgtatgctgctggggagaaccggctgggcacagatgagagcaagttcaatgctgtgctgtgcagccgcagccgggcccacctggtggccgtgttcaatgagtaccagaggatgacaggccgggacatcgagaagagcatctgccgggagatgtctggggacctggaggagggcatgctggccgtggtgaagtgcctgaagaacaccccagccttctttgctgagcggctgaacaaggccatgagaggagctggcaccaaggacaggaccctcatccgcatcatggtgagccgctcagaaacagacctgctggacatccgctctgagtacaagaggatgtatggcaagagcctgtaccatgacatcagcagcatcagctgcatgcctgccagctatggccacctggaggaggccacctgcctggccctgaagctgctgcgggtggagggcaatgactag

SEQ ID NO: 143729 - DNA, 1518 bp, synthetic construct; identical to SEQ ID NO: 143726
  misc_feature 1..1518: note = Description of Artificial Sequence: Synthetic coding sequence
  source 1..1518: mol_type = other DNA

SEQ ID NO: 143730 - DNA, 1518 bp, synthetic construct; identical to SEQ ID NO: 143726
  misc_feature 1..1518: note = Description of Artificial Sequence: Synthetic coding sequence
  source 1..1518: mol_type = other DNA

SEQ ID NO: 143731 - DNA, 1518 bp, synthetic construct; identical to SEQ ID NO: 143726
  misc_feature 1..1518: note = Description of Artificial Sequence: Synthetic coding sequence
  source 1..1518: mol_type = other DNA

SEQ ID NO: 143732 - DNA, 1239 bp, synthetic construct
  misc_feature 1..1239: note = Description of Artificial Sequence: Synthetic coding sequence
  source 1..1239: mol_type = other DNA
atgaggggcagcagcaccaggaccatcagccgggagtgctggaggctgtgggccgcccccctgtgcccagctgcctgcagcagcctgtgggatgtgtccacccccaggaggaagcccaccctgcaggatgccctgatcagcgccatcccctacccaggccagccccctgtgacctacccaggccagccccctgtgcccctgcccggccagcagcagcctgtgcccagctacccaggctacccaggcagcggcaccgtgaccccagctgtgccccccacccagtttggcagccggggcaccatcacagatgcccctggctttgaccccctgagagatgctgaggtgctgaggaaggccatgaagggctttggaacagatgagcaggccatcatcgactgcctgggcagccgcagcaacaagcagaggcagcagatcctgctgtccttcaagacagcctacggcaaggacctgatcaaggacctgaagtctgagctgagcggcaactttgagaagaccatcctggccctgatgaagacccctgtgctgtttgacatctatgagatcaaggaggccatcaagggcgtgggcacagatgaggcctgcctgattgagatcctggccagccgcagcaatgagcacatccgggagctgaacagagcctacaaggccgagttcaagaagaccctggaggaggccatccgcagtgacaccagcggccacttccagaggctgctgatcagcctgagccagggcaacagagatgagagcaccaacgtggacatgagcctggcccagagagatgcccaggagctgtatgctgctggggagaaccggctgggcacagatgagagcaagttcaatgctgtgctgtgcagccgcagccgggcccacctggtggccgtgttcaatgagtaccagaggatgacaggccgggacatcgagaagagcatctgccgggagatgtctggggacctggaggagggcatgctggccgtggtgaagtgcctgaagaacaccccagccttctttgctgagcggctgaacaaggccatgagaggagctggcaccaaggacaggaccctcatccgcatcatggtgagccgctcagaaacagacctgctggacatccgctctgagtacaagaggatgtatggcaagagcctgtaccatgacatcagcggggacaccagcggggactacaggaagatcctgctgaagatctgtggcggcaatgactag

SEQ ID NO: 143733 - DNA, 453 bp, synthetic construct
  misc_feature 1..453: note = Description of Artificial Sequence: Synthetic coding sequence
  source 1..453: mol_type = other DNA
atgagctacccaggctacccacctcctcctgggggctaccccccagctgcccctgggggcggcccctggggcggggccgcctacccacctcctccttccatgccacccatcggcctggacaacgtggccacctacgccggccagttcaaccaggactacctgagcggcatggccgccaacatgagcggcacctttggaggagccaacatgcccaacctgtacccaggggcccctggggccggctacccacctgtgcccccaggcggcttcggccagcccccatctgcccagcagcctgtgcccccctacggcatgtacccacctcctgggggcaacccccccagcaggatgcccagctacccaccctacccaggggcccctgtgcccggccagcccatgcctcctcctggccagcagcccccaggggcctacccaggccagccccctgtgtag

SEQ ID NO: 143734 - DNA, 1518 bp, synthetic construct; identical to SEQ ID NO: 143726
  misc_feature 1..1518: note = Description of Artificial Sequence: Synthetic coding sequence
  source 1..1518: mol_type = other DNA

SEQ ID NO: 143735 - DNA, 615 bp, synthetic construct
  misc_feature 1..615: note = Description of Artificial Sequence: Synthetic coding sequence
  source 1..615: mol_type = other DNA
atgagctacccaggctacccacctcctcctgggggctaccccccagctgcccctgggggcggcccctggggcggggccgcctacccacctcctccttccatgccacccatcggcctggacaacgtggccacctacgccggccagttcaaccaggactacctgagcggcatggccgccaacatgagcggcacctttggaggagccaacatgcccaacctgtacccaggggcccctggggccggctacccacctgtgcccccaggcggcttcggccagcccccatctgcccagcagcctgtgcccccctacggcatgtacccacctcctgggggcaacccccccagcaggatgcccagctacccaccctacccaggggcccctgtgcccggccagcccatgcctcctcctggccagcagcccccaggggcctacccaggccagccccctgtgacctacccaggccagccccctgtgcccctgcccggccagcagcagcctgtgcccagctacccaggctacccaggcagcggcaccgtgaccccagctgtgccccccacccagtttggcagccggggcaccatcacagatgcccctggctttgaccccctgaggtag

SEQ ID NO: 143736 - DNA, 447 bp, synthetic construct
  misc_feature 1..447: note = Description of Artificial Sequence: Synthetic coding sequence
  source 1..447: mol_type = other DNA
tgagaaaatcggctgggcacagatgagagcaagttcaatgctgtgctgtgcagccgcagccgggcccacctggtggccgtgttcaatgagtaccagaggatgacaggccgggacatcgagaagagcatctgccgggagatgtctggggacctggaggagggcatgctggccgtggtgaagtgcctgaagaacaccccagccttctttgctgagcggctgaacaaggccatgagaggagctggcaccaaggacaggaccctcatccgcatcatggtgagccgctcagaaacagacctgctggacatccgctctgagtacaagaggatgtatggcaagagcctgtaccatgacatcagcagcatcagctgcatgcctgccagctatggccacctggaggaggccacctgcctggccctgaagctgctgcgggtggagggcaatgactag

SEQ ID NO: 143737 - DNA, 1518 bp, synthetic construct; identical to SEQ ID NO: 143726
  misc_feature 1..1518: note = Description of Artificial Sequence: Synthetic coding sequence
  source 1..1518: mol_type = other DNA

SEQ ID NO: 143738 - DNA, 1419 bp, synthetic construct
  misc_feature 1..1419: note = Description of Artificial Sequence: Synthetic coding sequence
  source 1..1419: mol_type = other DNA
atgccacccatcggcctggacaacgtggccacctacgccggccagttcaaccaggactacctgagcggcatggccgccaacatgagcggcaccttcggcggggccaacatgcccaacctgtacccaggggcccctggagctggctacccacctgtgcccccaggcggcttcggccagccccccagcgcccagcagcctgtgcccccctacggcatgtacccacctcctgggggcaacccccccagcaggatgcccagctacccaccctacccaggggcccctgtgcccggccagcccatgcctcctcctggccagcagcccccaggggcctacccaggccagccccctgtgacctacccaggccagccccctgtgcccctgcccggccagcagcagcctgtgcccagctacccaggctacccaggcagcggcaccgtgaccccagctgtgccccccacccagtttggcagccggggcaccatcacagatgcccctggctttgaccccctgagagatgctgaggtgctgaggaaggccatgaagggctttggaacagatgagcaggccatcatcgactgcctgggcagccgcagcaacaagcagaggcagcagatcctgctgtccttcaagacagcctacggcaaggacctgatcaaggacctgaagtctgagctgagcggcaactttgagaagaccatcctggccctgatgaagacccctgtgctgtttgacatctatgagatcaaggaggccatcaagggcgtgggcacagatgaggcctgcctgattgagatcctggccagccgcagcaatgagcacatccgggagctgaacagagcctacaaggccgagttcaagaagaccctggaggaggccatccgcagtgacaccagcggccacttccagaggctgctgatcagcctgagccagggcaacagagatgagagcaccaacgtggacatgagcctggcccagagagatgcccaggagctgtatgctgctggggagaaccggctgggcacagatgagagcaagttcaatgctgtgctgtgcagccgcagccgggcccacctggtggccgtgttcaatgagtaccagaggatgacaggccgggacatcgagaagagcatctgccgggagatgtctggggacctggaggagggcatgctggccgtggtgaagtgcctgaagaacaccccagccttctttgctgagcggctgaacaaggccatgagaggagctggcaccaaggacaggaccctcatccgcatcatggtgagccgctcagaaacagacctgctggacatccgctctgagtacaagaggatgtatggcaagagcctgtaccatgacatcagcggggacaccagcggggactacaggaagatcctgctgaagatctgtggcggcaatgactag

SEQ ID NO: 143739 - DNA, 1074 bp, synthetic construct
  misc_feature 1..1074: note = Description of Artificial Sequence: Synthetic coding sequence
  source 1..1074: mol_type = other DNA
atgggccggcagctggccggctgtggagatgctgggaagaaggccagcttcaagatgagcacagtgcatgagatcctgtgcaagctgagcctggagggggaccacagcaccccacccagcgcctacggctctgtgaaggcctacaccaactttgatgctgagagagatgccctgaacatcgagacagccatcaagaccaagggcgtggatgaggtgaccatcgtgaacatcctgaccaacagaagcaatgcccagaggcaggacatcgcctttgcctaccagaggaggaccaagaaggagctggccagcgccctgaagagcgccctgagcggccacctggagaccgtcatcctgggcctgctgaagaccccagcccagtatgatgccagcgagctgaaggcctccatgaagggcctgggcacagatgaggacagcctgattgagatcatctgcagcaggaccaaccaggagctgcaggagatcaacagagtgtacaaggagatgtacaagacagacctggagaaggacatcatcagtgacaccagcggggacttcaggaagctgatggtggccctggccaagggccggcgggcagaagatggcagcgtcatcgactatgagctgattgaccaggatgcccgggacctgtatgatgctggggtgaagaggaagggcacagatgtgcccaagtggatcagcatcatgacagagaggtctgtgccccacctgcagaaggtgtttgaccgctacaagagctacagcccctatgacatgctggagagcatcaggaaggaggtgaagggggacctggagaatgccttcctgaacctggtgcagtgcatccagaacaagcccctgtactttgctgaccggctgtatgacagcatgaagggcaagggcacccgggacaaggtgctgatccgcatcatggtgagccgctctgaggtggacatgctgaagatccgctctgagttcaagaggaaatatggcaagagcctgtactactacatccagcaggacaccaagggggactaccagaaggccctgctgtacctgtgtggaggagatgactag

SEQ ID NO: 143740 - DNA, 1020 bp, synthetic construct
  misc_feature 1..1020: note = Description of Artificial Sequence: Synthetic coding sequence
  source 1..1020: mol_type = other DNA
atgagcacagtgcatgagatcctgtgcaagctgagcctggagggggaccacagcaccccacccagcgcctacggctctgtgaaggcctacaccaactttgatgctgagagagatgccctgaacatcgagacagccatcaagaccaagggcgtggatgaggtgaccatcgtgaacatcctgaccaacagaagcaatgcccagaggcaggacatcgcctttgcctaccagaggaggaccaagaaggagctggccagcgccctgaagagcgccctgagcggccacctggagaccgtcatcctgggcctgctgaagaccccagcccagtatgatgccagcgagctgaaggcctccatgaagggcctgggcacagatgaggacagcctgattgagatcatctgcagcaggaccaaccaggagctgcaggagatcaacagagtgtacaaggagatgtacaagacagacctggagaaggacatcatcagtgacaccagcggggacttcaggaagctgatggtggccctggccaagggccggcgggcagaagatggcagcgtcatcgactatgagctgattgaccaggatgcccgggacctgtatgatgctggggtgaagaggaagggcacagatgtgcccaagtggatcagcatcatgacagagaggtctgtgccccacctgcagaaggtgtttgaccgctacaagagctacagcccctatgacatgctggagagcatcaggaaggaggtgaagggggacctggagaatgccttcctgaacctggtgcagtgcatccagaacaagcccctgtactttgctgaccggctgtatgacagcatgaagggcaagggcacccgggacaaggtgctgatccgcatcatggtgagccgctctgaggtggacatgctgaagatccgctctgagttcaagaggaaatatggcaagagcctgtactactacatccagcaggacaccaagggggactaccagaaggccctgctgtacctgtgtggaggagatgactag

SEQ ID NO: 143741 - DNA, 1020 bp, synthetic construct; identical to SEQ ID NO: 143740
  misc_feature 1..1020: note = Description of Artificial Sequence: Synthetic coding sequence
  source 1..1020: mol_type = other DNA

SEQ ID NO: 143742 - DNA, 1020 bp, synthetic construct; identical to SEQ ID NO: 143740
  misc_feature 1..1020: note = Description of Artificial Sequence: Synthetic coding sequence
  source 1..1020: mol_type = other DNA

SEQ ID NO: 143743 - DNA, 246 bp, synthetic construct
  misc_feature 1..246: note = Description of Artificial Sequence: Synthetic coding sequence
  source 1..246: mol_type = other DNA
atgagcacagtgcatgagatcctgtgcaagctgagcctggagggggaccacagcaccccacccagcgcctacggctctgtgaaggcctacaccaactttgatgctgagagagatgccctgaacatcgagacagccatcaagaccaagggcgtggatgaggtgaccatcgtgaacatcctgaccaacagaagcaatgcccagaggcaggacatcgcctttgcctaccagaggaggaccaagaagtag

SEQ ID NO: 143744 - DNA, 531 bp, synthetic construct
  misc_feature 1..531: note = Description of Artificial Sequence: Synthetic coding sequence
  source 1..531: mol_type = other DNA
atgagcacagtgcatgagatcctgtgcaagctgagcctggagggggaccacagcaccccacccagcgcctacggctctgtgaaggcctacaccaactttgatgctgagagagatgccctgaacatcgagacagccatcaagaccaagggcgtggatgaggtgaccatcgtgaacatcctgaccaacagaagcaatgcccagaggcaggacatcgcctttgcctaccagaggaggaccaagaaggagctggccagcgccctgaagagcgccctgagcggccacctggagaccgtcatcctgggcctgctgaagaccccagcccagtatgatgccagcgagctgaaggcctccatgaagggcctgggcacagatgaggacagcctgattgagatcatctgcagcaggaccaaccaggagctgcaggagatcaacagagtgtacaaggagatgtacaagacagacctggagaaggacatcatcagtgacaccagcggggacttcaggaagctgatggtggccctggccaagtag

SEQ ID NO: 143745 - DNA, 144 bp, synthetic construct
  misc_feature 1..144: note = Description of Artificial Sequence: Synthetic coding sequence
  source 1..144: mol_type = other DNA
atgagcacagtgcatgagatcctgtgcaagctgagcctggagggggaccacagcaccccacccagcgcctacggctctgtgaaggcctacaccaactttgatgctgagagagatgccctgaacatcgagacagccatcaagtag

SEQ ID NO: 143746 - DNA, 405 bp, synthetic construct
  misc_feature 1..405: note = Description of Artificial Sequence: Synthetic coding sequence
  source 1..405: mol_type = other DNA
atgagcacagtgcatgagatcctgtgcaagctgagcctggagggggaccacagcaccccacccagcgcctacggctctgtgaaggcctacaccaactttgatgctgagagagatgccctgaacatcgagacagccatcaagaccaagggcgtggatgaggtgaccatcgtgaacatcctgaccaacagaagcaatgcccagaggcaggacatcgcctttgcctaccagaggaggaccaagaaggagctggccagcgccctgaagagcgccctgagcggccacctggagaccgtcatcctgggcctgctgaagaccccagcccagtatgatgccagcgagctgaaggcctccatgaagggcctgggcacagatgaggacagcctgattgagatcatctgcagctag

SEQ ID NO: 143747 - DNA, 402 bp, synthetic construct
  misc_feature 1..402: note = Description of Artificial Sequence: Synthetic coding sequence
  source 1..402: mol_type = other DNA
atgagcacagtgcatgagatcctgtgcaagctgagcctggagggggaccacagcaccccacccagcgcctacggctctgtgaaggcctacaccaactttgatgctgagagagatgccctgaacatcgagacagccatcaagaccaagggcgtggatgaggtgaccatcgtgaacatcctgaccaacagaagcaatgcccagaggcaggacatcgcctttgcctaccagaggaggaccaagaaggagctggccagcgccctgaagagcgccctgagcggccacctggagaccgtcatcctgggcctgctgaagaccccagcccagtatgatgccagcgagctgaaggcctccatgaagggcctgggcacagatgaggacagcctgattgagatcatctgctag

SEQ ID NO: 143748 - DNA, 450 bp, synthetic construct
  misc_feature 1..450: note = Description of Artificial Sequence: Synthetic coding sequence
  source 1..450: mol_type = other DNA
atgagcacagtgcatgagatcctgtgcaagctgagcctggagggggaccacagcaccccacccagcgcctacggctctgtgaaggcctacaccaactttgatgctgagagagatgccctgaacatcgagacagccatcaagaccaagggcgtggatgaggtgaccatcgtgaacatcctgaccaacagaagcaatgcccagaggcaggacatcgcctttgcctaccagaggaggaccaagaaggagctggccagcgccctgaagagcgccctgagcggccacctggagaccgtcatcctgggcctgctgaagaccccagcccagtatgatgccagcgagctgaaggcctccatgaagggcctgggcacagatgaggacagcctgattgagatcatctgcagcaggaccaaccaggagctgcaggagatcaacagagtgtacaaggagtag

SEQ ID NO: 143749 - DNA, 198 bp, synthetic construct
  misc_feature 1..198: note = Description of Artificial Sequence: Synthetic coding sequence
  source 1..198: mol_type = other DNA
atgagcacagtgcatgagatcctgtgcaagctgagcctggagggggaccacagcaccccacccagcgcctacggctctgtgaaggcctacaccaactttgatgctgagagagatgccctgaacatcgagacagccatcaagaccaagggcgtggatgaggtgaccatcgtgaacatcctgaccaacagaagcaactag

SEQ ID NO: 143750 - DNA, 360 bp, synthetic construct
  misc_feature 1..360: note = Description of Artificial Sequence: Synthetic coding sequence
  source 1..360: mol_type = other DNA
atgagcacagtgcatgagatcctgtgcaagctgagcctggagggggaccacagcaccccacccagcgcctacggctctgtgaaggcctacaccaactttgatgctgagagagatgccctgaacatcgagacagccatcaagaccaagggcgtggatgaggtgaccatcgtgaacatcctgaccaacagaagcaatgcccagaggcaggacatcgcctttgcctaccagaggaggaccaagaaggagctggccagcgccctgaagagcgccctgagcggccacctggagaccgtcatcctgggcctgctgaagaccccagcccagtatgatgccagcgagctgaaggcctccatgaagtag

SEQ ID NO: 143751 - DNA, 771 bp, synthetic construct
  misc_feature 1..771: note = Description of Artificial Sequence: Synthetic coding sequence
  source 1..771: mol_type = other DNA
atgagcacagtgcatgagatcctgtgcaagctgagcctggagggggaccacagcaccccacccagcgcctacggctctgtgaaggcctacaccaactttgatgctgagagagatgccctgaacatcgagacagccatcaagaccaagggcgtggatgaggtgaccatcgtgaacatcctgaccaacagaagcaatgcccagaggcaggacatcgcctttgcctaccagaggaggaccaagaaggagctggccagcgccctgaagagcgccctgagcggccacctggagaccgtcatcctgggcctgctgaagaccccagcccagtatgatgccagcgagctgaaggcctccatgaagggcctgggcacagatgaggacagcctgattgagatcatctgcagcaggaccaaccaggagctgcaggagatcaacagagtgtacaaggagatgtacaagacagacctggagaaggacatcatcagtgacaccagcggggacttcaggaagctgatggtggccctggccaagggccggcgggcagaagatggcagcgtcatcgactatgagctgattgaccaggatgcccgggacctgtatgatgctggggtgaagaggaagggcacagatgtgcccaagtggatcagcatcatgacagagaggtctgtgccccacctgcagaaggtgtttgaccgctacaagagctacagcccctatgacatgctggagagcatcaggaaggaggtgaagggggacctggagaatgccttctag

SEQ ID NO: 143752 - DNA, 360 bp, synthetic construct; identical to SEQ ID NO: 143750
  misc_feature 1..360: note = Description of Artificial Sequence: Synthetic coding sequence
  source 1..360: mol_type = other DNA

SEQ ID NO: 143753 - DNA, 531 bp, synthetic construct; identical to SEQ ID NO: 143744
  misc_feature 1..531: note = Description of Artificial Sequence: Synthetic coding sequence
  source 1..531: mol_type = other DNA

SEQ ID NO: 143754 - DNA, 684 bp, synthetic construct
  misc_feature 1..684: note = Description of Artificial Sequence: Synthetic coding sequence
  source 1..684: mol_type = other DNA
atgagcacagtgcatgagatcctgtgcaagctgagcctggagggggaccacagcaccccacccagcgcctacggctctgtgaaggcctacaccaactttgatgctgagagagatgccctgaacatcgagacagccatcaagaccaagggcgtggatgaggtgaccatcgtgaacatcctgaccaacagaagcaatgcccagaggcaggacatcgcctttgcctaccagaggaggaccaagaaggagctggccagcgccctgaagagcgccctgagcggccacctggagaccgtcatcctgggcctgctgaagaccccagcccagtatgatgccagcgagctgaaggcctccatgaagggcctgggcacagatgaggacagcctgattgagatcatctgcagcaggaccaaccaggagctgcaggagatcaacagagtgtacaaggagatgtacaagacagacctggagaaggacatcatcagtgacaccagcggggacttcaggaagctgatggtggccctggccaagggccggcgggcagaagatggcagcgtcatcgactatgagctgattgaccaggatgcccgggacctgtatgatgctggggtgaagaggaagggcacagatgtgcccaagtggatcagcatcatgacagagaggtctgtgccccacctgcagaagtag

SEQ ID NO: 143755 - DNA, 531 bp, synthetic construct; identical to SEQ ID NO: 143744
  misc_feature 1..531: note = Description of Artificial Sequence: Synthetic coding sequence
  source 1..531: mol_type = other DNA

SEQ ID NO: 143756 - DNA, 333 bp, synthetic construct
  misc_feature 1..333: note = Description of Artificial Sequence: Synthetic coding sequence
  source 1..333: mol_type = other DNA
atgagcacagtgcatgagatcctgtgcaagctgagcctggagggggaccacagcaccccacccagcgcctacggctctgtgaaggcctacaccaactttgatgctgagagagatgccctgaacatcgagacagccatcaagaccaagggcgtggatgaggtgaccatcgtgaacatcctgaccaacagaagcaatgcccagaggcaggacatcgcctttgcctaccagaggaggaccaagaaggagctggccagcgccctgaagagcgccctgagcggccacctggagaccgtcatcctgggcctgctgaagaccccagcccagtatgactag

SEQ ID NO: 143757 - DNA, 972 bp, synthetic construct
  misc_feature 1..972: note = Description of Artificial Sequence: Synthetic coding sequence
  source 1..972: mol_type = other DNA
atggccagcatctgggtgggccaccggggcaccgtgcgggactacccagacttcagccccagcgtggatgctgaggccatccagaaggccatccggggcatcggcacagatgagaagatgctgatcagcatcctgacagagaggagcaatgcccagaggcagctgattgtgaaggagtaccaggccgcctacggcaaggagctgaaggatgacctgaagggggacctgagcggccactttgagcacctgatggtggccctggtgaccccacctgctgtgtttgatgccaagcagctgaagaagtccatgaagggggccggcaccaatgaagatgccctgattgagatcctgaccaccaggaccagccggcagatgaaggacatcagccaggcctactacacagtgtacaagaagagcctgggagatgacatcagcagcgagaccagcggggacttcaggaaggccctgctgaccctggctgatggaagaagagatgagagcctgaaggtggatgagcacctggccaagcaggatgcccagatcctgtacaaggctggagaaaatcgctggggcacagatgaggacaagttcacagagatcctgtgcctgcgctccttcccccagctgaagctgacctttgatgagtacagaaacatcagccagaaggacatcgtggacagcatcaagggggagctgagcggccactttgaggacctgctgctggccatcgtgaactgtgtgaggaacaccccagccttcctggccgagcggctgcaccgggccctgaagggcattggaacagatgagttcaccctgaaccgcatcatggtgagccgctcagaaattgacctgctggacatcagaacagagttcaagaagcactacggctacagcctgtacagcgccatcaagagtgacaccagcggggactatgagatcaccctgctgaagatctgtggaggagatgactag

SEQ ID NO: 143758 - DNA, 405 bp, synthetic construct
  misc_feature 1..405: note = Description of Artificial Sequence: Synthetic coding sequence
  source 1..405: mol_type = other DNA
atggccagcatctgggtgggccaccggggcaccgtgcgggactacccagacttcagccccagcgtggatgctgaggccatccagaaggccatccggggcatcggcacagatgagaagatgctgatcagcatcctgacagagaggagcaatgcccagaggcagctgattgtgaaggagtaccaggccgcctacggcaaggagctgaaggatgacctgaagggggacctgagcggccactttgagcacctgatggtggccctggtgaccccacctgctgtgtttgatgccaagcagctgaagaagtccatgaagggggccggcaccaatgaagatgccctgattgagatcctgaccaccaggaccagccggcagatgaaggacatcagccaggcctactacacctag

SEQ ID NO: 143759 - DNA, 315 bp, synthetic construct
  misc_feature 1..315: note = Description of Artificial Sequence: Synthetic coding sequence
  source 1..315: mol_type = other DNA
atggccagcatctgggtgggccaccggggcaccgtgcgggactacccagacttcagccccagcgtggatgctgaggccatccagaaggccatccggggcatcggcacagatgagaagatgctgatcagcatcctgacagagaggagcaatgcccagaggcagctgattgtgaaggagtaccaggccgcctacggcaaggagctgaaggatgacctgaagggggacctgagcggccactttgagcacctgatggtggccctggtgaccccacctgctgtgtttgatgccaagcagctgaagaagtccatgaagtag

SEQ ID NO: 143760 - DNA, 465 bp, synthetic construct
  misc_feature 1..465: note = Description of Artificial Sequence: Synthetic coding sequence
  source 1..465: mol_type = other DNA
atggccagcatctgggtgggccaccggggcaccgtgcgggactacccagacttcagccccagcgtggatgctgaggccatccagaaggccatccggggcatcggcacagatgagaagatgctgatcagcatcctgacagagaggagcaatgcccagaggcagctgattgtgaaggagtaccaggccgcctacggcaaggagctgaaggatgacctgaagggggacctgagcggccactttgagcacctgatggtggccctggtgaccccacctgctgtgtttgatgccaagcagctgaagaagtccatgaagggggccggcaccaatgaagatgccctgattgagatcctgaccaccaggaccagccggcagatgaaggacatcagccaggcctactacacagtgtacaagaagagcctgggagatgacatcagcagcgagaccagcggggacttcaggaagtag

SEQ ID NO: 143761 - DNA, 966 bp, synthetic construct
  misc_feature 1..966: note = Description of Artificial Sequence: Synthetic coding sequence
  source 1..966: mol_type = other DNA
atggccatggccaccaagggcggcaccgtgaaggccgccagcggcttcaatgccatggaggatgcccagaccctgaggaaggccatgaagggcctgggcacagatgaagatgccatcatctctgtgctggcctacagaaacacagcccagaggcaggagatcagaacagcctacaagagcaccatcggccgggacctgattgatgacctgaagtctgagctgagcggcaactttgagcaggtgattgtgggcatgatgacccccaccgtgctgtatgatgtgcaggagctgcggcgggccatgaagggggccggcacagatgagggctgcctgattgagatcctggccagcaggaccccagaggagatccgccgcatcagccagacctaccagcagcagtatggccgcagcctggaggatgacatccgcagtgacaccagcttcatgttccagagggtgctggtgtccctgtctgctgggggcagagatgagggcaactacctggatgatgccctggtgcggcaggatgcccaggacctgtatgaagctggggagaagaagtggggcacagatgaggtgaagttcctgactgtgctgtgcagcaggaacagaaaccacctgctgcacgtgtttgatgagtacaagaggatcagccagaaggacatcgagcagagcatcaagtctgagaccagcggcagctttgaagatgccctgctggccatcgtgaagtgcatgaggaacaagagcgcctactttgctgagaagctgtacaagtccatgaagggcctgggcacagatgacaacaccctcatccgggtgatggtgtccagagctgagattgacatgctggacatccgggcccacttcaagaggctgtatggcaagagcctgtacagcttcatcaagggggacaccagcggggactacaggaaggtgctgctggtgctgtgtggaggagatgactag

SEQ ID NO: 143762 - DNA, 900 bp, synthetic construct
  misc_feature 1..900: note = Description of Artificial Sequence: Synthetic coding sequence
  source 1..900: mol_type = other DNA
atggccatggccaccaagggcggcaccgtgaaggccgccagcggcttcaatgccatggaggatgcccagaccctgaggaaggccatgaagggcctgggcacagatgaagatgccatcatctctgtgctggcctacagaaacacagcccagaggcaggagatcagaacagcctacaagagcaccatcggccgggacctgattgatgacctgaagtctgagctgagcggcaactttgagcagggcgccggcacagatgagggctgcctgattgagatcctggccagcaggaccccagaggagatccgccgcatcagccagacctaccagcagcagtatggccgcagcctggaggatgacatccgcagtgacaccagcttcatgttccagagggtgctggtgtccctgtctgctgggggcagagatgagggcaactacctggatgatgccctggtgcggcaggatgcccaggacctgtatgaagctggggagaagaagtggggcacagatgaggtgaagttcctgactgtgctgtgcagcaggaacagaaaccacctgctgcacgtgtttgatgagtacaagaggatcagccagaaggacatcgagcagagcatcaagtctgagaccagcggcagctttgaagatgccctgctggccatcgtgaagtgcatgaggaacaagagcgcctactttgctgagaagctgtacaagtccatgaagggcctgggcacagatgacaacaccctcatccgggtgatggtgtccagagctgagattgacatgctggacatccgggcccacttcaagaggctgtatggcaagagcctgtacagcttcatcaagggggacaccagcggggactacaggaaggtgctgctggtgctgtgtggaggagatgactag

SEQ ID NO: 143763 - DNA, 714 bp, synthetic construct
  misc_feature 1..714: note = Description of Artificial Sequence: Synthetic coding sequence
  source 1..714: mol_type = other DNA
atgatgacccccaccgtgctgtatgatgtgcaggagctgcggcgggccatgaagggggccggcacagatgagggctgcctgattgagatcctggccagcaggaccccagaggagatccgccgcatcagccagacctaccagcagcagtatggccgcagcctggaggatgacatccgcagtgacaccagcttcatgttccagagggtgctggtgtccctgtctgctgggggcagagatgagggcaactacctggatgatgccctggtgcggcaggatgcccaggacctgtatgaagctggggagaagaagtggggcacagatgaggtgaagttcctgactgtgctgtgcagcaggaacagaaaccacctgctgcacgtgtttgatgagtacaagaggatcagccagaaggacatcgagcagagcatcaagtctgagaccagcggcagctttgaagatgccctgctggccatcgtgaagtgcatgaggaacaagagcgcctactttgctgagaagctgtacaagtccatgaagggcctgggcacagatgacaacaccctcatccgggtgatggtgtccagagctgagattgacatgctggacatccgggcccacttcaagaggctgtatggcaagagcctgtacagcttcatcaagggggacaccagcggggactacaggaaggtgctgctggtgctgtgtggaggagatgactag

SEQ ID NO: 143764 - DNA, 963 bp, synthetic construct
  misc_feature 1..963: note = Description of Artificial Sequence: Synthetic coding sequence
  source 1..963: mol_type = other DNA
atggcccaggtgctgcggggcaccgtgacagacttccctggctttgatgaaagagcagatgctgagaccctgaggaaggccatgaagggcctgggcacagatgaggagagcatcctgaccctgctgaccagccgcagcaatgcccagaggcaggagatctctgctgccttcaagaccctgtttggccgggacctgctggatgacctgaagtctgagctgaccgggaagtttgagaagctgattgtggccctgatgaagcccagccggctgtatgatgcctatgagctgaagcacgccctgaagggagctggcaccaatgagaaggtgctgacagagatcatcgccagcaggaccccagaggagctgcgggccatcaagcaggtgtatgaggaggagtatggcagcagcctggaggatgatgtggtgggggacaccagcggctactaccagaggatgctggtggtgctgctgcaggccaacagagatcctgatgctggcattgatgaggcccaggtggagcaggatgcccaggccctcttccaggccggggagctgaagtggggcacagatgaggagaagttcatcaccatcttcggcaccaggtctgtgagccacctgaggaaggtgtttgacaagtacatgaccatcagcggcttccagatcgaggagaccatcgaccgggagaccagcggcaacctggagcagctgctgctggccgtggtgaagagcatccgcagcatcccagcctacctggccgagaccctgtactatgccatgaagggggccggcacagatgaccacaccctcatccgggtgatggtgagccgctcagaaattgacctcttcaacatcaggaaggagttcaggaagaactttgccaccagcctgtacagcatgatcaagggggacaccagcggggactacaagaaggccctgctgctgctgtgtggggaggatgactag

SEQ ID NO: 143765 - DNA, 2022 bp, synthetic construct
  misc_feature 1..2022: note = Description of Artificial Sequence: Synthetic coding sequence
  source 1..2022: mol_type = other DNA
atggccaagccagcccagggcgccaagtaccggggcagcatccatgacttccctggctttgaccccaaccaggatgctgaggccctgtacacagccatgaagggcttcggcagtgacaaggaggccatcctggacatcatcaccagccgcagcaaccggcagaggcaggaggtgtgccagagctacaagagcctgtatggcaaggacctgattgctgacctgaagtatgagctgaccgggaagtttgagcggctcatcgtgggcctgatgaggcccccagcctactgtgatgccaaggagatcaaggatgccatcagcggcatcggcacagatgagaagtgcctgattgagatcctggccagcaggaccaatgagcagatgcaccagctggtggccgcctacaaggatgcctatgaaagagacctggaggccgacatcattggagacaccagcggccacttccagaagatgctggtggtgctgctgcagggcacccgggaggaggatgatgtggtgtctgaggacctggtgcagcaggatgtgcaggacctgtatgaagctggggagctgaagtggggcacagatgaggcccagttcatctacatcctgggcaacagaagcaagcagcacctgcggctggtgtttgatgagtacctgaagaccaccgggaagcccatcgaggccagcatccggggggagctgagcggggactttgagaagctgatgctggccgtggtgaagtgcatccgcagcaccccagagtactttgctgagcggctcttcaaggccatgaagggcctgggcacccgggacaacaccctcatccgcatcatggtgagccgctctgagctggacatgctggacatccgggagatcttccgcaccaagtatgagaagagcctgtacagcatgatcaagaatgacaccagcggggagtacaagaagaccctgctgaagctgtctggaggagatgatgatgctgctggccagttcttccctgaggccgcccaggtggcctaccagatgtgggagctgtctgctgtggcccgggtggagctgaagggcaccgtgcggcctgccaatgacttcaacccagatgctgatgccaaggccctgaggaaggccatgaagggcctgggcacagatgaggacaccatcatcgacatcatcacccacaggagcaatgtgcagaggcagcagatccggcagaccttcaagagccacttcggccgggacctgatgacagacctgaagtctgagatcagcggggacctggcccggctcatcctgggcctgatgatgcccccagcccactatgatgccaagcagctgaagaaggccatggagggcgccggcacagatgagaaggccctgattgagatcctggccaccaggaccaatgctgagatccgggccatcaatgaggcctacaaggaggactaccacaagagcctggaggatgccctgagcagtgacaccagcggccacttccgccgcatcctgatcagcctggccaccggccaccgggaggagggcggggagaacctggaccaggccagagaagatgcccaggtggccgctgagatcctggagattgctgacaccccatctggggacaagaccagcctggagacccgcttcatgaccatcctgtgcaccaggagctacccccacctgcggcgggtcttccaggagttcatcaagatgaccaactatgatgtggagcacaccatcaagaaggagatgtctggagatgtgagagatgcctttgtggccatcgtgcagagcgtgaagaacaagcccctcttctttgctgacaagctgtacaagtccatgaagggagctggaacagatgagaagaccctgacccgcatcatggtgagccgctcagaaattgacctgctgaacatccggcgggagttcatcgagaagtatgacaagagcctgcaccaggccattgaaggagacaccagcggggacttcctgaaggccctgctggccctgtgtggcggggaggactag

SEQ ID NO: 143766 - DNA, 2004 bp, synthetic construct
  misc_feature 1..2004: note = Description of Artificial Sequence: Synthetic coding sequence
  source 1..2004: mol_type = other DNA
atggccaagccagcccagggcgccaagtaccggggcagcatccatgacttccctggctttgaccccaaccaggatgctgaggccctgtacacagccatgaagggcttcggcagtgacaaggaggccatcctggacatcatcaccagccgcagcaaccggcagaggcaggaggtgtgccagagctacaagagcctgtatggcaaggacctgattgctgacctgaagtatgagctgaccgggaagtttgagcggctcatcgtgggcctgatgaggcccccagcctactgtgatgccaaggagatcaaggatgccatcagcggcatcggcacagatgagaagtgcctgattgagatcctggccagcaggaccaatgagcagatgcaccagctggtggccgcctacaaggatgcctatgaaagagacctggaggccgacatcattggagacaccagcggccacttccagaagatgctggtggtgctgctgcagggcacccgggaggaggatgatgtggtgtctgaggacctggtgcagcaggatgtgcaggacctgtatgaagctggggagctgaagtggggcacagatgaggcccagttcatctacatcctgggcaacagaagcaagcagcacctgcggctggtgtttgatgagtacctgaagaccaccgggaagcccatcgaggccagcatccggggggagctgagcggggactttgagaagctgatgctggccgtggtgaagtgcatccgcagcaccccagagtactttgctgagcggctcttcaaggccatgaagggcctgggcacccgggacaacaccctcatccgcatcatggtgagccgctctgagctggacatgctggacatccgggagatcttccgcaccaagtatgagaagagcctgtacagcatgatcaagaatgacaccagcggggagtacaagaagaccctgctgaagctgtctggaggagatgatgatgctgctggccagttcttccctgaggccgcccaggtggcctaccagatgtgggagctgtctgctgtggcccgggtggagctgaagggcaccgtgcggcctgccaatgacttcaacccagatgctgatgccaaggccctgaggaaggccatgaagggcctgggcacagatgaggacaccatcatcgacatcatcacccacaggagcaatgtgcagaggcagcagatccggcagaccttcaagagccacttcggccgggacctgatgacagacctgaagtctgagatcagcggggacctggcccggctcatcctgggcctgatgatgcccccagcccactatgatgccaagcagctgaagaaggccatggagggcgccggcacagatgagaaggccctgattgagatcctggccaccaggaccaatgctgagatccgggccatcaatgaggcctacaaggaggactaccacaagagcctggaggatgccctgagcagtgacaccagcggccacttccgccgcatcctgatcagcctggccaccggccaccgggaggagggcggggagaacctggaccaggccagagaagatgcccaggagattgctgacaccccatctggggacaagaccagcctggagacccgcttcatgaccatcctgtgcaccaggagctacccccacctgcggcgggtcttccaggagttcatcaagatgaccaactatgatgtggagcacaccatcaagaaggagatgtctggagatgtgagagatgcctttgtggccatcgtgcagagcgtgaagaacaagcccctcttctttgctgacaagctgtacaagtccatgaagggagctggaacagatgagaagaccctgacccgcatcatggtgagccgctcagaaattgacctgctgaacatccggcgggagttcatcgagaagtatgacaagagcctgcaccaggccattgaaggagacaccagcggggacttcctgaaggccctgctggccctgtgtggcggggaggactag

SEQ ID NO: 143767 - DNA, 333 bp, synthetic construct
  misc_feature 1..333: note = Description of Artificial Sequence: Synthetic coding sequence
  source 1..333: mol_type = other DNA
atggccaagccagcccagggcgccaagtaccggggcagcatccatgacttccctggctttgaccccaaccaggatgctgaggccctgtacacagccatgaagggcttcggcagtgacaaggaggccatcctggacatcatcaccagccgcagcaaccggcagaggcaggaggtgtgccagagctacaagagcctgtatggcaaggacctgattgctgacctgaagtatgagctgaccgggaagtttgagcggctcatcgtgggcctgatgaggcccccagcctactgtgatgccaaggagatcaaggatgccatcagcggcatcggcacctag

SEQ ID NO: 143768 - DNA, 1926 bp, synthetic construct
  misc_feature 1..1926: note = Description of Artificial Sequence: Synthetic coding sequence
  source 1..1926: mol_type = other DNA
atgaagggcttcggcagtgacaaggaggccatcctggacatcatcaccagccgcagcaaccggcagaggcaggaggtgtgccagagctacaagagcctgtatggcaaggacctgattgctgacctgaagtatgagctgaccgggaagtttgagcggctcatcgtgggcctgatgaggcccccagcctactgtgatgccaaggagatcaaggatgccatcagcggcatcggcacagatgagaagtgcctgattgagatcctggccagcaggaccaatgagcagatgcaccagctggtggccgcctacaaggatgcctatgaaagagacctggaggccgacatcattggagacaccagcggccacttccagaagatgctggtggtgctgctgcagggcacccgggaggaggatgatgtggtgtctgaggacctggtgcagcaggatgtgcaggacctgtatgaagctggggagctgaagtggggcacagatgaggcccagttcatctacatcctgggcaacagaagcaagcagcacctgcggctggtgtttgatgagtacctgaagaccaccgggaagcccatcgaggccagcatccggggggagctgagcggggactttgagaagctgatgctggccgtggtgaagtgcatccgcagcaccccagagtactttgctgagcggctcttcaaggccatgaagggcctgggcacccgggacaacaccctcatccgcatcatggtgagccgctctgagctggacatgctggacatccgggagatcttccgcaccaagtatgagaagagcctgtacagcatgatcaagaatgacaccagcggggagtacaagaagaccctgctgaagctgtctggaggagatgatgatgctgctggccagttcttccctgaggccgcccaggtggcctaccagatgtgggagctgtctgctgtggcccgggtggagctgaagggcaccgtgcggcctgccaatgacttcaacccagatgctgatgccaaggccctgaggaaggccatgaagggcctgggcacagatgaggacaccatcatcgacatcatcacccacaggagcaatgtgcagaggcagcagatccggcagaccttcaagagccacttcggccgggacctgatgacagacctgaagtctgagatcagcggggacctggcccggctcatcctgggcctgatgatgcccccagcccactatgatgccaagcagctgaagaaggccatggagggcgccggcacagatgagaaggccctgattgagatcctggccaccaggaccaatgctgagatccgggccatcaatgaggcctacaaggaggactaccacaagagcctggaggatgccctgagcagtgacaccagcggccacttccgccgcatcctgatcagcctggccaccggccaccgggaggagggcggggagaacctggaccaggccagagaagatgcccaggtggccgctgagatcctggagattgctgacaccccatctggggacaagaccagcctggagacccgcttcatgaccatcctgtgcaccaggagctacccccacctgcggcgggtcttccaggagttcatcaagatgaccaactatgatgtggagcacaccatcaagaaggagatgtctggagatgtgagagatgcctttgtggccatcgtgcagagcgtgaagaacaagcccctcttctttgctgacaagctgtacaagtccatgaagggagctggaacagatgagaagaccctgacccgcatcatggtgagccgctcagaaattgacctgctgaacatccggcgggagttcatcgagaagtatgacaagagcctgcaccaggccattgaaggagacaccagcggggacttcctgaaggccctgctggccctgtgtggcggggaggactag

SEQ ID NO: 143769 - DNA, 1644 bp, synthetic construct
  misc_feature 1..1644: note = Description of Artificial Sequence: Synthetic coding sequence
  source 1..1644: mol_type = other DNA
atgcaccagctggtggccgcctacaaggatgcctatgaaagagacctggaggccgacatcattggagacaccagcggccacttccagaagatgctggtggtgctgctgcagggcacccgggaggaggatgatgtggtgtctgaggacctggtgcagcaggatgtgcaggacctgtatgaagctggggagctgaagtggggcacagatgaggcccagttcatctacatcctgggcaacagaagcaagcagcacctgcggctggtgtttgatgagtacctgaagaccaccgggaagcccatcgaggccagcatccggggggagctgagcggggactttgagaagctgatgctggccgtggtgaagtgcatccgcagcaccccagagtactttgctgagcggctcttcaaggccatgaagggcctgggcacccgggacaacaccctcatccgcatcatggtgagccgctctgagctggacatgctggacatccgggagatcttccgcaccaagtatgagaagagcctgtacagcatgatcaagaatgacaccagcggggagtacaagaagaccctgctgaagctgtctggaggagatgatgatgctgctggccagttcttccctgaggccgcccaggtggcctaccagatgtgggagctgtctgctgtggcccgggtggagctgaagggcaccgtgcggcctgccaatgacttcaacccagatgctgatgccaaggccctgaggaaggccatgaagggcctgggcacagatgaggacaccatcatcgacatcatcacccacaggagcaatgtgcagaggcagcagatccggcagaccttcaagagccacttcggccgggacctgatgacagacctgaagtctgagatcagcggggacctggcccggctcatcctgggcctgatgatgcccccagcccactatgatgccaagcagctgaagaaggccatggagggcgccggcacagatgagaaggccctgattgagatcctggccaccaggaccaatgctgagatccgggccatcaatgaggcctacaaggaggactaccacaagagcctggaggatgccctgagcagtgacaccagcggccacttccgccgcatcctgatcagcctggccaccggccaccgggaggagggcggggagaacctggaccaggccagagaagatgcccaggtggccgctgagatcctggagattgctgacaccccatctggggacaagaccagcctggagacccgcttcatgaccatcctgtgcaccaggagctacccccacctgcggcgggtcttccaggagttcatcaagatgaccaactatgatgtggagcacaccatcaagaaggagatgtctggagatgtgagagatgcctttgtggccatcgtgcagagcgtgaagaacaagcccctcttctttgctgacaagctgtacaagtccatgaagggagctggaacagatgagaagaccctgacccgcatcatggtgagccgctcagaaattgacctgctgaacatccggcgggagttcatcgagaagtatgacaagagcctgcaccaggccattgaaggagacaccagcggggacttcctgaaggccctgctggccctgtgtggcggggaggactag

SEQ ID NO: 143770 - DNA, 1467 bp, synthetic construct
  misc_feature 1..1467: note = Description of Artificial Sequence: Synthetic coding sequence
  source 1..1467: mol_type = other DNA
atgagctacccaggctacccacccaccggctacccacccttccctggctaccccccagctggccaggagagcagcttccccccatctggccagtacccctaccccagcggcttcccccccatgggcggcggggcctacccccaggtgcccagcagcggctacccaggagctgggggctacccagcccctgggggctacccagcccctgggggctacccaggggccccccagcccggcggggcccccagctacccaggagtgcccccaggccagggctttggagtgcccccaggaggagctggcttcagcggctacccccagccccccagccagagctatggaggcggccctgcccaggtgcccctgcccggcggcttccctgggggccagatgcccagccagtacccaggcggccagcccacctaccccagccagatcaacacagacagcttcagcagctaccctgtgttcagccctgtgtccctggactacagcagcgagcccgccaccgtgacccaggtgacccagggcaccatccggcctgctgccaactttgatgccatcagagatgctgagatcctgaggaaggccatgaagggctttggaacagatgagcaggccatcgtggatgtggtggccaacagaagcaatgaccagaggcagaagatcaaggccgccttcaagaccagctatggcaaggacctgatcaaggacctgaagtctgagctgagcggcaacatggaggagctgatcctggccctcttcatgccacccacctactatgatgcctggagcctgaggaaggccatgcagggcgccggcacccaggagcgggtgctgattgagatcctgtgcaccaggaccaaccaggagatccgggagatcgtgcgctgctaccagagcgagtttggccgggacctggagaaggacatccgcagtgacaccagcggccactttgagcggctgctggtgtccatgtgccagggcaacagagatgagaaccagagcatcaaccaccagatggcccaggaggatgcccagaggctgtaccaggccggggagggccgcctgggcacagatgagagctgcttcaacatgatcctggccaccaggagcttcccccagctgcgggccaccatggaggcctacagcaggatggccaacagagacctgctgagctctgtgtcccgggagttcagcggctacgtggagagcggcctgaagaccatcctgcagtgtgccctgaacagacctgccttctttgctgagcggctgtactatgccatgaagggggccggcacagatgacagcaccctggtgcgcatcgtggtgaccaggagtgaaattgacctggtgcagatcaagcagatgtttgcccagatgtaccagaagaccctgggcaccatgattgctggggacaccagcggggactacagaaggctgctgctggccatcgtgggccagtag

SEQ ID NO: 143771 - DNA, 1401 bp, synthetic construct
  misc_feature 1..1401: note = Description of Artificial Sequence: Synthetic coding sequence
  source 1..1401: mol_type = other DNA
atgagctacccaggctacccacccaccggctacccacccttccctggctaccccccagctggccaggagagcagcttccccccatctggccagtacccctaccccagcggcttcccccccatgggcggcggggcctacccccaggtgcccagcagcggctacccaggagctgggggctacccagcccctgggggctacccagcccctgggggctacccaggggccccccagcccggcggggcccccagctacccaggagtgcccccaggccagggctttggagtgcccccaggaggagctggcttcagcggctacccccagccccccagccagagctatggaggcggccctgcccaggtgcccctgcccggcggcttccctgggggccagatgcccagccagtacccaggcggccagcccacctaccccagccagcctgccaccgtgacccaggtgacccagggcaccatccggcctgctgccaactttgatgccatcagagatgctgagatcctgaggaaggccatgaagggctttggaacagatgagcaggccatcgtggatgtggtggccaacagaagcaatgaccagaggcagaagatcaaggccgccttcaagaccagctatggcaaggacctgatcaaggacctgaagtctgagctgagcggcaacatggaggagctgatcctggccctcttcatgccacccacctactatgatgcctggagcctgaggaaggccatgcagggcgccggcacccaggagcgggtgctgattgagatcctgtgcaccaggaccaaccaggagatccgggagatcgtgcgctgctaccagagcgagtttggccgggacctggagaaggacatccgcagtgacaccagcggccactttgagcggctgctggtgtccatgtgccagggcaacagagatgagaaccagagcatcaaccaccagatggcccaggaggatgcccagaggctgtaccaggccggggagggccgcctgggcacagatgagagctgcttcaacatgatcctggccaccaggagcttcccccagctgcgggccaccatggaggcctacagcaggatggccaacagagacctgctgagctctgtgtcccgggagttcagcggctacgtggagagcggcctgaagaccatcctgcagtgtgccctgaacagacctgccttctttgctgagcggctgtactatgccatgaagggggccggcacagatgacagcaccctggtgcgcatcgtggtgaccaggagtgaaattgacctggtgcagatcaagcagatgtttgcccagatgtaccagaagaccctgggcaccatgattgctggggacaccagcggggactacagaaggctgctgctggccatcgtgggccagtag

SEQ ID NO: 143772 - DNA, 435 bp, synthetic construct
  misc_feature 1..435: note = Description of Artificial Sequence: Synthetic coding sequence
  source 1..435: mol_type = other DNA
atgagctacccaggctacccacccaccggctacccacccttccctggctaccccccagctggccaggagagcagcttccccccatctggccagtacccctaccccagcggcttcccccccatgggcggcggggcctacccccaggtgcccagcagcggctacccaggagctgggggctacccagcccctgggggctacccagcccctgggggctacccaggggccccccagcccggcggggcccccagctacccaggagtgcccccaggccagggctttggagtgcccccaggaggagctggcttcagcggctacccccagccccccagccagagctatggaggcggccctgcccaggtgcccctgcccggcggcttccctgggggccagatgcccagccagtacccaggcggccagcccacctaccccagctag

SEQ ID NO: 143773 - DNA, 1011 bp, synthetic construct
  misc_feature 1..1011: note = Description of Artificial Sequence: Synthetic coding sequence
  source 1..1011: mol_type = other DNA
atgcccagccagtacccaggcggccagcccacctaccccagccagcctgccaccgtgacccaggtgacccagggcaccatccggcctgctgccaactttgatgccatcagagatgctgagatcctgaggaaggccatgaagggctttggaacagatgagcaggccatcgtggatgtggtggccaacagaagcaatgaccagaggcagaagatcaaggccgccttcaagaccagctatggcaaggacctgatcaaggacctgaagtctgagctgagcggcaacatggaggagctgatcctggccctcttcatgccacccacctactatgatgcctggagcctgaggaaggccatgcagggcgccggcacccaggagcgggtgctgattgagatcctgtgcaccaggaccaaccaggagatccgggagatcgtgcgctgctaccagagcgagtttggccgggacctggagaaggacatccgcagtgacaccagcggccactttgagcggctgctggtgtccatgtgccagggcaacagagatgagaaccagagcatcaaccaccagatggcccaggaggatgcccagaggctgtaccaggccggggagggccgcctgggcacagatgagagctgcttcaacatgatcctggccaccaggagcttcccccagctgcgggccaccatggaggcctacagcaggatggccaacagagacctgctgagctctgtgtcccgggagttcagcggctacgtggagagcggcctgaagaccatcctgcagtgtgccctgaacagacctgccttctttgctgagcggctgtactatgccatgaagggggccggcacagatgacagcaccctggtgcgcatcgtggtgaccaggagtgaaattgacctggtgcagatcaagcagatgtttgcccagatgtaccagaagaccctgggcaccatgattgctggggacaccagcggggactacagaaggctgctgctggccatcgtgggccagtag

SEQ ID NO: 143774 - DNA, 984 bp, synthetic construct
  misc_feature 1..984: note = Description of Artificial Sequence: Synthetic coding sequence
  source 1..984: mol_type = other DNA
atggcctggtggaagtcctggattgagcaggagggcgtgacagtgaagagcagcagccacttcaacccagaccctgatgctgagaccctgtacaaggccatgaagggcatcggcaccaatgagcaggccatcattgatgtgctgaccaagaggagcaacacccagaggcagcagatcgccaagagcttcaaggcccagtttgggaaggacctgacagagaccctgaagtctgagctgagcggcaagtttgagcggctgattgtggccctgatgtacccaccctaccgctatgaggccaaggagctgcatgatgccatgaagggcctgggcaccaaggagggcgtcatcatcgagatcctggccagcaggaccaagaaccagctgcgggagatcatgaaggcctatgaagaagattatggcagcagcctggaggaggacatccaggccgacaccagcggctacctggagcgcatcctggtgtgcctgctgcagggcagcagagatgatgtgagcagctttgtggaccccggcctggccctgcaggatgcccaggacctgtatgctgctggggagaagatccggggcacagatgagatgaagttcatcaccatcctgtgcaccaggtctgccacccacctgctgcgggtgtttgaggagtatgagaagatcgccaacaagagcattgaagattccatcaagtctgagacccacggcagcctggaggaggccatgctgactgtggtgaagtgcacccagaacctgcacagctactttgctgagcggctgtactatgccatgaagggagctggcaccagagatggcaccctcatccggaacatcgtgagccgctcagaaattgacctgaacctgatcaagtgccacttcaagaagatgtatggcaagaccctgagctccatgatcatggaggacaccagcggggactacaagaatgccctgctgagcctggtgggcagtgacccctag

SEQ ID NO: 143775 - DNA, 831 bp, synthetic construct
  misc_feature 1..831: note = Description of Artificial Sequence: Synthetic coding sequence
  source 1..831: mol_type = other DNA
atggcctggtggaagtcctggattgagcaggagggcgtgacagtgaagagcagcagccacttcaacccagaccctgatgctgagaccctgtacaaggccatgaagggcattggagtgggcagccagctgctgagccaccaggccgccgcctttgccttccccagcagcgccctgacctctgtgagcccctggggccagcagggccacctgtgctgcaacccagctggcaccaatgagcaggccatcattgatgtgctgaccaagaggagcaacacccagaggcagcagatcgccaagagcttcaaggcccagtttgggaaggacctgacagagaccctgaagtctgagctgagcggcaagtttgagcggctgattgtggccctgatgtacccaccctaccgctatgaggccaaggagctgcatgatgccatgaagggcagcagagatgatgtgtcctcctttgtggaccccggcctggccctgcaggatgcccaggacctgtatgctgctggggagaagatccggggcacagatgagatgaagttcatcaccatcctgtgcaccaggtctgccacccacctgctgcgggtgaagtgcacccagaacctgcacagctactttgctgagcggctgtactatgccatgaagggggccggcaccagagatggcaccctcatcagaaatattgtgagccgctcagaaattgacctgaacctgatcaagtgccacttcaagaagatgtatggcaagaccctgagctccatgatcatggaggacaccagcggggactacaagaatgccctgctgagcctggtgggcagtgacccctag

SEQ ID NO: 143776 - DNA, 798 bp, synthetic construct
  misc_feature 1..798: note = Description of Artificial Sequence: Synthetic coding sequence
  source 1..798: mol_type = other DNA
atggcctggtggaagtcctgggacctgacagagaccctgaagtctgagctgagcggcaagtttgagcggctgattgtggccctgatgtacccaccctaccgctatgaggccaaggagctgcatgatgccatgaagggcctgggcaccaaggagggcgtcatcatcgagatcctggccagcaggaccaagaaccagctgcgggagatcatgaaggcctatgaagaagattatggcagcagcctggaggaggacatccaggccgacaccagcggctacctggagcgcatcctggtgtgcctgctgcagggcagcagagatgatgtgagcagctttgtggaccccggcctggccctgcaggatgcccaggacctgtatgctgctggggagaagatccggggcacagatgagatgaagttcatcaccatcctgtgcaccaggtctgccacccacctgctgcgggtgtttgaggagtatgagaagatcgccaacaagagcattgaagattccatcaagtctgagacccacggcagcctggaggaggccatgctgactgtggtgaagtgcacccagaacctgcacagctactttgctgagcggctgtactatgccatgaagggagctggcaccagagatggcaccctcatccggaacatcgtgagccgctcagaaattgacctgaacctgatcaagtgccacttcaagaagatgtatggcaagaccctgagctccatgatcatggaggacaccagcggggactacaagaatgccctgctgagcctggtgggcagtgacccctag

SEQ ID NO: 143777 - DNA, 426 bp, synthetic construct
  misc_feature 1..426: note = Description of Artificial Sequence: Synthetic coding sequence
  source 1..426: mol_type = other DNA
atggcctggtggaagtcctggattgagcaggagggcgtgacagtgaagagcagcagccacttcaacccagaccctgatgctgagaccctgtacaaggccatgaagggcatcggcaccaatgagcaggccatcattgatgtgctgaccaagaggagcaacacccagaggcagcagatcgccaagagcttcaaggcccagtttgggaaggacctgacagagaccctgaagtctgagctgagcggcaagtttgagcggctgattgtggccctgatgtacccaccctaccgctatgaggccaaggagctgcatgatgccatgaagggcctgggcaccaaggagggcgtcatcatcgagatcctggccagcaggaccaagaaccagctgcgggagatcatgaaggcctatgaggagggccagcagggctag

SEQ ID NO: 143778 - DNA, 1038 bp, synthetic construct
  misc_feature 1..1038: note = Description of Artificial Sequence: Synthetic coding sequence
  source 1..1038: mol_type = other DNA
atgtctgtgactggaggcaagatggcccccagcctgacccaggagatcctgagccacctgggcctggccagcaagacagctgcctggggcaccctgggcaccctgcggaccttcctgaacttctctgtggacaaggatgcccagaggctgctgcgggccatcaccggccagggcgtggacagaagtgccatcgtggatgtgctgaccaacagaagccgggagcagaggcagctgatcagcaggaacttccaggagaggacccagcaggacctgatgaagagcctgcaggccgccctgagcggcaacctggagcgcatcgtgatggccctgctgcagcccacagcccagtttgatgcccaggagctgaggacagccctgaaggccagtgacagcgctgtggatgtggccatcgagatcctggccaccaggaccccaccccagctgcaggagtgcctggccgtgtacaagcacaacttccaggtggaggccgtggatgacatcaccagcgagaccagcggcatcctgcaggacctgctgctggccctggccaagggcggccgggacagctacagcggcatcatcgactacaacctggccgagcaggatgtgcaggccctgcagagagctgagggccccagccgggaggagacctgggtgcctgtgttcacccagagaaatcctgagcacctgatccgggtgtttgaccagtaccagaggagcacaggccaggagctggaggaggccgtgcagaaccgcttccatggagatgcccaggtggccctgctgggcctggccagcgtcatcaagaacacccccctgtactttgctgacaagctgcaccaggccctgcaggagacagagcccaactaccaggtgctgatccgcatcctgatcagccgctgtgaaacagacctgctgagcatccgggcagagttcaggaagaagtttgggaagagcctgtacagcagcctgcaggatgctgtgaagggggactgccagagcgccctgctggccctgtgcagagctgaggacatgtag

SEQ ID NO: 143779 - DNA, 1929 bp, synthetic construct
  misc_feature 1..1929: note = Description of Artificial Sequence: Synthetic coding sequence
  source 1..1929: mol_type = other DNA
atgctgacccggcccagccaggtgctgctgaacagcctgtctgtggaccctgatgctgagtgcaagtatggcctgtacttcagagatggaagaaggaaggtggactacatcctggtgtaccaccacaagaggcccagcggcaacagaaccctggtgagaagagtgcagcacagcgacacccccagcggggcccggtctgtgaagcaggaccaccccctgcccgggaagggggccagcctggatgctggcagcggggagccccccatggactaccatgaagatgacaagcgcttcagaagagaggagtatgagggcaacctgctggaggccggcctggagctggagagagatgaggacaccaagatccatggagtgggctttgtgaagatccacgccccctggaatgtgctgtgccgggaggccgagttcctgaagctgaagatgcccaccaagaagatgtaccacatcaatgagacccggggcctgctgaagaagatcaacagcgtgctgcagaagatcacagaccccatccagcccaaggtggccgagcaccggccccagaccatgaagaggctgagctaccccttcagccgggagaagcagcacctgtttgacctgagtgacaaggacagcttctttgacagcaagaccaggagcaccatcgtgtatgagatcctgaagaggaccacctgcaccaaggccaagtacagcatgggcatcaccagcctgctggccaacggggtgtatgctgctgcctaccccctgcatgatggagactacaatggagaaaatgtggagttcaatgacaggaagctgctgtatgaggagtgggcccgctatggagtcttctacaagtaccagcccatcgacctggtgaggaagtactttggagagaagattggcctgtactttgcctggctgggcgtgtacacccagatgctgatcccagccagcatcgtgggcatcatcgtgttcctgtatggctgtgccaccatggatgagaacatccccagcatggagatgtgtgaccagaggcacaacatcaccatgtgccccctgtgtgacaagacctgcagctactggaagatgagcagcgcctgtgccacagcccgggccagccacctgtttgacaacccagccaccgtcttcttctctgtgttcatggccctgtgggccgccaccttcatggagcactggaagaggaagcagatgaggctgaactaccgctgggacctgactggatttgaggaggaggaggaccaccccagggcagaatatgaggcccgggtgctggagaagagcctgaagaaggagagcaggaacaaggagacagacaaggtgaagctgacctggagggaccgcttccctgcctacctgaccaacctggtgtccatcatcttcatgattgctgtgacctttgccatcgtgctgggcgtcatcatctaccgcatctccatggccgccgccctggccatgaacagcagccccagcgtgcgcagcaacatccgggtgacagtgacagccacagctgtgatcatcaacctggtggtgatcatcctgctggatgaggtgtatggctgcatcgcccgctggctgaccaagattgaggtgcccaagacagagaagagctttgaggagcggctcatcttcaaggccttcctgctgaagtttgtgaacagctacacccccatcttctacgtggccttcttcaagggccgctttgtgggccggcctggggactatgtgtacatcttccgctccttcaggatggaggaggtgacagagatcctcttcatcagcggcagccccttctgcctggcctatgacctgagcaccccctgcacctgggagaagcagctgcagcacatctgcagcgccaagagcagccgcttcctgtccttcctgctggagaccttcctgttcccctag

SEQ ID NO: 143780 - DNA, 2961 bp, synthetic construct
  misc_feature 1..2961: note = Description of Artificial Sequence: Synthetic coding sequence
  source 1..2961: mol_type = other DNA
atgagggtgaatgagaagtacagcaccctgcctgcagaagatagatctgtgcacatcatcaacatctgtgccatcgaggacatcggctacctgcccagcgagggcaccctgctgaacagcctgtctgtggaccctgatgctgagtgcaagtatggcctgtacttcagagatggaagaaggaaggtggactacatcctggtgtaccaccacaagaggcccagcggcaacagaaccctggtgagaagagtgcagcacagcgacacccccagcggggcccggtctgtgaagcaggaccaccccctgcccgggaagggggccagcctggatgctggcagcggggagccccccatggactaccatgaagatgacaagcgcttcagaagagaggagtatgagggcaacctgctggaggccggcctggagctggagagagatgaggacaccaagatccatggagtgggctttgtgaagatccacgccccctggaatgtgctgtgccgggaggccgagttcctgaagctgaagatgcccaccaagaagatgtaccacatcaatgagacccggggcctgctgaagaagatcaacagcgtgctgcagaagatcacagaccccatccagcccaaggtggccgagcaccggccccagaccatgaagaggctgagctaccccttcagccgggagaagcagcacctgtttgacctgagtgacaaggacagcttctttgacagcaagaccaggagcaccatcgtgtatgagatcctgaagaggaccacctgcaccaaggccaagtacagcatgggcatcaccagcctgctggccaacggggtgtatgctgctgcctaccccctgcatgatggagactacaatggagaaaatgtggagttcaatgacaggaagctgctgtatgaggagtgggcccgctatggagtcttctacaagtaccagcccatcgacctggtgaggaagtactttggagagaagattggcctgtactttgcctggctgggcgtgtacacccagatgctgatcccagccagcatcgtgggcatcatcgtgttcctgtatggctgtgccaccatggatgagaacatccccagcatggagatgtgtgaccagaggcacaacatcaccatgtgccccctgtgtgacaagacctgcagctactggaagatgagcagcgcctgtgccacagcccgggccagccacctgtttgacaacccagccaccgtcttcttctctgtgttcatggccctgtgggccgccaccttcatggagcactggaagaggaagcagatgaggctgaactaccgctgggacctgactggatttgaggaggaggaggaggccgtgaaggaccaccccagggcagaatatgaggcccgggtgctggagaagagcctgaagaaggagagcaggaacaaggagaagagaagacacatccctgaggagagcaccaacaagtggaagcagagggtgaagacagccatggccggcgtgaagctgacagacaaggtgaagctgacctggagggaccgcttccctgcctacctgaccaacctggtgtccatcatcttcatgattgctgtgacctttgccatcgtgctgggcgtcatcatctaccgcatctccatggccgccgccctggccatgaacagcagccccagcgtgcgcagcaacatccgggtgacagtgacagccacagctgtgatcatcaacctggtggtgatcatcctgctggatgaggtgtatggctgcatcgcccgctggctgaccaagattgaggtgcccaagacagagaagagctttgaggagcggctcatcttcaaggccttcctgctgaagtttgtgaacagctacacccccatcttctacgtggccttcttcaagggccgctttgtgggccggcctggggactatgtgtacatcttccgctccttcaggatggaggagtgtgcccctgggggctgcctgatggagctgtgcatccagctgagcatcatcatgctgggcaagcagctgatccagaacaacctgtttgaaattggcatccccaagatgaagaagctgatccgctacctgaagctgaagcagcagagccccccagaccatgaagaatgtgtgaagaggaagcagagatatgaggtggactacaacctggagccctttgctggcctgaccccagagtacatggagatgatcatccagtttggatttgtgaccctgtttgtggccagcttccccctggcccccctgtttgccctgctgaacaacatcatcgagatccggctggatgccaagaagtttgtgacagagctgcggcggcctgtggccgtgcgggccaaggacatcggcatctggtacaacatcctgcggggcatcggcaagctggccgtcatcatcaatgcctttgtgatctccttcaccagtgacttcatcccccggctggtgtacctgtacatgtacagcaagaatggcaccatgcacggctttgtgaaccacaccctgagcagcttcaacgtgtctgacttccagaatggaacagccccaaatgaccccctggacctgggctatgaggtgcagatctgccgctacaaggactaccgggagcccccctggagcgagaacaagtatgacatcagcaaggacttctgggccgtgctggccgcccggctggcctttgtgattgtgttccagaacctggtgatgttcatgtctgactttgtggactgggtgatcccagacatccccaaggacatcagccagcagatccacaaggagaaggtgctgatggtggagctgttcatgagggaggagcaggacaagcagcagctgctggagacctggatggagaaggagcggcagaaggatgagcccccctgcaaccaccacaacaccaaggcctgcccagacagcctgggcagccctgcccccagccacgcctaccacggcggcgtgctgtag

SEQ ID NO: 143781 - DNA, 2523 bp, synthetic construct
  misc_feature 1..2523: note = Description of Artificial Sequence: Synthetic coding sequence
  source 1..2523: mol_type = other DNA
atggactaccatgaagatgacaagcgcttcagaagagaggagtatgagggcaacctgctggaggccggcctggagctggagagagatgaggacaccaagatccatggagtgggctttgtgaagatccacgccccctggaatgtgctgtgccgggaggccgagttcctgaagctgaagatgcccaccaagaagatgtaccacatcaatgagacccggggcctgctgaagaagatcaacagcgtgctgcagaagatcacagaccccatccagcccaaggtggccgagcaccggccccagaccatgaagaggctgagctaccccttcagccgggagaagcagcacctgtttgacctgagtgacaaggacagcttctttgacagcaagaccaggagcaccatcgtgtatgagatcctgaagaggaccacctgcaccaaggccaagtacagcatgggcatcaccagcctgctggccaacggggtgtatgctgctgcctaccccctgcatgatggagactacaatggagaaaatgtggagttcaatgacaggaagctgctgtatgaggagtgggcccgctatggagtcttctacaagtaccagcccatcgacctggtgaggaagtactttggagagaagattggcctgtactttgcctggctgggcgtgtacacccagatgctgatcccagccagcatcgtgggcatcatcgtgttcctgtatggctgtgccaccatggatgagaacatccccagcatggagatgtgtgaccagaggcacaacatcaccatgtgccccctgtgtgacaagacctgcagctactggaagatgagcagcgcctgtgccacagcccgggccagccacctgtttgacaacccagccaccgtcttcttctctgtgttcatggccctgtgggccgccaccttcatggagcactggaagaggaagcagatgaggctgaactaccgctgggacctgactggatttgaggaggaggaggaccaccccagggcagaatatgaggcccgggtgctggagaagagcctgaagaaggagagcaggaacaaggagacagacaaggtgaagctgacctggagggaccgcttccctgcctacctgaccaacctggtgtccatcatcttcatgattgctgtgacctttgccatcgtgctgggcgtcatcatctaccgcatctccatggccgccgccctggccatgaacagcagccccagcgtgcgcagcaacatccgggtgacagtgacagccacagctgtgatcatcaacctggtggtgatcatcctgctggatgaggtgtatggctgcatcgcccgctggctgaccaagattgaggtgcccaagacagagaagagctttgaggagcggctcatcttcaaggccttcctgctgaagtttgtgaacagctacacccccatcttctacgtggccttcttcaagggccgctttgtgggccggcctggggactatgtgtacatcttccgctccttcaggatggaggagtgtgcccctgggggctgcctgatggagctgtgcatccagctgagcatcatcatgctgggcaagcagctgatccagaacaacctgtttgaaattggcatccccaagatgaagaagctgatccgctacctgaagctgaagcagcagagccccccagaccatgaagaatgtgtgaagaggaagcagagatatgaggtggactacaacctggagccctttgctggcctgaccccagagtacatggagatgatcatccagtttggatttgtgaccctgtttgtggccagcttccccctggcccccctgtttgccctgctgaacaacatcatcgagatccggctggatgccaagaagtttgtgacagagctgcggcggcctgtggccgtgcgggccaaggacatcggcatctggtacaacatcctgcggggcatcggcaagctggccgtcatcatcaatgcctttgtgatctccttcaccagtgacttcatcccccggctggtgtacctgtacatgtacagcaagaatggcaccatgcacggctttgtgaaccacaccctgagcagcttcaacgtgtctgacttccagaatggaacagccccaaatgaccccctggacctgggctatgaggtgcagatctgccgctacaaggactaccgggagcccccctggagcgagaacaagtatgacatcagcaaggacttctgggccgtgctggccgcccggctggcctttgtgattgtgttccagaacctggtgatgttcatgtctgactttgtggactgggtgatcccagacatccccaaggacatcagccagcagatccacaaggagaaggtgctgatggtggagctgttcatgagggaggagcaggacaagcagcagctgctggagacctggatggagaaggagcggcagaaggatgagcccccctgcaaccaccacaacaccaaggcctgcccagacagcctgggcagccctgcccccagccacgcctaccacggcggcgtgctgtag

SEQ ID NO: 143782 - DNA, 2523 bp, synthetic construct; identical to SEQ ID NO: 143781
  misc_feature 1..2523: note = Description of Artificial Sequence: Synthetic coding sequence
  source 1..2523: mol_type = other DNA

SEQ ID NO: 143783 - DNA, 2961 bp, synthetic construct
  misc_feature 1..2961: note = Description of Artificial Sequence: Synthetic coding sequence
  source 1..2961: mol_type = other DNA
atgagggtgaatgagaagtacagcaccctgcctgcagaagatagatctgtgcacatcatcaacatctgtgccatcgaggacatcggctacctgcccagcgagggcaccctgctgaacagcctgtctgtggaccctgatgctgagtgcaagtatggcctgtacttcagagatggaagaaggaaggtggactacatcctggtgtaccaccacaagaggcccagcggcaacagaaccctggtgagaagagtgcagcacagcgacacccccagcggggcccggtctgtgaagcaggaccaccccctgcccgggaagggggccagcctggatgctggcagcggggagccccccatggactaccatgaagatgacaagcgcttcagaagagaggagtatgagggcaacctgctggaggccggcctggagctggagagagatgaggacaccaagatccatggagtgggctttgtgaagatccacgccccctggaatgtgctgtgccgggaggccgagttcctgaagctgaagatgcccaccaagaagatgtaccacatcaatgagacccggggcctgctgaagaagatcaacagcgtgctgcagaagatcacagaccccatccagcccaaggtggccgagcaccggccccagaccatgaagaggctgagctaccccttcagccgggagaagcagcacctgtttgacctgagtgacaaggacagcttctttgacagcaagaccaggagcaccatcgtgtatgagatcctgaagaggaccacctgcaccaaggccaagtacagcatgggcatcaccagcctgctggccaacggggtgtatgctgctgcctaccccctgcatgatggagactacaatggagaaaatgtggagttcaatgacaggaagctgctgtatgaggagtgggcccgctatggagtcttctacaagtaccagcccatcgacctggtgaggaagtactttggagagaagattggcctgtactttgcctggctgggcgtgtacacccagatgctgatcccagccagcatcgtgggcatcatcgtgttcctgtatggctgtgccaccatggatgagaacatccccagcatggagatgtgtgaccagaggcacaacatcaccatgtgccccctgtgtgacaagacctgcagctactggaagatgagcagcgcctgtgccacagcccgggccagccacctgtttgacaacccagccaccgtcttcttctctgtgttcatggccctgtgggccgccaccttcatggagcactggaagaggaagcagatgaggctgaactaccgctgggacctgactggatttgaggaggaggagaaggccctgctggaccaccccagggcagaatatgaggcccgggtgctggagaagagcctgaagaaggagagcaggaacaaggagaagagaagacacatccctgaggagagcaccaacaagtggaagcagagggtgaagacagccatggccggcgtgaagctgacagacaaggtgaagctgacctggagggaccgcttccctgcctacctgaccaacctggtgtccatcatcttcatgattgctgtgacctttgccatcgtgctgggcgtcatcatctaccgcatctccatggccgccgccctggccatgaacagcagccccagcgtgcgcagcaacatccgggtgacagtgacagccacagctgtgatcatcaacctggtggtgatcatcctgctggatgaggtgtatggctgcatcgcccgctggctgaccaagattgaggtgcccaagacagagaagagctttgaggagcggctcatcttcaaggccttcctgctgaagtttgtgaacagctacacccccatcttctacgtggccttcttcaagggccgctttgtgggccggcctggggactatgtgtacatcttccgctccttcaggatggaggagtgtgcccctgggggctgcctgatggagctgtgcatccagctgagcatcatcatgctgggcaagcagctgatccagaacaacctgtttgaaattggcatccccaagatgaagaagctgatccgctacctgaagctgaagcagcagagccccccagaccatgaagaatgtgtgaagaggaagcagagatatgaggtggactacaacctggagccctttgctggcctgaccccagagtacatggagatgatcatccagtttggatttgtgaccctgtttgtggccagcttccccctggcccccctgtttgccctgctgaacaacatcatcgagatccggctggatgccaagaagtttgtgacagagctgcggcggcctgtggccgtgcgggccaaggacatcggcatctggtacaacatcctgcggggcatcggcaagctggccgtcatcatcaatgcctttgtgatctccttcaccagtgacttcatcccccggctggtgtacctgtacatgtacagcaagaatggcaccatgcacggctttgtgaaccacaccctgagcagcttcaacgtgtctgacttccagaatggaacagccccaaatgaccccctggacctgggctatgaggtgcagatctgccgctacaaggactaccgggagcccccctggagcgagaacaagtatgacatcagcaaggacttctgggccgtgctggccgcccggctggcctttgtgattgtgttccagaacctggtgatgttcatgtctgactttgtggactgggtgatcccagacatccccaaggacatcagccagcagatccacaaggagaaggtgctgatggtggagctgttcatgagggaggagcaggacaagcagcagctgctggagacctggatggagaaggagcggcagaaggatgagcccccctgcaaccaccacaacaccaaggcctgcccagacagcctgggcagccctgcccccagccacgcctaccacggcggcgtgctgtag

SEQ ID NO: 143784 - DNA, 942 bp, synthetic construct
  misc_feature 1..942: note = Description of Artificial Sequence: Synthetic coding sequence
  source 1..942: mol_type = other DNA
atgctggatgctgccagcaaggcccgggaggcccctgaggccgcccctggctgggatgacccccagggcgagggccggcggggccgcggggagggcctgtcctgggccgtgggcccccacccagaccccggggtgctgatgcagggcgaggtgtggagcggccgcttcagccatgctgtgatccagtttggatttgtgaccctgtttgtggccagcttccccctggcccccctgtttgccctgctgaacaacatcatcgagatccggctggatgccaagaagtttgtgacagagctgcggcggcctgtggccgtgcgggccaaggacatcggcatctggtacaacatcctgcggggcatcggcaagctggccgtcatcatcaatgccttcgtcatctccttcaccagtgacttcatcccccggctggtgtacctgtacatgtacagcaagaatggcaccatgcacggctttgtgaaccacaccctgagcagcttcaacgtgtctgacttccagaatggaacagccccaaatgaccccctggacctgggctatgaggtgcagatctgccgctacaaggactaccgggagcccccctggagcgagaacaagtatgacatcagcaaggacttctgggccgtgctggccgcccggctggccttcgtcatcgtgttccagaacctggtgatgttcatgtctgactttgtggactgggtgatcccagacatccccaaggacatcagccagcagatccacaaggagaaggtgctgatggtggagctgttcatgagggaggagcaggacaagcagcagctgctggagacctggatggagaaggagcggcagaaggatgagcccccctgcaaccaccacaacaccaaggcctgcccagacagcctgggcagccctgcccccagccacgcctaccatggaggagtgctgtag

SEQ ID NO: 143785 - DNA, 2235 bp, synthetic construct
  misc_feature 1..2235: note = Description of Artificial Sequence: Synthetic coding sequence
  source 1..2235: mol_type = other DNA
atgaagaggctgagctaccccttcagccgggagaagcagcacctgtttgacctgagtgacaaggacagcttctttgacagcaagaccaggagcaccatcgtgtatgagatcctgaagaggaccacctgcaccaaggccaagtacagcatgggcatcaccagcctgctggccaacggggtgtatgctgctgcctaccccctgcatgatggagactacaatggagaaaatgtggagttcaatgacaggaagctgctgtatgaggagtgggcccgctatggagtcttctacaagtaccagcccatcgacctggtgaggaagtactttggagagaagattggcctgtactttgcctggctgggcgtgtacacccagatgctgatcccagccagcatcgtgggcatcatcgtgttcctgtatggctgtgccaccatggatgagaacatccccagcatggagatgtgtgaccagaggcacaacatcaccatgtgccccctgtgtgacaagacctgcagctactggaagatgagcagcgcctgtgccacagcccgggccagccacctgtttgacaacccagccaccgtcttcttctctgtgttcatggccctgtgggccgccaccttcatggagcactggaagaggaagcagatgaggctgaactaccgctgggacctgactggatttgaggaggaggagaaggccctgctggaccaccccagggcagaatatgaggcccgggtgctggagaagagcctgaagaaggagagcaggaacaaggagacagacaaggtgaagctgacctggagggaccgcttccctgcctacctgaccaacctggtgtccatcatcttcatgattgctgtgacctttgccatcgtgctgggcgtcatcatctaccgcatctccatggccgccgccctggccatgaacagcagccccagcgtgcgcagcaacatccgggtgacagtgacagccacagctgtgatcatcaacctggtggtgatcatcctgctggatgaggtgtatggctgcatcgcccgctggctgaccaagattgaggtgcccaagacagagaagagctttgaggagcggctcatcttcaaggccttcctgctgaagtttgtgaacagctacacccccatcttctacgtggccttcttcaagggccgctttgtgggccggcctggggactatgtgtacatcttccgctccttcaggatggaggagtgtgcccctgggggctgcctgatggagctgtgcatccagctgagcatcatcatgctgggcaagcagctgatccagaacaacctgtttgaaattggcatccccaagatgaagaagctgatccgctacctgaagctgaagcagcagagccccccagaccatgaagaatgtgtgaagaggaagcagagatatgaggtggactacaacctggagccctttgctggcctgaccccagagtacatggagatgatcatccagtttggatttgtgaccctgtttgtggccagcttccccctggcccccctgtttgccctgctgaacaacatcatcgagatccggctggatgccaagaagtttgtgacagagctgcggcggcctgtggccgtgcgggccaaggacatcggcatctggtacaacatcctgcggggcatcggcaagctggccgtcatcatcaatgcctttgtgatctccttcaccagtgacttcatcccccggctggtgtacctgtacatgtacagcaagaatggcaccatgcacggctttgtgaaccacaccctgagcagcttcaacgtgtctgacttccagaatggaacagccccaaatgaccccctggacctgggctatgaggtgcagatctgccgctacaaggactaccgggagcccccctggagcgagaacaagtatgacatcagcaaggacttctgggccgtgctggccgcccggctggcctttgtgattgtgttccagaacctggtgatgttcatgtctgactttgtggactgggtgatcccagacatccccaaggacatcagccagcagatccacaaggagaaggtgctgatggtggagctgttcatgagggaggagcaggacaagcagcagctgctggagacctggatggagaaggagcggcagaaggatgagcccccctgcaaccaccacaacaccaaggcctgcccagacagcctgggcagccctgcccccagccacgcctaccacggcggcgtgctgtag

SEQ ID NO: 143786 - DNA, 1983 bp, synthetic construct
  misc_feature 1..1983: note = Description of Artificial Sequence: Synthetic coding sequence
  source 1..1983: mol_type = other DNA
atgaaggtgaccctgagcgccctggacaccagcgagagcagcttcacccccctggtggtgattgagctggcccaggatgtgaaggaggagaccaaggagtggctgaagaaccgcatcatcgccaagaagaaggatggaggagcccagctgctcttccggcccctgctgaacaagtatgagcaggagaccctggagaaccagaacctgtacctggtgggcgccagcaagatccgcatgctgctgggcgctgaggccgtgggcctggtgaaggaatgtaatgacaacaccatgagggccttcacctaccgcacccggcagaacttcaagggctttgatgacaacaatgatgacttcctgaccatggccgagtgccagttcatcatcaagcatgagctggagaacctgcgggccaaggatgagaagatgatccctggctacccccaggccaagctgtacccaggcaagagcctgctgcggcggctgctgaccagcggcatcgtcatccaggtgttccccctgcatgacagcgaggccctgaagaagctggaggacacctggtacaccaggtttgccctgaagtaccagcccatcgacagcatccggggctactttggagagaccatcgccctgtacttcggcttcctggagtacttcacctttgccctgatccccatggccgtcatcggcctgccctactacctgtttgtgtgggaggactatgacaagtatgtgatctttgccagcttcaacctgatctggagcaccgtcatcctggagctgtggaagaggggctgtgccaacatgacctaccgctggggcaccctgctgatgaagaggaagtttgaggagccccggcccggcttccatggagtgctgggcatcaacagcatcaccgggaaggaggagcccctgtaccccagctacaagaggcagctgcgcatctacctggtgtccctgccctttgtgtgcctgtgcctgtacttcagcctgtatgtgatgatgatctactttgacatggaggtgtgggccctgggcctgcacgagaacagcggcagcgagtggacctctgtgctgctgtatgtgcccagcatcatctatgccatcgtcatcgagatcatgaaccggctgtaccgctatgctgctgagttcctgacctcctgggagaaccaccggctggagagcgcctaccagaaccacctgatcctgaaggtgctggtgttcaacttcctgaactgctttgccagcctcttctacatcgcctttgtgctgaaggacatgaagctgctgcggcagagcctggccaccctgctgatcaccagccagatcctgaaccagatcatggagagcttcctgccctactggctgcagaggaagcatggagtgcgggtgaagaggaaggtgcaggccctgaaggctgacattgatgccaccctgtatgagcaggtgatcctggagaaggagatgggcacctacctgggcacctttgatgactacctggagctgttcctgcagtttggctacgtgtccctcttcagctgtgtgtaccccctggccgccgcctttgctgtgctgaacaacttcacagaggtgaacagtgatgccctgaagatgtgcagggtcttcaagaggcccttcagcgagcccagcgccaacatcggcgtgtggcagctggcctttgagaccatgtctgtcatctctgtggtgaccaactgtgccctgattggcatgagcccccaggtgaatgctgtgtttcctgagagcaaggctgacctgatcctgattgtggtggccgtggagcacgccctgctggccctgaagttcatcctggcctttgccatcccagacaagcccaggcacatccagatgaagctggcccggctggagtttgagagcctggaggccctgaagcagcagcagatgaagctggtgacagagaacctgaaggaggagcccatggagagcggcaaggagaaggccacctag

SEQ ID NO: 143787 - DNA, 1413 bp, synthetic construct
  misc_feature 1..1413: note = Description of Artificial Sequence: Synthetic coding sequence
  source 1..1413: mol_type = other DNA
atgaaggtgaccctgagcgccctggacaccagcgagagcagcttcacccccctggtggtgattgagctggcccaggatgtgaaggaggagaccaaggagtggctgaagaaccgcatcatcgccaagaagaaggatggaggagcccagctgctcttccggcccctgctgaacaagtatgagcaggagaccctggagaaccagaacctgtacctggtgggcgccagcaagatccgcatgctgctgggcgctgaggccgtgggcctggtgaaggaatgtaatgacaacaccatgagggccttcacctaccgcacccggcagaacttcaagggctttgatgacaacaatgatgacttcctgaccatggccgagtgccagttcatcatcaagcatgagctggagaacctgcgggccaaggatgagaagatgatccctggctacccccaggccaagctgtacccaggcaagagcctgctgcggcggctgctgaccagcggcatcgtcatccaggtgttccccctgcatgacagcgaggccctgaagaagctggaggacacctggtacaccaggtttgccctgaagtaccagcccatcgagaaccaccggctggagagcgcctaccagaaccacctgatcctgaaggtgctggtgttcaacttcctgaactgctttgccagcctcttctacatcgcctttgtgctgaaggacatgaagctgctgcggcagagcctggccaccctgctgatcaccagccagatcctgaaccagatcatggagagcttcctgccctactggctgcagaggaagcatggagtgcgggtgaagaggaaggtgcaggccctgaaggctgacattgatgccaccctgtatgagcaggtgatcctggagaaggagatgggcacctacctgggcacctttgatgactacctggagctgttcctgcagtttggctacgtgtccctcttcagctgtgtgtaccccctggccgccgcctttgctgtgctgaacaacttcacagaggtgaacagtgatgccctgaagatgtgcagggtcttcaagaggcccttcagcgagcccagcgccaacatcggcgtgtggcagctggcctttgagaccatgtctgtcatctctgtggtgaccaactgtgccctgattggcatgagcccccaggtgaatgctgtgtttcctgagagcaaggctgacctgatcctgattgtggtggccgtggagcacgccctgctggccctgaagttcatcctggcctttgccatcccagacaagcccaggcacatccagatgaagctggcccggctggagtttgagagcctggaggccctgaagcagcagcagatgaagctggtgacagagaacctgaaggaggagcccatggagagcggcaaggagaaggccacctag

SEQ ID NO: 143788 - DNA, 423 bp, synthetic construct
  misc_feature 1..423: note = Description of Artificial Sequence: Synthetic coding sequence
  source 1..423: mol_type = other DNA
atgaaggtgaccctgagcgccctggacaccagcgagagcagcttcacccccctggtggtgattgagctggcccaggatgtgaaggaggagaccaaggagtggctgaagaaccgcatcatcgccaagaagaaggatggaggagcccagctgctcttccggcccctgctgaacaagtatgagcaggagaccctggagaaccagaacctgtacctggtgggcgccagcaagatccgcatgctgctgggcgctgaggccgtgggcctggtgaaggaatgtaatgacaacaccatgagggccttcacctaccgcacccggcagaacttcaagggctttgatgacaacaatgatgacttcctgaccatggccgagtgccagttcatcatcaagcatgagctggagaacctgcgggccaaggatgaatag

SEQ ID NO: 143789 - DNA, 339 bp, synthetic construct
  misc_feature 1..339: note = Description of Artificial Sequence: Synthetic coding sequence
  source 1..339: mol_type = other DNA
atgaaggtgaccctgagcgccctggacaccagcgagagcagcttcacccccctggtggtgattgagctggcccaggatgtgaaggaggagaccaaggagtggctgaagaaccgcatcatcgccaagaagaaggatggaggagcccagctgctcttccggcccctgctgaacaagtatgagcaggagaccctggagaaccagaacctgtacctggtgggcgccagcaagatccgcatgctgctgggcgctgaggccgtgggcctggtgaaggaatgtaatgacaacaccatgagggccttcacctaccgcacccggcagaacttcaagggctttgattag

SEQ ID NO: 143790 - DNA, 117 bp, synthetic construct
  misc_feature 1..117: note = Description of Artificial Sequence: Synthetic coding sequence
  source 1..117: mol_type = other DNA
atgaaggtgaccctgagcgccctggacaccagcgagagcagcttcacccccctggtggtgattgagctggcccaggatgtgaaggaggagaccaaggagtggctgaagaacagatag

SEQ ID NO: 143791 - DNA, 405 bp, synthetic construct
  misc_feature 1..405: note = Description of Artificial Sequence: Synthetic coding sequence
  source 1..405: mol_type = other DNA
atgaaggtgaccctgagcgccctggacaccagcgagagcagcttcacccccctggtggtgattgagctggcccaggatgtgaaggaggagaccaaggagtggctgaagaaccgcatcatcgccaagaagaaggatggaggagcccagctgctcttccggcccctgctgaacaagtatgagcaggagaccctggagaaccagaacctgtacctggtgggcgccagcaagatccgcatgctgctgggcgctgaggccgtgggcctggtgaaggaatgtaatgacaacaccatgagggccttcacctaccgcacccggcagaacttcaagggctttgatgacaacaatgatgacttcctgaccatggccgagtgccagttcatcatcaagcatgagctggagaactag

SEQ ID NO: 143792 - DNA, 441 bp, synthetic construct
  misc_feature 1..441: note = Description of Artificial Sequence: Synthetic coding sequence
  source 1..441: mol_type = other DNA
atgaaggtgaccctgagcgccctggacaccagcgagagcagcttcacccccctggtggtgattgagctggcccaggatgtgaaggaggagaccaaggagtggctgaagaaccgcatcatcgccaagaagaaggatggaggagcccagctgctcttccggcccctgctgaacaagtatgagcaggagaccctggagaaccagaacctgtacctggtgggcgccagcaagatccgcatgctgctgggcgctgaggccgtgggcctggtgaaggaatgtaatgacaacaccatgagggccttcacctaccgcacccggcagaacttcaagggctttgatgacaacaatgatgacttcctgaccatggccgagtgccagttcatcatcaagcatgagctggagaacctgcgggccaaggatgagaagatgatccctggctactag

SEQ ID NO: 143793 - DNA, 426 bp, synthetic construct
  misc_feature 1..426: note = Description of Artificial Sequence: Synthetic coding sequence
  source 1..426: mol_type = other DNA
atgaaggtgaccctgagcgccctggacaccagcgagagcagcttcacccccctggtggtgattgagctggcccaggatgtgaaggaggagaccaaggagtggctgaagaaccgcatcatcgccaagaagaaggatggaggagcccagctgctcttccggcccctgctgaacaagtatgagcaggagaccctggagaaccagaacctgtacctggtgggcgccagcaagatccgcatgctgctgggcgctgaggccgtgggcctggtgaaggaatgtaatgacaacaccatgagggccttcacctaccgcacccggcagaacttcaagggctttgatgacaacaatgatgacttcctgaccatggccgagtgccagttcatcatcaagcatgagctggagaacctgcgggccaaggatgagaagtag

SEQ ID NO: 143794 - DNA, 1785 bp, synthetic construct
  misc_feature 1..1785: note = Description of Artificial Sequence: Synthetic coding sequence
  source 1..1785: mol_type = other DNA
atgaaggtgaccctgagcgccctggacaccagcgagagcagcttcacccccctggtggtgattgagctggcccaggatgtgaaggaggagaccaaggagtggctgaagaaccgcatcatcgccaagaagaaggatggagacaacaatgatgacttcctgaccatggccgagtgccagttcatcatcaagcatgagctggagaacctgcgggccaaggatgagaagatgatccctggctacccccaggccaagctgtacccaggcaagagcctgctgcggcggctgctgaccagcggcatcgtcatccaggtgttccccctgcatgacagcgaggccctgaagaagctggaggacacctggtacaccaggtttgccctgaagtaccagcccatcgacagcatccggggctactttggagagaccatcgccctgtacttcggcttcctggagtacttcacctttgccctgatccccatggccgtcatcggcctgccctactacctgtttgtgtgggaggactatgacaagtatgtgatctttgccagcttcaacctgatctggagcaccgtcatcctggagctgtggaagaggggctgtgccaacatgacctaccgctggggcaccctgctgatgaagaggaagtttgaggagccccggcccggcttccatggagtgctgggcatcaacagcatcaccgggaaggaggagcccctgtaccccagctacaagaggcagctgcgcatctacctggtgtccctgccctttgtgtgcctgtgcctgtacttcagcctgtatgtgatgatgatctactttgacatggaggtgtgggccctgggcctgcacgagaacagcggcagcgagtggacctctgtgctgctgtatgtgcccagcatcatctatgccatcgtcatcgagatcatgaaccggctgtaccgctatgctgctgagttcctgacctcctgggagaaccaccggctggagagcgcctaccagaaccacctgatcctgaaggtgctggtgttcaacttcctgaactgctttgccagcctcttctacatcgcctttgtgctgaaggacatgaagctgctgcggcagagcctggccaccctgctgatcaccagccagatcctgaaccagatcatggagagcttcctgccctactggctgcagaggaagcatggagtgcgggtgaagaggaaggtgcaggccctgaaggctgacattgatgccaccctgtatgagcaggtgatcctggagaaggagatgggcacctacctgggcacctttgatgactacctggagctgttcctgcagtttggctacgtgtccctcttcagctgtgtgtaccccctggccgccgcctttgctgtgctgaacaacttcacagaggtgaacagtgatgccctgaagatgtgcagggtcttcaagaggcccttcagcgagcccagcgccaacatcggcgtgtggcagctggcctttgagaccatgtctgtcatctctgtggtgaccaactgtgccctgattggcatgagcccccaggtgaatgctgtgtttcctgagagcaaggctgacctgatcctgattgtggtggccgtggagcacgccctgctggccctgaagttcatcctggcctttgccatcccagacaagcccaggcacatccagatgaagctggcccggctggagtttgagagcctggaggccctgaagcagcagcagatgaagctggtgacagagaacctgaaggaggagcccatggagagcggcaaggagaaggccacctag

SEQ ID NO: 143795 - DNA, 1884 bp, synthetic construct
  misc_feature 1..1884: note = Description of Artificial Sequence: Synthetic coding sequence
  source 1..1884: mol_type = other DNA
atgaaggtgaccctgagcgccctggacaccagcgagagcagcttcacccccctggtggtgattgagctggcccaggatgtgaaggaggagaccaaggagtggctgaagaaccgcatcatcgccaagaagaaggatggaggagcccagctgctcttccggcccctgctgaacaagtatgagcaggagaccctggagaaccagaacctgtacctggtgggcgccagcaagatccgcatgctgctgggcgctgaggccgtgggcctggtgaaggaatgtaatgacaacaccatgagggccttcacctaccgcacccggcagaacttcaagggctttgatgacaacaatgatgacttcctgaccatggccgagtgccagttcatcatcaagcatgagctggagaacctgcgggccaaggatgagaagatgatccctggctacccccaggccaagctgtacccaggcaagagcctgctgcggcggctgctgaccagcggcatcgtcatccaggtgttccccctgcatgacagcgaggccctgaagaagctggaggacacctggtacaccaggtttgccctgaagtaccagcccatcgacagcatccggggctactttggagagaccatcgccctgtacttcggcttcctggagtacttcacctttgccctgatccccatggccgtcatcggcctgccctactacctgtttgtgtgggaggactatgacaagtatgtgatctttgccagcttcaacctgatctggagcaccgtcatcctggagctgtggaagaggggctgtgccaacatgacctaccgctggggcaccctgctgatgaagaggaagtttgaggagccccggcccggcttccatggagtgctgggcatcaacagcatcaccgggaaggaggagcccctgtaccccagctacaagaggcagctgcgcatctacctggtgtccctgccctttgtgtgcctgtgcctgtacttcagcctgtatgtgatgatgatctactttgacatggaggtgtgggccctgggcctgcacgagaacagcggcagcgagtggacctctgtgctgctgtatgtgcccagcatcatctatgccatcgtcatcgagatcatgaaccggctgtaccgctatgctgctgagttcctgacctcctgggagaaccaccggctggagagcgcctaccagaaccacctgatcctgaaggtgctggtgttcaacttcctgaactgctttgccagcctcttctacatcgcctttgtgctgaaggacatgaagctgctgcggcagagcctggccaccctgctgatcaccagccagatcctgaaccagatcatggagagcttcctgccctactggctgcagaggaagcatggagtgcgggtgaagaggaaggtgcaggccctgaaggctgacattgatgccaccctgtatgagcaggtgatcctggagaaggagatgggcacctacctgggcacctttgatgactacctggagctgttcctgcagtttggctacgtgtccctcttcagctgtgtgtaccccctggccgccgcctttgctgtgctgaacaacttcacagaggtgaacagtgatgccctgaagatgtgcagggtcttcaagaggcccttcagcgagcccagcgccaacatcggcgtgtggcagctggcctttgagaccatgtctgtcatctctgtggtgaccaactgtgccctgattggcatgagcccccaggtgaatgctgtgtttcctgagagcaaggctgacctgatcctgattgtggtggccgtggaggccgccagctgcaagctggtgtccctgccccgctacagctggagcaccaacagcgtgcccggcaccgtgattggccctggggtgtag

SEQ ID NO: 143796 - DNA, 1650 bp, synthetic construct
  misc_feature 1..1650: note = Description of Artificial Sequence: Synthetic coding sequence
  source 1..1650: mol_type = other DNA
atgaaggtgaccctgagcgccctggacaccagcgagagcagcttcacccccctggtggtgattgagctggcccaggatgtgaaggaggagaccaaggagtggctgaagaaccgcatcatcgccaagaagaaggatggagtgcggcggctgctgaccagcggcatcgtcatccaggtgttccccctgcatgattctgaggccctgaagaagctggaggacacctggtacaccaggtttgccctgaagtaccagcccatcgacagcatccggggctactttggagagaccatcgccctgtacttcggcttcctggagtacttcacctttgccctgatccccatggctgtgattggcctgccctactacctgtttgtgtgggaggactatgacaagtatgtgatctttgccagcttcaacctgatctggagcaccgtcatcctggagctgtggaagaggggctgtgccaacatgacctaccgctggggcaccctgctgatgaagaggaagtttgaggagcccaggcctggcttccacggcgtgctgggcatcaacagcatcaccgggaaggaggagcccctgtaccccagctacaagaggcagctgcgcatctacctggtgtccctgccctttgtgtgcctgtgcctgtacttcagcctgtatgtgatgatgatctactttgacatggaggtgtgggccctgggcctgcatgaaaattctggcagcgagtggacctctgtgctgctgtatgtgcccagcatcatctatgccatcgtgattgagatcatgaacagactctaccgctatgctgctgagttcctgacctcctgggagaaccaccggctggagagcgcctaccagaaccacctgatcctgaaggtgctggtgttcaacttcctgaactgctttgccagcctcttctacatcgcctttgtgctgaaggacatgaagctgctgcggcagagcctggccaccctgctgatcaccagccagatcctgaaccagatcatggagagcttcctgccctactggctgcagaggaagcacggcgtgcgggtgaagaggaaggtgcaggccctgaaggctgacattgatgccaccctgtatgagcaggtgatcctggagaaggagatgggcacctacctgggcacctttgatgactacctggagctgttcctgcagtttggctacgtgtccctcttcagctgtgtgtaccccctggccgccgcctttgctgtgctgaacaacttcacagaggtgaacagtgatgccctgaagatgtgcagggtcttcaagaggcccttcagcgagcccagcgccaacattggagtgtggcagctggcctttgagaccatgtctgtcatctctgtggtgaccaactgtgccctgattggcatgagcccccaggtgaatgctgtgtttcctgagagcaaggctgacctgatcctgattgtggtggccgtggagcacgccctgctggccctgaagttcatcctggcctttgccatcccagacaagcccaggcacatccagatgaagctggcccggctggagtttgagagcctggaggccctgaagcagcagcagatgaagctggtgacagagaacctgaaggaggagcccatggagagcggcaaggagaaggccacctag

SEQ ID NO: 143797 - DNA, 2997 bp, synthetic construct
  misc_feature 1..2997: note = Description of Artificial Sequence: Synthetic coding sequence
  source 1..2997: mol_type = other DNA
atgcctgaggacatccccctgctgcccggcagcccccggcggctgagcccccaggccggcagcagaggaggccagggccccaagcacggccagcagtgcctgaagatgcctggcccccgggcccctggcctgcagggcggcagcaacagagaccccggccagccctgtggcggggagagcaccaggagcagcagcgtcatcaacaactacctggatgccaatgaacctgtgtccctggaggcccggctgagcaggatgcacttccatgacagccagaggaaggtggactatgtgctggcctaccactacaggaagaggggcgtgcacctggcccagggcttccctggccacagcctggccatcgtgtccaatggagaaacaggcaaggagccccatgctgggggccctggggacatcgagctgggccccctggatgccctggaggaggagaggaaggagcagcgggaggagtttgagcacaacctgatggaggccggcctggagctggagaaggacctggagaacaagagccagggcagcatctttgtgcgcatccacgccccctggcaggtgctggcccgggaggccgagttcctgaagatcaaggtgcccaccaagaagatgtatgagatcaaggccggcggcagcatcgccaagaagttctctgctgccctgcagaagctgagcagccacctgcagccccgggtgcctgagcacagcaacaacaagatgaagaacctgagctaccccttcagccgggagaagatgtacctgtacaacatccaggagaaggacaccttctttgacaatgccaccaggagccgcatcgtgcatgagatcctgaagaggacagcctgcagccgggccaacaacaccatgggcatcaacagcctgattgccaacaacatctatgaggccgcctaccccctgcatgatggagaatatgacagcccagaagatgacatgaatgacaggaagctgctgtaccaggagtgggcccgctatggagtcttctacaagttccagcccatcgacctgatcaggaagtactttggagagaagattggcctgtactttgcctggctgggcctgtacaccagcttcctgatccccagctctgtgattggagtcatcgtgttcctgtatggctgtgccaccatcgaggaggacatccccagccgggagatgtgtgaccagcagaatgccttcaccatgtgccccctgtgtgacaagagctgtgactactggaacctgagcagcgcctgtggcacagcccaggccagccacctgtttgacaacccagccaccgtcttcttcagcatcttcatggccctgtgggccaccatgttcctggagaactggaagaggctgcagatgaggctgggctacttctgggacctgaccggcatcgaggaggaggaggagcgggcccaggagcacagcaggccagaatatgagaccaaggtgcgggagaagatgctgaaggagagcaaccagagcgctgtgcagaagctggagaccaacaccacagaatgtggagatgaagatgatgaggacaagctgacctggaaggaccgcttccctggctacctgatgaactttgccagcatcctcttcatgattgccctgaccttcagcatcgtgtttggagtcatcgtgtaccgcatcaccacagctgctgccctgagcctgaacaaggccaccaggagcaatgtgcgggtgacagtgacagccacagctgtgatcatcaacctggtggtgatcctgatcctggatgagatctatggagctgtggccaagtggctgaccaagattgaggtgcccaagacagagcagacctttgaggagcggctcatcctgaaggccttcctgctgaagtttgtgaatgcctacagccccatcttctacgtggccttcttcaagggccgctttgtgggccggcccggcagctatgtgtatgtgtttgatggctacaggatggaggagtgtgcccctgggggctgcctgatggagctgtgcatccagctgagcatcatcatgctgggcaagcagctgatccagaacaacatctttgaaattggagtgcccaagctgaagaagctgttcaggaagctgaaggatgaaacagaagctggggagacagacagcgcccacagcaagcaccctgagcagtgggacctggactacagcctggagccctacacaggcctgaccccagagtacatggagatgatcatccagtttggatttgtgaccctgtttgtggccagcttccccctggcccctgtgtttgccctgctgaacaacgtgattgaggtgcggctggatgccaagaagtttgtgacagagctgcggcggccagatgctgtgaggaccaaggacatcggcatctggtttgacatcctgtctggaattggcaagttcagcgtcatcagcaatgcctttgtgattgccatcaccagtgacttcatcccccggctggtgtaccagtacagctacagccacaacggcaccctgcacggctttgtgaaccacaccctgtccttcttcaacgtgtcccagctgaaggagggcacccagcctgagaacagccagtttgaccaggaggtgcagttctgccgcttcaaggactaccgggagcccccctgggcccccaacccctatgagttcagcaagcagtactggttcatcctgagcgcccggctggccttcgtcatcatcttccagaacctggtgatgttcctgtctgtgctggtggactggatgatcccagacatccccacagacatcagtgaccagatcaagaaggagaagagcctgctggtggacttcttcctgaaggaggagcacgagaagctgaagctgatggatgagcccgccctgcggagccctgggggcggggacaggagccgcagccgggccgccagcagcgcccccagcggccagagccagctgggctccatgatgagcagcggcagccagcacaccaacgtgtag

SEQ ID NO: 143798 - DNA, 3000 bp, synthetic construct
  misc_feature 1..3000: note = Description of Artificial Sequence: Synthetic coding sequence
  source 1..3000: mol_type = other DNA
atgcctgaggacatccccctgctgcccggcagcccccggcggctgagcccccaggccggcagcagaggaggccagggccccaagcacggccagcagtgcctgaagatgcctggcccccgggcccctggcctgcagggcggcagcaacagagaccccggccagccctgtggcggggagagcaccaggagcagcagcgtcatcaacaactacctggatgccaatgaacctgtgtccctggaggcccggctgagcaggatgcacttccatgacagccagaggaaggtggactatgtgctggcctaccactacaggaagaggggcgtgcacctggcccagggcttccctggccacagcctggccatcgtgtccaatggagaaacaggcaaggagccccatgctgggggccctggggacatcgagctgggccccctggatgccctggaggaggagaggaaggagcagcgggaggagtttgagcacaacctgatggaggccggcctggagctggagaaggacctggagaacaagagccagggcagcatctttgtgcgcatccacgccccctggcaggtgctggcccgggaggccgagttcctgaagatcaaggtgcccaccaagaaggagatgtatgagatcaaggccggcggcagcatcgccaagaagttctctgctgccctgcagaagctgagcagccacctgcagccccgggtgcctgagcacagcaacaacaagatgaagaacctgagctaccccttcagccgggagaagatgtacctgtacaacatccaggagaaggacaccttctttgacaatgccaccaggagcagaattgtgcatgagatcctgaagaggacagcctgcagccgggccaacaacaccatgggcatcaacagcctcatcgccaacaacatctatgaagctgcctaccccctgcatgatggagaatatgacagcccagaagatgacatgaatgacaggaagctgctgtaccaggagtgggcccgctatggagtcttctacaagttccagcccatcgacctgatcaggaagtactttggagagaagattggcctgtactttgcctggctgggcctgtacaccagcttcctgatccccagcagcgtcatcggcgtgattgtgttcctgtatggctgtgccaccatcgaggaggacatccccagccgggagatgtgtgaccagcagaatgccttcaccatgtgccccctgtgtgacaagagctgtgactactggaacctgagcagcgcctgtggcacagcccaggccagccacctgtttgacaacccagccaccgtcttcttcagcatcttcatggccctgtgggccaccatgttcctggagaactggaagaggctgcagatgaggctgggctacttctgggacctgactggaattgaggaggaggaggagcgggcccaggagcacagcaggccagaatatgagaccaaggtgcgggagaagatgctgaaggagagcaaccagagcgctgtgcagaagctggagaccaacaccacagaatgtggagatgaagatgatgaggacaagctgacctggaaggaccgcttccctggctacctgatgaactttgccagcatcctcttcatgattgccctgaccttcagcatcgtgtttggagtgattgtgtaccgcatcaccacagctgctgccctgagcctgaacaaggccaccaggagcaatgtgcgggtgacagtgacagccacagctgtgatcatcaacctggtggtgatcctgatcctggatgagatctacggggctgtggccaagtggctgaccaagattgaggtgcccaagacagagcagacctttgaggagcggctcatcctgaaggccttcctgctgaagtttgtgaatgcctacagccccatcttctacgtggccttcttcaagggccgctttgtgggccggcccggcagctatgtgtatgtgtttgatggctacaggatggaggagtgtgcccctgggggctgcctgatggagctgtgcatccagctgagcatcatcatgctgggcaagcagctgatccagaacaacatctttgaaattggagtgcccaagctgaagaagctgttcaggaagctgaaggatgaaacagaggccggggagacagattctgcccacagcaagcaccctgagcagtgggacctggactacagcctggagccctacacaggcctgaccccagagtacatggagatgatcatccagtttggatttgtgaccctgtttgtggccagcttccccctggcccctgtgtttgccctgctgaacaacgtcatcgaggtgcggctggatgccaagaagtttgtgacagagctgcggcggccagatgctgtgaggaccaaggacatcggcatctggtttgacatcctgagcggcatcggcaagttcagcgtcatcagcaatgccttcgtcatcgccatcaccagtgacttcatcccccggctggtgtaccagtacagctacagccacaacggcaccctgcacggctttgtgaaccacaccctgtccttcttcaacgtgtcccagctgaaggagggcacccagcctgagaacagccagtttgaccaggaggtgcagttctgccgcttcaaggactaccgggagcccccctgggcccccaacccctatgagttcagcaagcagtactggttcatcctgagcgcccggctggcctttgtgatcatcttccagaacctggtgatgttcctgtctgtgctggtggactggatgatcccagacatccccacagacatcagtgaccagatcaagaaggagaagagcctgctggtggacttcttcctgaaggaggagcacgagaagctgaagctgatggatgagcccgccctgcggagccctgggggcggggacaggagccgcagcagagctgccagcagcgcccccagcggccagagccagctgggctccatgatgagcagcggcagccagcacaccaacgtgtag

SEQ ID NO: 143799 - DNA, 3012 bp, synthetic construct
  misc_feature 1..3012: note = Description of Artificial Sequence: Synthetic coding sequence
  source 1..3012: mol_type = other DNA
atggccaccccaggcccccgggacatccccctgctgcccggcagcccccggcggctgagcccccaggccggcagcagaggaggccagggccccaagcacggccagcagtgcctgaagatgcctggcccccgggcccctggcctgcagggcggcagcaacagagaccccggccagccctgtggcggggagagcaccaggagcagcagcgtcatcaacaactacctggatgccaatgaacctgtgtccctggaggcccggctgagcaggatgcacttccatgacagccagaggaaggtggactatgtgctggcctaccactacaggaagaggggcgtgcacctggcccagggcttccctggccacagcctggccatcgtgtccaatggagaaacaggcaaggagccccatgctgggggccctggggacatcgagctgggccccctggatgccctggaggaggagaggaaggagcagcgggaggagtttgagcacaacctgatggaggccggcctggagctggagaaggacctggagaacaagagccagggcagcatctttgtgcgcatccacgccccctggcaggtgctggcccgggaggccgagttcctgaagatcaaggtgcccaccaagaaggagatgtatgagatcaaggccggcggcagcatcgccaagaagttctctgctgccctgcagaagctgagcagccacctgcagccccgggtgcctgagcacagcaacaacaagatgaagaacctgagctaccccttcagccgggagaagatgtacctgtacaacatccaggagaaggacaccttctttgacaatgccaccaggagcagaattgtgcatgagatcctgaagaggacagcctgcagccgggccaacaacaccatgggcatcaacagcctcatcgccaacaacatctatgaagctgcctaccccctgcatgatggagaatatgacagcccagaagatgacatgaatgacaggaagctgctgtaccaggagtgggcccgctatggagtcttctacaagttccagcccatcgacctgatcaggaagtactttggagagaagattggcctgtactttgcctggctgggcctgtacaccagcttcctgatccccagcagcgtcatcggcgtgattgtgttcctgtatggctgtgccaccatcgaggaggacatccccagccgggagatgtgtgaccagcagaatgccttcaccatgtgccccctgtgtgacaagagctgtgactactggaacctgagcagcgcctgtggcacagcccaggccagccacctgtttgacaacccagccaccgtcttcttcagcatcttcatggccctgtgggccaccatgttcctggagaactggaagaggctgcagatgaggctgggctacttctgggacctgactggaattgaggaggaggaggagcgggcccaggagcacagcaggccagaatatgagaccaaggtgcgggagaagatgctgaaggagagcaaccagagcgctgtgcagaagctggagaccaacaccacagaatgtggagatgaagatgatgaggacaagctgacctggaaggaccgcttccctggctacctgatgaactttgccagcatcctcttcatgattgccctgaccttcagcatcgtgtttggagtgattgtgtaccgcatcaccacagctgctgccctgagcctgaacaaggccaccaggagcaatgtgcgggtgacagtgacagccacagctgtgatcatcaacctggtggtgatcctgatcctggatgagatctacggggctgtggccaagtggctgaccaagattgaggtgcccaagacagagcagacctttgaggagcggctcatcctgaaggccttcctgctgaagtttgtgaatgcctacagccccatcttctacgtggccttcttcaagggccgctttgtgggccggcccggcagctatgtgtatgtgtttgatggctacaggatggaggagtgtgcccctgggggctgcctgatggagctgtgcatccagctgagcatcatcatgctgggcaagcagctgatccagaacaacatctttgaaattggagtgcccaagctgaagaagctgttcaggaagctgaaggatgaaacagaggccggggagacagattctgcccacagcaagcaccctgagcagtgggacctggactacagcctggagccctacacaggcctgaccccagagtacatggagatgatcatccagtttggatttgtgaccctgtttgtggccagcttccccctggcccctgtgtttgccctgctgaacaacgtcatcgaggtgcggctggatgccaagaagtttgtgacagagctgcggcggccagatgctgtgaggaccaaggacatcggcatctggtttgacatcctgagcggcatcggcaagttcagcgtcatcagcaatgccttcgtcatcgccatcaccagtgacttcatcccccggctggtgtaccagtacagctacagccacaacggcaccctgcacggctttgtgaaccacaccctgtccttcttcaacgtgtcccagctgaaggagggcacccagcctgagaacagccagtttgaccaggaggtgcagttctgccgcttcaaggactaccgggagcccccctgggcccccaacccctatgagttcagcaagcagtactggttcatcctgagcgcccggctggcctttgtgatcatcttccagaacctggtgatgttcctgtctgtgctggtggactggatgatcccagacatccccacagacatcagtgaccagatcaagaaggagaagagcctgctggtggacttcttcctgaaggaggagcacgagaagctgaagctgatggatgagcccgccctgcggagccctgggggcggggacaggagccgcagcagagctgccagcagcgcccccagcggccagagccagctgggctccatgatgagcagcggcagccagcacaccaacgtgtag

SEQ ID NO: 143800 - DNA, 261 bp, synthetic construct
  misc_feature 1..261: note = Description of Artificial Sequence: Synthetic coding sequence
  source 1..261: mol_type = other DNA
atgttcctgtctgtgctggtggactggatgatcccagacatccccacagacatcagtgaccagatcaagaaggagaagagcctgctggtggacttcttcctgaaggaggagcacgagaagctgaagctgatggatgagcccgccctgcggagccctgggggcggggacaggagccgcagccgggccgccagcagcgcccccagcggccagagccagctgggctccatgatgagcagcggcagccagcacaccaacgtgtag

SEQ ID NO: 143801 - DNA, 3000 bp, synthetic construct
  misc_feature 1..3000: note = Description of Artificial Sequence: Synthetic coding sequence
  source 1..3000: mol_type = other DNA
atgcctgaggacatccccctgctgcccggcagcccccggcggctgagcccccaggccggcagcagaggaggccagggccccaagcacggccagcagtgcctgaagatgcctggcccccgggcccctggcctgcagggcggcagcaacagagaccccggccagccctgtggcggggagagcaccaggagcagcagcgtcatcaacaactacctggatgccaatgaacctgtgtccctggaggcccggctgagcaggatgcacttccatgacagccagaggaaggtggactatgtgctggcctaccactacaggaagaggggcgtgcacctggcccagggcttccctggccacagcctggccatcgtgtccaatggagaaacaggcaaggagccccatgctgggggccctggggacatcgagctgggccccctggatgccctggaggaggagaggaaggagcagcgggaggagtttgagcacaacctgatggaggccggcctggagctggagaaggacctggagaacaagagccagggcagcatctttgtgcgcatccacgccccctggcaggtgctggcccgggaggccgagttcctgaagatcaaggtgcccaccaagaaggagatgtatgagatcaaggccggcggcagcatcgccaagaagttctctgctgccctgcagaagctgagcagccacctgcagccccgggtgcctgagcacagcaacaacaagatgaagaacctgagctaccccttcagccgggagaagatgtacctgtacaacatccaggagaaggacaccttctttgacaatgccaccaggagcagaattgtgcatgagatcctgaagaggacagcctgcagccgggccaacaacaccatgggcatcaacagcctcatcgccaacaacatctatgaagctgcctaccccctgcatgatggagaatatgacagcccagaagatgacatgaatgacaggaagctgctgtaccaggagtgggcccgctatggagtcttctacaagttccagcccatcgacctgatcaggaagtactttggagagaagattggcctgtactttgcctggctgggcctgtacaccagcttcctgatccccagcagcgtcatcggcgtgattgtgttcctgtatggctgtgccaccatcgaggaggacatccccagccgggagatgtgtgaccagcagaatgccttcaccatgtgccccctgtgtgacaagagctgtgactactggaacctgagcagcgcctgtggcacagcccaggccagccacctgtttgacaacccagccaccgtcttcttcagcatcttcatggccctgtgggccaccatgttcctggagaactggaagaggctgcagatgaggctgggctacttctgggacctgactggaattgaggaggaggagccccgggtgcaggagcacagcaggccagaatatgagaccaaggtgcgggagaagatgctgaaggagagcaaccagagcgctgtgcagaagctggagaccaacaccacagaatgtggagatgaagatgatgaggacaagctgacctggaaggaccgcttccctggctacctgatgaactttgccagcatcctcttcatgattgccctgaccttcagcatcgtgtttggagtgattgtgtaccgcatcaccacagctgctgccctgagcctgaacaaggccaccaggagcaatgtgcgggtgacagtgacagccacagctgtgatcatcaacctggtggtgatcctgatcctggatgagatctacggggctgtggccaagtggctgaccaagattgaggtgcccaagacagagcagacctttgaggagcggctcatcctgaaggccttcctgctgaagtttgtgaatgcctacagccccatcttctacgtggccttcttcaagggccgctttgtgggccggcccggcagctatgtgtatgtgtttgatggctacaggatggaggagtgtgcccctgggggctgcctgatggagctgtgcatccagctgagcatcatcatgctgggcaagcagctgatccagaacaacatctttgaaattggagtgcccaagctgaagaagctgttcaggaagctgaaggatgaaacagaggccggggagacagattctgcccacagcaagcaccctgagcagtgggacctggactacagcctggagccctacacaggcctgaccccagagtacatggagatgatcatccagtttggatttgtgaccctgtttgtggccagcttccccctggcccctgtgtttgccctgctgaacaacgtcatcgaggtgcggctggatgccaagaagtttgtgacagagctgcggcggccagatgctgtgaggaccaaggacatcggcatctggtttgacatcctgagcggcatcggcaagttcagcgtcatcagcaatgccttcgtcatcgccatcaccagtgacttcatcccccggctggtgtaccagtacagctacagccacaacggcaccctgcacggctttgtgaaccacaccctgtccttcttcaacgtgtcccagctgaaggagggcacccagcctgagaacagccagtttgaccaggaggtgcagttctgccgcttcaaggactaccgggagcccccctgggcccccaacccctatgagttcagcaagcagtactggttcatcctgagcgcccggctggcctttgtgatcatcttccagaacctggtgatgttcctgtctgtgctggtggactggatgatcccagacatccccacagacatcagtgaccagatcaagaaggagaagagcctgctggtggacttcttcctgaaggaggagcacgagaagctgaagctgatggatgagcccgccctgcggagccctgggggcggggacaggagccgcagcagagctgccagcagcgcccccagcggccagagccagctgggctccatgatgagcagcggcagccagcacaccaacgtgtag

SEQ ID NO: 143802 - DNA, 2742 bp, synthetic construct
  misc_feature 1..2742: note = Description of Artificial Sequence: Synthetic coding sequence
  source 1..2742: mol_type = other DNA
atgggagaccctgacctgctggaggtgctggccgaggagggggagaaggtgaacaagcacatcgactacagcttccagatgtctgagcagagcctgagcagccgggagaccagcttcctgatcaatgaggagaccatgcctgccaagcgcttcaacctcttcctgcggcggcggctgatgttccagaagaaccagcagagcaaggacagcatcttcttcagagatggcatccggcagattgactttgtgctgtcctatgtggatgatgtgaagaaggatgctgagctgaaggccgagaggaggaaggagtttgagaccaacctgaggaagacaggcctggagctggagattgaggacaagagggacagtgaagatggccgcacctactttgtgaagatccacgccccctgggaggtgctggtgacctacgccgaggtgctgggcatcaagatgcccatcaaggagagtgacatcccccggcccaagcacacccccatctcctatgtgctgggccctgtgcggctgcccctgtctgtgaagtacccccaccctgagtacttcaccgcccagttcagccgccaccggcaggagctgttcctgattgaggaccaggccaccttcttccccagcagcagcaggaaccgcatcgtgtactacatcctgagccgctgccccttcggcattgaagatggcaagaagagatttggaattgagcggctgctgaacagcaacacctacagcagcgcctaccccctgcatgatggccagtactggaagcccagcgagccccccaaccccaccaatgaaagatacaccctgcaccagaactgggcccgcttctcctacttctacaaggagcagcccctggacctgatcaagaactactacggggagaagattggcatctactttgtgttcctgggcttctacacagagatgctgttctttgctgctgtggtgggcctggcctgcttcatctacggcctgctgtccatggagcacaacaccagcagcacagagatctgtgaccctgagatcggcggccagatgatcatgtgccccctgtgtgaccaggtgtgtgactactggaggctgaacagcacctgcctggccagcaagttcagccacctgtttgacaatgaaagcacagtgttctttgccatcttcatgggcatctgggtgaccctcttcctggagttctggaagcagaggcaggcccggctggagtatgagtgggacctggtggactttgaggaggagcagcagcagctgcagctgcggcctgagtttgaggccatgtgcaagcacaggaagctgaatgctgtgaccaaggagatggagccctacatgcccctgtacacccgcatcccctggtacttcctgagcggggccaccgtgaccctgtggatgagcctggtggtgacctccatggtggccgtgattgtgtaccgcctgtctgtgtttgccacctttgccagcttcatggagagtgatgccagcctgaagcaggtgaagagcttcctgaccccccagatcaccaccagcctgaccggcagctgcctgaacttcatcgtcatcctgatcctgaacttcttctatgagaagatcagcgcctggatcaccaagatggagatccccaggacctaccaggagtatgagagcagcctgaccctgaagatgttcctgttccagtttgtgaacttctacagcagctgcttctacgtggccttcttcaagggcaagtttgtgggctacccaggcaagtacacctacctgttcaatgagtggaggtctgaggagtgtgaccccggcggctgcctgattgagctgaccacccagctgaccatcatcatgaccgggaagcagatcttcggcaacatcaaggaggccatctaccccctggccctgaactggtggaggaggaggaaggcccggaccaacagcgagaagctgtacagccgctgggagcaggaccatgacctggagagctttggccccctgggcctcttctatgagtacctggagaccgtgacccagtttggatttgtgaccctgtttgtggccagcttccccctggcccccctgctggccctgatcaacaacatcgtggagatccgggtggatgcctggaagctgaccacccagtacagaagaacagtggccagcaaggcccacagcattggagtgtggcaggacatcctgtatggcatggctgtgctgtctgtggccaccaatgccttcatcgtggccttcaccagtgacatcatcccccggctggtgtactactatgcctacagcaccaatgccacccagcccatgacaggctacgtgaacaacagcctgagcgtcttcctgattgctgacttccccaaccacacagcccccagcgagaagagggacttcatcacctgccgctacagagactaccgctaccccccagatgatgagaacaagtacttccacaacatgcagttctggcacgtgctggccgccaagatgaccttcatcatcgtgatggagcacgtggtgttcctggtgaagttcctgctggcctggatgatcccagatgtgcccaaggatgtggtggagcgcatcaagcgggagaagctgatgaccatcaagatcctgcatgactttgagctgaacaagctgaaggagaacctgggcatcaacagcaatgaatttgccaagcacgtgatgattgaggagaacaaggcccagctggccaagagcaccctgtag

SEQ ID NO: 143803 - DNA, 2733 bp, synthetic construct
  misc_feature 1..2733: note = Description of Artificial Sequence: Synthetic coding sequence
  source 1..2733: mol_type = other DNA
atgaagaagatgagcagaaatgtgctgctgcagatggaggaggaggaggatgatgatgatggagacatcgtgctggagaacctgggccagaccatcgtgcctgacctgggcagcctggagagccagcacgacttccgcaccccagagtttgaggagttcaacgggaagccagacagcctcttcttcaatgatggccagaggagaattgactttgtgctggtgtatgaagatgagagcaggaaggagaccaacaagaagggcaccaatgagaagcagaggaggaagaggcaggcctatgagagcaacctgatctgccacggcctgcagctggaggccaccaggtctgtgctggatgacaagctggtgtttgtgaaggtgcacgccccctgggaggtgctgtgcacctatgcagagatcatgcacatcaagctgcccctgaagcccaatgacctgaagaacagaagcagcgccttcggcaccctgaactggttcaccaaggtgctgtctgtggatgagagcatcatcaagccagagcaggagttcttcaccgccccctttgagaagaacaggatgaatgacttctacatcgtggacagagatgccttcttcaacccagccaccaggagcagaattgtgtacttcatcctgagccgggtgaagtaccaggtgatcaacaacgtgtccaagtttggcatcaaccggctggtgaacagcggcatctacaaggccgccttccccctgcatgactgcaagttccggcggcagagcgaggaccccagctgccccaatgaaagatacctgctgtaccgggagtgggcccaccccaggagcatctacaagaagcagcccctggacctgatcaggaagtactatggagagaagattggcatctactttgcctggctgggctactacacccagatgctgctgctggccgctgtggtgggcgtggcctgcttcctgtatggctacctgaaccaggacaactgcacctggagcaaggaggtgtgccacccagacattggaggcaagatcatcatgtgcccccagtgtgaccggctgtgccccttctggaagctgaacatcacctgtgagagcagcaagaagctgtgcatctttgacagctttggcaccctggtgtttgctgtgttcatgggcgtgtgggtgaccctcttcctggagttctggaagaggcggcaggccgagctggagtatgagtgggacacagtggagctgcagcaggaggagcaggcccggccagaatatgaggcccgctgcacccacgtggtgatcaatgagatcacccaggaggaggagcgcatccccttcaccgcctggggcaagtgcatccgcatcaccctgtgtgccagcgctgtgttcttctggatcctgctgatcatcgcctctgtgattggcatcatcgtgtaccgcctgtctgtgttcatcgtgttttctgccaagctgcccaagaacatcaatggaacagaccccatccagaagtacctgaccccccagacagccaccagcatcacagccagcatcatctccttcatcatcatcatgatcctgaacaccatctatgagaaggtggccatcatgatcaccaactttgagctgcccaggacccagacagattatgagaacagcctgaccatgaagatgttcctgttccagtttgtgaactactacagcagctgcttctacatcgccttcttcaagggcaagtttgtgggctacccaggggaccctgtgtactggctgggcaagtacagaaatgaggagtgtgaccccggcggctgcctgctggagctgaccacccagctgaccatcatcatgggcggcaaggccatctggaacaacatccaggaggtgctgctgccctggatcatgaacctgattggccgcttccaccgggtgtctggcagcgagaagatcaccccccgctgggagcaggactaccacctgcagcccatgggcaagctgggcctcttctatgagtacctggagatgatcatccagtttggatttgtgaccctgtttgtggccagcttccccctggcccccctgctggccctggtgaacaacatcctggagatccgggtggatgcctggaagctgaccacccagttccggcggctggtgcctgagaaggcccaggacattggagcctggcagcccatcatgcagggcatcgccatcctggccgtggtgaccaatgccatgatcatcgccttcaccagtgacatgatcccccggctggtgtactactggagcttctctgtgcccccctacggggaccacaccagctacaccatggagggctacatcaacaacaccctgagcatcttcaaggtggccgacttcaagaacaagagcaaaggaaacccctacagcgacctgggcaaccacaccacctgccgctacagagacttccgctacccacctggccacccccaggagtacaagcacaacatctactactggcacgtgattgctgccaagctggccttcatcatcgtgatggagcacgtgatctacagcgtgaagttcttcatctcctatgccatcccagatgtgtccaagaggaccaagagcaagatccagcgggagaagtacctgacccagaagctgctgcacgagaaccacctgaaggacatgaccaagaacatgggcgtgattgctgagaggatgattgaggccgtggacaacaacctgcggcccaagtctgagtag

SEQ ID NO: 143804 - DNA, 2790 bp, synthetic construct
  misc_feature 1..2790: note = Description of Artificial Sequence: Synthetic coding sequence
  source 1..2790: mol_type = other DNA
atgaagaagatgagcagaaatgtgctgctgcagatggaggaggaggaggatgatgatgatggagacatcgtgctggagaacctgggccagaccatcgtgcctgacctgggcagcctggagagccagcacgacttccgcaccccagagtttgaggagttcaacgggaagccagacagcctcttcttcaatgatggccagaggagaattgactttgtgctggtgtatgaagatgagagcaggaaggagaccaacaagaagggcaccaatgagaagcagaggaggaagaggcaggcctatgagagcaacctgatctgccacggcctgcagctggaggccaccaggtctgtgctggatgacaagctggtgtttgtgaaggtgcacgccccctgggaggtgctgtgcacctatgcagagatcatgcacatcaagctgcccctgaagcccaatgacctgaagaacagaagcagcgccttcggcaccctgaactggttcaccaaggtgctgtctgtggatgagagcatcatcaagccagagcaggagttcttcaccgccccctttgagaagaacaggatgaatgacttctacatcgtggacagagatgccttcttcaacccagccaccaggagcagaattgtgtacttcatcctgagccgggtgaagtaccaggtgatcaacaacgtgtccaagtttggcatcaaccggctggtgaacagcggcatctacaaggccgccttccccctgcatgactgcaagttccggcggcagagcgaggaccccagctgccccaatgaaagatacctgctgtaccgggagtgggcccaccccaggagcatctacaagaagcagcccctggacctgatcaggaagtactatggagagaagattggcatctactttgcctggctgggctactacacccagatgctgctgctggccgctgtggtgggcgtggcctgcttcctgtatggctacctgaaccaggacaactgcacctggagcaaggaggtgtgccacccagacattggaggcaagatcatcatgtgcccccagtgtgaccggctgtgccccttctggaagctgaacatcacctgtgagagcagcaagaagctgtgcatctttgacagctttggcaccctggtgtttgctgtgttcatgggcgtgtgggtgaccctcttcctggagttctggaagaggcggcaggccgagctggagtatgagtgggacacagtggagctgcagcaggaggagcaggcccggccagaatatgaggcccgctgcacccacgtggtgatcaatgagatcacccaggaggaggagcgcatccccttcaccgcctggggcaagtgcatccgcatcaccctgtgtgccagcgctgtgttcttctggatcctgctgatcatcgcctctgtgattggcatcatcgtgtaccgcctgtctgtgttcatcgtgttttctgccaagctgcccaagaacatcaatggaacagaccccatccagaagtacctgaccccccagacagccaccagcatcacagccagcatcatctccttcatcatcatcatgatcctgaacaccatctatgagaaggtggccatcatgatcaccaactttgagctgcccaggacccagacagattatgagaacagcctgaccatgaagatgttcctgttccagtttgtgaactactacagcagctgcttctacatcgccttcttcaagggcaagtttgtgggctacccaggggaccctgtgtactggctgggcaagtacagaaatgaggagtgtgaccccggcggctgcctgctggagctgaccacccagctgaccatcatcatgggcggcaaggccatctggaacaacatccaggaggtgctgctgccctggatcatgaacctgattggccgcttccaccgggtgtctggcagcgagaagatcaccccccgctgggagcaggactaccacctgcagcccatgggcaagctgggcctcttctatgagtacctggagatgatcatccagtttggatttgtgaccctgtttgtggccagcttccccctggcccccctgctggccctggtgaacaacatcctggagatccgggtggatgcctggaagctgaccacccagttccggcggctggtgcctgagaaggcccaggacattggagcctggcagcccatcatgcagggcatcgccatcctggccgtggtgaccaatgccatgatcatcgccttcaccagtgacatgatcccccggctggtgtactactggagcttctctgtgcccccctacggggaccacaccagctacaccatggagggctacatcaacaacaccctgagcatcttcaaggtggccgacttcaagaacaagagcaaaggaaacccctacagcgacctgggcaaccacaccacctgccgctacagagacttccgctacccacctggccacccccaggagtacaagcacaacatctactactggcacgtgattgctgccaagctggccttcatcatcgtgatggagtacctggccctgctgccccggctgggccacagcggcatgatcctggcccactgcaacctgcggctgcctgtggactgctgcatgtgctacagatttgtggatgagatccggctgctggagcagctgaccagtgacttcatcgacagcctgtactacatcttcagcatcagcatcatcagcatcttcttctctgtgaccttcttcttcctgctgctgagcctgggccccaccccctgcttctctgtgagcaacttcctgtcctag

SEQ ID NO: 143805 - DNA, 2790 bp, synthetic construct; identical to SEQ ID NO: 143804
  misc_feature 1..2790: note = Description of Artificial Sequence: Synthetic coding sequence
  source 1..2790: mol_type = other DNA

SEQ ID NO: 143806 - DNA, 2679 bp, synthetic construct
  misc_feature 1..2679: note = Description of Artificial Sequence: Synthetic coding sequence
  source 1..2679: mol_type = other DNA
atgttctgtgccgctgtgctggagaacctgggccagaccatcgtgcctgacctgggcagcctggagagccagcacgacttccgcaccccagagtttgaggagttcaacgggaagccagacagcctcttcttcaatgatggccagaggagaattgactttgtgctggtgtatgaagatgagagcaggaaggagaccaacaagaagggcaccaatgagaagcagaggaggaagaggcaggcctatgagagcaacctgatctgccacggcctgcagctggaggccaccaggtctgtgctggatgacaagctggtgtttgtgaaggtgcacgccccctgggaggtgctgtgcacctatgcagagatcatgcacatcaagctgcccctgaagcccaatgacctgaagaacagaagcagcgccttcggcaccctgaactggttcaccaaggtgctgtctgtggatgagagcatcatcaagccagagcaggagttcttcaccgccccctttgagaagaacaggatgaatgacttctacatcgtggacagagatgccttcttcaacccagccaccaggagcagaattgtgtacttcatcctgagccgggtgaagtaccaggtgatcaacaacgtgtccaagtttggcatcaaccggctggtgaacagcggcatctacaaggccgccttccccctgcatgactgcaagttccggcggcagagcgaggaccccagctgccccaatgaaagatacctgctgtaccgggagtgggcccaccccaggagcatctacaagaagcagcccctggacctgatcaggaagtactatggagagaagattggcatctactttgcctggctgggctactacacccagatgctgctgctggccgctgtggtgggcgtggcctgcttcctgtatggctacctgaaccaggacaactgcacctggagcaaggaggtgtgccacccagacattggaggcaagatcatcatgtgcccccagtgtgaccggctgtgccccttctggaagctgaacatcacctgtgagagcagcaagaagctgtgcatctttgacagctttggcaccctggtgtttgctgtgttcatgggcgtgtgggtgaccctcttcctggagttctggaagaggcggcaggccgagctggagtatgagtgggacacagtggagctgcagcaggaggagcaggcccggccagaatatgaggcccgctgcacccacgtggtgatcaatgagatcacccaggaggaggagcgcatccccttcaccgcctggggcaagtgcatccgcatcaccctgtgtgccagcgctgtgttcttctggatcctgctgatcatcgcctctgtgattggcatcatcgtgtaccgcctgtctgtgttcatcgtgttttctgccaagctgcccaagaacatcaatggaacagaccccatccagaagtacctgaccccccagacagccaccagcatcacagccagcatcatctccttcatcatcatcatgatcctgaacaccatctatgagaaggtggccatcatgatcaccaactttgagctgcccaggacccagacagattatgagaacagcctgaccatgaagatgttcctgttccagtttgtgaactactacagcagctgcttctacatcgccttcttcaagggcaagtttgtgggctacccaggggaccctgtgtactggctgggcaagtacagaaatgaggagtgtgaccccggcggctgcctgctggagctgaccacccagctgaccatcatcatgggcggcaaggccatctggaacaacatccaggaggtgctgctgccctggatcatgaacctgattggccgcttccaccgggtgtctggcagcgagaagatcaccccccgctgggagcaggactaccacctgcagcccatgggcaagctgggcctcttctatgagtacctggagatgatcatccagtttggatttgtgaccctgtttgtggccagcttccccctggcccccctgctggccctggtgaacaacatcctggagatccgggtggatgcctggaagctgaccacccagttccggcggctggtgcctgagaaggcccaggacattggagcctggcagcccatcatgcagggcatcgccatcctggccgtggtgaccaatgccatgatcatcgccttcaccagtgacatgatcccccggctggtgtactactggagcttctctgtgcccccctacggggaccacaccagctacaccatggagggctacatcaacaacaccctgagcatcttcaaggtggccgacttcaagaacaagagcaaaggaaacccctacagcgacctgggcaaccacaccacctgccgctacagagacttccgctacccacctggccacccccaggagtacaagcacaacatctactactggcacgtgattgctgccaagctggccttcatcatcgtgatggagcacgtgatctacagcgtgaagttcttcatctcctatgccatcccagatgtgtccaagaggaccaagagcaagatccagcgggagaagtacctgacccagaagctgctgcacgagaaccacctgaaggacatgaccaagaacatgggcgtgattgctgagaggatgattgaggccgtggacaacaacctgcggcccaagtctgagtag

SEQ ID NO: 143807 - DNA, 2796 bp, synthetic construct
  misc_feature 1..2796: note = Description of Artificial Sequence: Synthetic coding sequence
  source 1..2796: mol_type = other DNA
atgaagaagatgagcagaaatgtgctgctgcagatggaggaggaggaggatgatgatgatggagacattggagatgtgcctgccagccggcggcccttcctgaccccccacacccacctgcccagcagcctggtgctggagaacctgggccagaccatcgtgcctgacctgggcagcctggagagccagcacgacttccgcaccccagagtttgaggagttcaacgggaagccagacagcctcttcttcaatgatggccagaggagaattgactttgtgctggtgtatgaagatgagagcaggaaggagaccaacaagaagggcaccaatgagaagcagaggaggaagaggcaggcctatgagagcaacctgatctgccacggcctgcagctggaggccaccaggtctgtgctggatgacaagctggtgtttgtgaaggtgcacgccccctgggaggtgctgtgcacctacgccgagatcatgcacatcaagctgcccctgaagcccaatgacctgaagaacagaagcagcgccttcggcaccctgaactggttcaccaaggtgctgtctgtggatgagagcatcatcaagccagagcaggagttcttcaccgccccctttgagaagaacaggatgaatgacttctacatcgtggacagagatgccttcttcaacccagccaccaggagccgcatcgtgtacttcatcctgagccgggtgaagtaccaggtgatcaacaacgtgtccaagtttggcatcaaccggctggtgaacagcggcatctacaaggccgccttccccctgcatgactgcaagttccggcggcagagcgaggaccccagctgccccaatgaaagatacctgctgtaccgggagtgggcccaccccaggagcatctacaagaagcagcccctggacctgatcaggaagtactacggggagaagattggcatctactttgcctggctgggctactacacccagatgctgctgctggccgctgtggtgggcgtggcctgcttcctgtatggctacctgaaccaggacaactgcacctggagcaaggaggtgtgccacccagacatcggcggcaagatcatcatgtgcccccagtgtgaccggctgtgccccttctggaagctgaacatcacctgtgagagcagcaagaagctgtgcatctttgacagctttggcaccctggtgtttgctgtgttcatgggcgtgtgggtgaccctcttcctggagttctggaagaggcggcaggccgagctggagtatgagtgggacacagtggagctgcagcaggaggagcaggcccggccagaatatgaggcccgctgcacccacgtggtgatcaatgagatcacccaggaggaggagcgcatccccttcaccgcctggggcaagtgcatccgcatcaccctgtgtgccagcgctgtgttcttctggatcctgctgatcatcgccagcgtcatcggcatcatcgtgtaccgcctgagcgtcttcatcgtgttcagcgccaagctgcccaagaacatcaatggaacagaccccatccagaagtacctgaccccccagacagccaccagcatcacagccagcatcatctccttcatcatcatcatgatcctgaacaccatctatgagaaggtggccatcatgatcaccaactttgagctgcccaggacccagacagattatgagaacagcctgaccatgaagatgttcctgttccagtttgtgaactactacagcagctgcttctacatcgccttcttcaagggcaagtttgtgggctacccaggggaccctgtgtactggctgggcaagtacagaaatgaagaatgtgaccccggcggctgcctgctggagctgaccacccagctgaccatcatcatgggcggcaaggccatctggaacaacatccaggaggtgctgctgccctggatcatgaacctgattggccgcttccaccgggtgtctggcagcgagaagatcaccccccgctgggagcaggactaccacctgcagcccatgggcaagctgggcctcttctatgagtacctggagatgatcatccagtttggatttgtgaccctgtttgtggccagcttccccctggcccccctgctggccctggtgaacaacatcctggagatccgggtggatgcctggaagctgaccacccagttccggcggctggtgcctgagaaggcccaggacatcggggcctggcagcccatcatgcagggcatcgccatcctggccgtggtgaccaatgccatgatcatcgccttcaccagtgacatgatcccccggctggtgtactactggagcttctctgtgcccccctatggagaccacaccagctacaccatggagggctacatcaacaacaccctgagcatcttcaaggtggccgacttcaagaacaagagcaagggcaacccctacagcgacctgggcaaccacaccacctgccgctacagagacttccgctacccacctggccacccccaggagtacaagcacaacatctactactggcacgtgattgctgccaagctggccttcatcatcgtgatggagcacgtgatctacagcgtgaagttcttcatctcctatgccatcccagatgtgtccaagaggaccaagagcaagatccagcgggagaagtacctgacccagaagctgctgcacgagaaccacctgaaggacatgaccaagaacatgggcgtgattgctgagaggatgattgaagctgtggacaacaacctgcggcccaagtctgagtag

SEQ ID NO: 143808 - DNA, 501 bp, synthetic construct
  misc_feature 1..501: note = Description of Artificial Sequence: Synthetic coding sequence
  source 1..501: mol_type = other DNA
atgatgctgcacagcgccctgggcctgtgcctgctgctggtgacagtgagcagcaacctggccatcgccatcaagaaggagaagaggcctccccagaccctgagccggggctggggagatgacatcacctgggtgcagacctatgaggagggcctcttctacgcccagaagagcaagaagcccctgatggtgatccaccacctggaggactgccagtacagccaggccctgaagaaggtgtttgcccagaatgaggagatccaggagatggcccagaacaagttcatcatgctgaacctgatgcatgagaccacagacaagaacctgagcccagatggccagtatgtgccccgcatcatgtttgtggaccccagcctgactgtgcgggctgacattgctggccgctacagcaaccggctgtacacctatgagccccgggacctgcccctgctgattgagaacatgaagaaggccctgcggctcatccagagcgagctgtag

SEQ ID NO: 143809 - DNA, 453 bp, synthetic construct
  misc_feature 1..453: note = Description of Artificial Sequence: Synthetic coding sequence
  source 1..453: mol_type = other DNA
atgggcgctgctgtgttcttcggctgcacctttgtggccttcggccctgcctttgccctcttcctgatcaccgtggccggggaccccctgcgggtcatcatcctggtggccggcaaggcagatgagggcctggccagcctgtctgaagatggccgcagccccatcagcatccggcagatggcctacgtgtctggcctgagctttggcatcatcagcggggtcttcagcgtcatcaacatcctggctgatgccctgggccctggggtggtgggcatccatggagacagcccctactacttcctgaccagcgccttcctgacagctgccatcatcctgctgcacaccttctggggcgtggtgttctttgatgcctgtgaaagaagacgctactgggccctgggcctggtggtgggcagccacctgctgaccagcggcctgaccttcctgaactag

SEQ ID NO: 143810 - DNA, 744 bp, synthetic construct
  misc_feature 1..744: note = Description of Artificial Sequence: Synthetic coding sequence
  source 1..744: mol_type = other DNA
atgggcgctgctgtgttcttcggctgcacctttgtggccttcggccctgcctttgccctcttcctgatcaccgtggccggggaccccctgcgggtcatcatcctggtggccggggccttcttctggctggtgtccctgctgctggcctctgtggtgtggttcatcctggtgcacgtgacagacagaagtgatgcccggctgcagtatggcctgctgatctttggagctgctgtgtctgtgctgctgcaggaggtgttccgctttgcctactacaagctgctgaagaaggcagatgagggcctggccagcctgtctgaagatggccgcagccccatcagcatccggcagatggcctacgtgtctggcctgagctttggcatcatctctggagtcttcagcgtcatcaacatcctggctgatgccctgggccctggggtggtgggcatccacggggacagcccctactacttcctgaccagcgccttcctgacagctgccatcatcctgctgcacaccttctggggcgtggtgttctttgatgcctgtgagcggcggcgctactgggccctgggcctggtggtgggcagccacctgctgaccagcggcctgaccttcctgaacccctggtatgaggccagcctgctgcccatctatgctgtgacagtgtccatgggcctgtgggccttcatcacagctgggggcagcctgcggagcatccagaggagcctgctgtgcaaggactag

SEQ ID NO: 143811 - DNA, 798 bp, synthetic construct
  misc_feature 1..798: note = Description of Artificial Sequence: Synthetic coding sequence
  source 1..798: mol_type = other DNA
atgggcgctgctgtgttcttcggctgcacctttgtggccttcggccctgcctttgccctcttcctgatcaccgtggccggggaccccctgcgggtcatcatcctggtggccggggccttcttctggctggtgtccctgctgctggcctctgtggtgtggttcatcctggtgcacgtgacagacagaagtgatgcccggctgcagtatggcctgctgatctttggagctgctgtgtctgtgctgctgcaggaggtgttccgctttgcctactacaagctgctgaagaaggcagatgagggcctggccagcctgtctgaagatggccgcagccccatcagcatccggcagatggcctacgtgtctggcctgagctttggcatcatctctggagtcttcagcgtcatcaacatcctggctgatgccctgggccctggggtggtgggcatccacggggacagcccctactacttcctgaccagcgccttcctgacagctgccatcatcctgctgcacaccttctggggcgtggtgttctttgatgcctgtgagcggcggcgctactgggccctgggcctggtggtgggcagccacctgctgaccagcggcctgaccttcctgaacccctggtatgaggccagcctgctgcccatctatgctgtgacagtgtccatgggcctgtgggccttcatcacagctgggggcagcctgcggagcatccagaggagcctgctgtgccggcggcaggaggacagccgggtgatggtgtacagcgccctgcgcatccccccagaggactag

SEQ ID NO: 143812 - DNA, 588 bp, synthetic construct
  misc_feature 1..588: note = Description of Artificial Sequence: Synthetic coding sequence
  source 1..588: mol_type = other DNA
atgggcgctgctgtgttcttcggctgcacctttgtggccttcggccctgcctttgccctcttcctgatcaccgtggccggggaccccctgcgggtcatcatcctggtggccggccgctgcagcgccctgcccaccaccagctgcctgatcagcggcctgagctttggcatcatctctggagtcttcagcgtcatcaacatcctggctgatgccctgggccctggggtggtgggcatccacggggacagcccctactacttcctgaccagcgccttcctgacagctgccatcatcctgctgcacaccttctggggcgtggtgttctttgatgcctgtgagcggcggcgctactgggccctgggcctggtggtgggcagccacctgctgaccagcggcctgaccttcctgaacccctggtatgaggccagcctgctgcccatctatgctgtgacagtgtccatgggcctgtgggccttcatcacagctgggggcagcctgcggagcatccagaggagcctgctgtgccggcggcaggaggacagccgggtgatggtgtacagcgccctgcgcatccccccagaggactag

SEQ ID NO: 143813 - DNA, 774 bp, synthetic construct
  misc_feature 1..774: note = Description of Artificial Sequence: Synthetic coding sequence
  source 1..774: mol_type = other DNA
atgacagctgctgtgttcttcggctgtgccttcatcgccttcggccctgccctggccctgtatgtgttcaccatcgccacagagcccctgcgcatcatcttcctgattgctggggccttcttctggctggtgtccctgctgatcagcagcctggtgtggttcatggcccgggtcatcatcgacaacaaggatggccccacccagaagtacctgctgatctttggagcctttgtgtctgtgtacatccaggagatgttccgctttgcctactacaagctgctgaagaaggccagcgagggcctgaagagcatcaaccctggagaaacagcccccagcatgaggctgctggcctacgtgtctggcctgggcttcggcatcatgtctggagtcttctcctttgtgaacaccctgagtgacagcctgggccctggcaccgtgggcatccatggagacagcccccagttcttcctgtacagcgccttcatgaccctggtgatcatcctgctgcacgtgttctggggcatcgtgttctttgatggctgtgagaagaagaagtggggcatcctgctgattgtgctgctgacccacctgctggtgtctgcccagaccttcatcagcagctactacggcatcaacctggccagcgccttcatcatcctggtgctgatgggcacctgggccttcctggccgccggcggcagctgccgcagcctgaagctgtgcctgctgtgccaggacaagaacttcctgctgtacaaccagaggagcaggtag

SEQ ID NO: 143814 - DNA, 246 bp, synthetic construct
  misc_feature 1..246: note = Description of Artificial Sequence: Synthetic coding sequence
  source 1..246: mol_type = other DNA
atgacagctgctgtgttcttcggctgtgccttcatcgccttcggccctgccctggccctgtatgtgttcaccatcgccacagagcccctgcgcatcatcttcctgattgctggaagaagagtggagacctgcaagaacacagaggccccagactgtgccagccccagcggcagcctgtccttcctgctggtgggcgtgtccacagactttgtgccctgcctggtgcacggcaagagccactactag

SEQ ID NO: 143815 - DNA, 651 bp, synthetic construct
  misc_feature 1..651: note = Description of Artificial Sequence: Synthetic coding sequence
  source 1..651: mol_type = other DNA
atgacagctgctgtgttcttcggctgtgccttcatcgccttcggccctgccctggccctgtatgtgttcaccatcgccacagagcccctgcgcatcatcttcctgattgctggggccttcttctggctggtgtccctgctgatcagcagcctggtgtggttcatggcccgggtcatcatcgacaacaaggatggccccacccagaagtacctgctgatctttggagcctttgtgtctgtgtacatccaggagatgttccgctttgcctactacaagctgctgaagaaggccagcgagggcctgaagagcatcaaccctggagaaacagcccccagcatgaggctgctggcctatgccttcatgaccctggtgatcatcctgctgcacgtgttctggggcatcgtgttctttgatggctgtgagaagaagaagtggggcatcctgctgattgtgctgctgacccacctgctggtgtctgcccagaccttcatcagcagctactacggcatcaacctggccagcgccttcatcatcctggtgctgatgggcacctgggccttcctggccgccggcggcagctgccgcagcctgaagctgtgcctgctgtgccaggacaagaacttcctgctgtacaaccagaggagcaggtag

SEQ ID NO: 143816 - DNA, 1695 bp, synthetic construct
  misc_feature 1..1695: note = Description of Artificial Sequence: Synthetic coding sequence
  source 1..1695: mol_type = other DNA
atggccacagctgagcggcgggccctgggcatcggcttccagtggctgagcctggccaccctggtgctgatctgtgccggccagggcggcagaagagaagatggcggccctgcctgctacggcggctttgacctgtacttcatcctggacaagagcggctctgtgctgcaccactggaatgagatctactactttgtggagcagctggcccacaagttcatcagcccccagctgaggatgtccttcatcgtgttcagcacccggggcaccaccctgatgaagctgacagaagatcgggagcagatccggcagggcctggaggagctgcagaaggtgctgcccggcggggacacctacatgcatgagggctttgagcgggccagcgagcagatctactatgagaaccggcagggctacagaacagccagcgtcatcatcgccctgacagatggagagctgcatgaagatctcttcttctacagcgagcgggaggccaacagaagccgggacctgggcgccatcgtgtactgtgtgggcgtgaaggacttcaatgagacccagctggccagaattgctgacagcaaggaccacgtgtttcctgtgaatgatggcttccaggccctgcagggcatcatccacagcatcctgaagaagagctgcatcgagatcctggccgctgagcccagcaccatctgtgccggggagagcttccaggtggtggtgagaggaaatggcttcagacatgccagaaatgtggacagagtgctgtgcagcttcaagatcaatgacagcgtgaccctgaatgagaagcccttctctgtggaggacacctacctgctgtgcccagcccccatcctgaaggaggtgggcatgaaggccgccctgcaggtgtccatgaatgatggcctgtccttcatcagcagcagcgtcatcatcaccaccacccactgcagtgatggcagcatcctggccatcgccctgctgatcctcttcctgctgctggccctggccctgctgtggtggttctggcccctgtgctgcaccgtcatcatcaaggaggtgcccccacctcctgctgaggagagcgaggaggaggatgatgatggcctgcccaagaagaagtggcccaccgtggatgccagctactatggaggccggggcgtgggcggcatcaagaggatggaggtgcgctggggcgagaagggcagcacagaggagggcgccaagctggagaaggccaagaatgcccgggtgaagatgcctgagcaggagtatgagttccctgagcccaggaacctgaacaacaacatgaggcggcccagcagccccaggaagtggtacagccccatcaagggcaagctggatgccctgtgggtgctgctgaggaagggctatgacagagtgtctgtgatgaggccccagcccggggacaccggccgctgcatcaacttcaccagggtgaagaacaaccagcctgccaagtaccccctgaacaatgcctaccacaccagcagccccccaccagcccccatctacaccccacctcctccagccccccactgccccccacctcctccttctgcccccaccccacccatccccagcccccccagcaccctgcccccaccaccccaggcccccccacccaacagagcccccccacccagccggcccccaccccggcccagcgtgtag

SEQ ID NO: 143817 - DNA, 1107 bp, synthetic construct
  misc_feature 1..1107: note = Description of Artificial Sequence: Synthetic coding sequence
  source 1..1107: mol_type = other DNA
atggccacagctgagcggcgggccctgggcatcggcttccagtggctgagcctggccaccctggtgctgatctgtgccggccagggcggcagaagagaagatggcggccctgcctgctacggcggctttgacctgtacttcatcctggacaagagcggctctgtgctgcaccactggaatgagatctactactttgtggagcagctggcccacaagttcatcagcccccagctgaggatgtccttcatcgtgttcagcacccggggcaccaccctgatgaagctgacagaagatcgggagcagatccggcagggcctggaggagctgcagaaggtgctgcccggcggggacacctacatgcatgagggctttgagcgggccagcgagcagatctactatgagaaccggcagggctacagaacagccagcgtcatcatcgccctgacagatggagagctgcatgaagatctcttcttctacagcgagcgggaggccaacagaagccgggacctgggcgccatcgtgtactgtgtgggcgtgaaggacttcaatgagacccagctggccagaattgctgacagcaaggaccacgtgtttcctgtgaatgatggcttccaggccctgcagggcatcatccacagcatcctgaagaagagctgcatcgagatcctggccgctgagcccagcaccatctgtgccggggagagcttccaggtggtggtgagaggaaatggcttcagacatgccagaaatgtggacagagtgctgtgcagcttcaagatcaatgacagcgtgaccctgaatgagaagcccttctctgtggaggacacctacctgctgtgcccagcccccatcctgaaggaggtgggcatgaaggccgccctgcaggtgtccatgaatgatggcctgtccttcatcagcagcagcgtcatcatcaccaccacccactgcagtgatggcagcatcctggccatcgccctgctgatcctcttcctgctgctggccctggccctgctgtggtggttctggcccctgtgctgcaccgtcatcatcaaggaggtgcccccacctcctgctgaggagagcgaggagaacaagatcaagtag

SEQ ID NO: 143818 - DNA, 1002 bp, synthetic construct
  misc_feature 1..1002: note = Description of Artificial Sequence: Synthetic coding sequence
  source 1..1002: mol_type = other DNA
atggccacagctgagcggcgggccctgggcatcggcttccagtggctgagcctggccaccctggtgctgatctgtgccggccagggcggcagaagagaagatggcggccctgcctgctacggcggctttgacctgtacttcatcctggacaagagcggctctgtgctgcaccactggaatgagatctactactttgtggagcagctggcccacaagttcatcagcccccagctgaggatgtccttcatcgtgttcagcacccggggcaccaccctgatgaagctgacagaagatcgggagcagatccggcagggcctggaggagctgcagaaggtgctgcccggcggggacacctacatgcatgagggctttgagcgggccagcgagcagatctactatgagaaccggcagggctacagaacagccagcgtcatcatcgccctgacagatggagagctgcatgaagatctcttcttctacagcgagcgggaggccaacagaagccgggacctgggcgccatcgtgtactgtgtgggcgtgaaggacttcaatgagacccagctggccagaattgctgacagcaaggaccacgtgtttcctgtgaatgatggcttccaggccctgcagggcatcatccacagcatcctgaagaagagctgcatcgagatcctggccgctgagcccagcaccatctgtgccggggagagcttccaggtggtggtgagaggaaatggcttcagacatgccagaaatgtggacagagtgctgtgcagcttcaagatcaatgacagcgtgaccctgaatgagaagcccttctctgtggaggacacctacctgctgtgcccagcccccatcctgaaggaggtgggcatgaaggccgccctgcaggtgtccatgaatgatggcctgtccttcatcagcagcagcgtcatcatcaccaccacccactgcagcctgcacaagatcgccagcggccccaccacagctgcctgcatggagtag

SEQ ID NO: 143819 - DNA, 969 bp, synthetic construct
  misc_feature 1..969: note = Description of Artificial Sequence: Synthetic coding sequence
  source 1..969: mol_type = other DNA
atggtggccgagaggagccctgcccggagccctggctcctggctgtttcctggcctgtggctgctggtgctgagcggccctgggggcctgctgcgggcccaggagcagcccagctgccggcgggcctttgacctgtactttgtgctggacaagagcggctctgtggccaacaactggattgagatctacaactttgtgcagcagctggccgagagatttgtgtccccagagatgaggctgtccttcatcgtgttcagcagccaggccaccatcatcctgcccctgaccggggaccggggcaagatcagcaagggcctggaggacctgaagagggtgtcccctgtgggggagacctacatccacgagggcctgaagctggccaatgagcagatccagaaggccggcggcctgaagaccagcagcatcatcatcgccctgacagatggcaagctggatggcctggtgcccagctatgcagagaaggaggccaagatcagccgcagcctgggcgcctctgtgtactgtgtgggcgtgctggactttgagcaggcccagctggagagaattgctgacagcaaggagcaggtgtttcctgtgaagggcggcttccaggccctgaagggcatcatcaacagcatcctggcccagagctgcacagagatcctggagctgcagcccagctctgtgtgtgtgggggaggagttccagatcgtgctgagcggccggggcttcatgctgggcagcagaaatggatctgtgctgtgcacctacacagtgaatgagacctacaccacctctgtgaagcctgtgtctgtgcagctgaacagcatgctgtgcccagcccccatcctgaacaaggccggggagtggggcctgactgtgacccaggccggcgtgaagtggcatgacctgacccactgcaccttcggcctgagcggcagcggggacccccccaccagcgccagctag

SEQ ID NO: 143820 - DNA, 1470 bp, synthetic construct
  misc_feature 1..1470: note = Description of Artificial Sequence: Synthetic coding sequence
  source 1..1470: mol_type = other DNA
atggtggccgagaggagccctgcccggagccctggctcctggctgtttcctggcctgtggctgctggtgctgagcggccctgggggcctgctgcgggcccaggagcagcccagctgccggcgggcctttgacctgtactttgtgctggacaagagcggctctgtggccaacaactggattgagatctacaactttgtgcagcagctggccgagagatttgtgtccccagagatgaggctgtccttcatcgtgttcagcagccaggccaccatcatcctgcccctgaccggggaccggggcaagatcagcaagggcctggaggacctgaagagggtgtcccctgtgggggagacctacatccacgagggcctgaagctggccaatgagcagatccagaaggccggcggcctgaagaccagcagcatcatcatcgccctgacagatggcaagctggatggcctggtgcccagctatgcagagaaggaggccaagatcagccgcagcctgggcgcctctgtgtactgtgtgggcgtgctggactttgagcaggcccagctggagagaattgctgacagcaaggagcaggtgtttcctgtgaagggcggcttccaggccctgaagggcatcatcaacagcatcctggcccagagctgcacagagatcctggagctgcagcccagctctgtgtgtgtgggggaggagttccagatcgtgctgagcggccggggcttcatgctgggcagcagaaatggatctgtgctgtgcacctacacagtgaatgagacctacaccacctctgtgaagcctgtgtctgtgcagctgaacagcatgctgtgcccagcccccatcctgaacaaggccggggagaccctggatgtgtctgtgtccttcaacggcggcaagagcgtcatcagcggcagcctgattgtgacagccacagagtgcagcaatggaattgctgccatcatcgtcatcctggtgctgctgctgctgctgggcatcggcctgatgtggtggttctggcccctgtgctgcaaggtggtgatcaaggaccccccacctcctccagccccagcccccaaggaggaggaggaggagcccctgcccaccaagaagtggcccaccgtggatgccagctactatggaggccggggcgtgggcggcatcaagaggatggaggtgcgctggggagacaagggcagcacagaggagggcgcccggctggagaaggccaagaatgctgtggtgaagatccctgaggagacagaggagcccatccggccccggcccccccggcccaagcccacccaccagcccccccagaccaagtggtacacccccatcaagggccgcctggatgccctgtgggccctgctgcggcggcagtatgacagagtgtccctgatgaggccccaggagggagatgaggtgtgcatctgggagtgcatcgagaaggagctgacagcctag

SEQ ID NO: 143821 - DNA, 1161 bp, synthetic construct
  misc_feature 1..1161: note = Description of Artificial Sequence: Synthetic coding sequence
  source 1..1161: mol_type = other DNA
atggtggccgagaggagccctgcccggagccctggctcctggctgtttcctggcctgtggctgctggtgctgagcggccctgggggcctgctgcgggcccaggagcagcccagctgccggcgggcctttgacctgtactttgtgctggacaagagcggctctgtggccaacaactggattgagatctacaactttgtgcagcagctggccgagagatttgtgtccccagagatgaggctgtccttcatcgtgttcagcagccaggccaccatcatcctgcccctgaccggggaccggggcaagatcagcaagggcctggaggacctgaagagggtgtcccctgtgggggagacctacatccacgagggcctgaagctggccaatgagcagatccagaaggccggcggcctgaagaccagcagcatcatcatcgccctgacagatggcaagctggatggcctggtgcccagctatgcagagaaggaggccaagatcagccgcagcctgggcgcctctgtgtactgtgtgggcgtgctggactttgagcaggcccagctggagagaattgctgacagcaaggagcaggtgtttcctgtgaagggcggcttccaggccctgaagggcatcatcaacagcagcaatggaattgctgccatcatcgtcatcctggtgctgctgctgctgctgggcatcggcctgatgtggtggttctggcccctgtgctgcaaggtggtgatcaaggaccccccacctcctccagccccagcccccaaggaggaggaggaggagcccctgcccaccaagaagtggcccaccgtggatgccagctactacggcggccggggcgtgggcggcatcaagaggatggaggtgcgctggggagacaagggcagcacagaggagggcgcccggctggagaaggccaagaatgctgtggtgaagatccctgaggagacagaggagcccatccggcccaggcctccccggcccaagcccacccaccagcccccccagaccaagtggtacacccccatcaagggccgcctggatgccctgtgggccctgctgcggcggcagtatgacagagtgtccctgatgaggccccaggagggagatgaggtgtgcatctgggagtgcatcgagaaggagctgacagcctag

SEQ ID NO: 143822 - DNA, 1467 bp, synthetic construct
  misc_feature 1..1467: note = Description of Artificial Sequence: Synthetic coding sequence
  source 1..1467: mol_type = other DNA
atggtggccgagaggagccctgcccggagccctggctcctggctgtttcctggcctgtggctgctggtgctgagcggccctgggggcctgctgcgggcccaggagcagcccagctgccggcgggcctttgacctgtactttgtgctggacaagagcggctctgtggccaacaactggattgagatctacaactttgtgcagcagctggccgagagatttgtgtccccagagatgaggctgtccttcatcgtgttcagcagccaggccaccatcatcctgcccctgaccggggaccggggcaagatcagcaagggcctggaggacctgaagagggtgtcccctgtgggggagacctacatccacgagggcctgaagctggccaatgagcagatccagaaggccggcggcctgaagaccagcagcatcatcatcgccctgacagatggcaagctggatggcctggtgcccagctatgcagagaaggaggccaagatcagccgcagcctgggcgcctctgtgtactgtgtgggcgtgctggactttgagcaggcccagctggagagaattgctgacagcaaggagcaggtgtttcctgtgaagggcggcttccaggccctgaagggcatcatcaacagcatcctggcccagagctgcacagagatcctggagctgcagcccagctctgtgtgtgtgggggaggagttccagatcgtgctgagcggccggggcttcatgctgggcagcagaaatggatctgtgctgtgcacctacacagtgaatgagacctacaccacctctgtgaagcctgtgtctgtgcagctgaacagcatgctgtgcccagcccccatcctgaacaaggccggggagaccctggatgtgtctgtgtccttcaacggcggcaagagcgtcatcagcggcagcctgattgtgacagccacagagtgcagcaatggaattgctgccatcatcgtcatcctggtgctgctgctgctgctgggcatcggcctgatgtggtggttctggcccctgtgctgcaaggtggtgatcaaggaccccccacctcctccagccccagcccccaaggaggaggaggaggagcccctgcccaccaagaagtggcccaccgtggatgccagctactatggaggccggggcgtgggcggcatcaagaggatggaggtgcgctggggagacaagggcagcacagaggagggcgcccggctggagaaggccaagaatgctgtggtgaagatccctgaggagacagaggagcccatccggccccggcccccccggcccaagcccacccaccagcccccccagaccaagtggtacacccccatcaagggccgcctggatgccctgtgggccctgctgcggcggcagtatgacagagtgtccctgatgaggccccaggagggagatgagggccgctgcatcaacttcagccgggtgcccagccagtag

SEQ ID NO: 143823 - DNA, 2217 bp, synthetic construct
  misc_feature 1..2217: note = Description of Artificial Sequence: Synthetic coding sequence
  source 1..2217: mol_type = other DNA
atgaggggccccagcggggccctgtggctgctgctggccctgaggacagtgctgggcggcatggaggtgcgctggtgtgccaccagtgaccctgagcagcacaagtgtggcaacatgtctgaggccttccgggaggccggcatccagcccagcctgctgtgtgtgcggggcaccagcgctgaccactgtgtgcagctgattgctgcccaggaggctgatgccatcaccctggatggaggagccatctatgaagctgggaaggagcacggcctgaagcctgtggtgggggaggtgtatgaccaggaggtgggcaccagctactatgctgtggccgtggtgcggcgcagcagccacgtgaccatcgacaccctgaagggcgtgaagagctgccacacaggcatcaacagaacagtgggctggaatgtgcctgtgggctacctggtggagagcggccgcctgtctgtgatgggctgtgatgtgctgaaggctgtgtctgactactttggaggcagctgtgtgcctggggccggggagaccagctacagcgagagcctgtgccgcctgtgccgcggggacagcagcggggagggcgtgtgtgacaagagccccctggagcgctactatgactacagcggggccttccgctgcctggccgagggcgctggagatgtggcctttgtgaagcacagcacagtgctggagaacacagatggcaagaccctgcccagctggggccaggccctgctgagccaggactttgagctgctgtgcagagatggcagcagagcagatgtgacagagtggaggcagtgccacctggcccgggtgcctgcccatgctgtggtggtgcgggctgacacagatggcggcctcatcttccggctgctgaatgaaggccagaggctcttcagccatgagggcagcagcttccagatgttcagcagcgaggcctacggccagaaggacctgctcttcaaggacagcaccagcgagctggtgcccatcgccacccagacctatgaggcctggctgggccacgagtacctgcacgccatgaagggcctgctgtgtgaccccaaccggctgcccccctacctgcgctggtgtgtgctgagcaccccagagatccagaagtgtggggacatggctgtggccttccggcggcagaggctgaagccagagatccagtgtgtgtctgccaagagcccccagcactgcatggagcgcatccaggccgagcaggtggatgctgtgaccctgtctggagaggacatctacacagctgggaagacctacggcctggtgcctgctgctggggagcactacgcccctgaggacagcagcaacagctactacgtggtggccgtggtgcggcgggacagcagccacgccttcaccctggatgagctgcggggcaagaggagctgccacgccggcttcggcagccctgctggctgggatgtgcctgtgggcgccctgatccagaggggcttcatccggcccaaggactgtgatgtgctgacagctgtgtctgagttcttcaatgccagctgtgtgcctgtgaacaaccccaagaactaccccagcagcctgtgtgccctgtgtgtgggagatgagcagggcaggaacaagtgtgtgggcaacagccaggagcgctactacggctacagaggagccttccgctgcctggtggagaatgctggagatgtggcctttgtgcgccacaccaccgtgtttgacaacaccaacggccacaacagcgagccctgggccgctgagctgcggagtgaagattatgagctgctgtgccccaatggagcccgggcagaggtgtcccagtttgctgcctgcaacctggcccagatcccccctcatgctgtgatggtgcggccagacaccaacatcttcaccgtgtatggcctgctggacaaggcccaggacctgtttggagatgaccacaacaagaatggcttcaagatgtttgacagcagcaactaccacggccaggacctgctcttcaaggatgccaccgtgcgggctgtgcctgtgggggagaagaccacctaccggggctggctgggcctggactatgtggccgccctggagggcatgagcagccagcagtgcagcggggctgctgccccagcccctggggcccccctgctgcccctgctgctgcctgccctggccgcccggctgctgcccccagccctgtag

SEQ ID NO: 143824 - DNA, 909 bp, synthetic construct
  misc_feature 1..909: note = Description of Artificial Sequence: Synthetic coding sequence
  source 1..909: mol_type = other DNA
atgaggggccccagcggggccctgtggctgctgctggccctgaggacagtgctgggcggcatggaggtgcgctggtgtgccaccagtgaccctgagcagcacaagtgtggcaacatgtctgaggccttccgggaggccggcatccagcccagcctgctgtgtgtgcggggcaccagcgctgaccactgtgtgcagctgattgctgcccaggaggctgatgccatcaccctggatggaggagccatctatgaagctgggaaggagcacggcctgaagcctgtggtgggggaggtgtatgaccaggaggtgggcaccagctactatgctgtggccgtggtgcggcgcagcagccacgtgaccatcgacaccctgaagggcgtgaagagctgccacacaggcatcaacagaacagtgggctggaatgtgcctgtgggctacctggtggagagcggccgcctgtctgtgatgggctgtgatgtgctgaaggctgtgtctgactactttggaggcagctgtgtgcctggggccggggagaccagctacagcgagagcctgtgccgcctgtgccgcggggacagcagcggggagggcgtgtgtgacaagagccccctggagcgctactatgactacagcggggccttccgctgcctggccgagggcgctggagatgtggcctttgtgaagcacagcacagtgctggagaacacagatgagagccccagccggcggcagacctggaccaggtctgaggaggaggagggagaatgtcctgcccacgaggaggcccggaggaccatgaggagcagcgctggccaggcctggaagtgggcccctgtgcaccggccccaggatgaaagtgacaagggggagtttgggaagagggccaagagccgggacatgctgggctag

SEQ ID NO: 143825 - DNA, 1395 bp, synthetic construct
  misc_feature 1..1395: note = Description of Artificial Sequence: Synthetic coding sequence
  source 1..1395: mol_type = other DNA
atggacttccagcacaggcctgggggcaagacaggcagcggaggagtggccagcagcagcgagagcaacagagaccggcgggagcggctgcggcagctggccctggagaccatcgacatcaacaaggacccctacttcatgaagaaccacctgggcagctatgagtgcaagctgtgcctgaccctgcacaacaatgaaggcagctacctggcccacacccagggcaagaagcaccagaccaacctggcccggcgggccgccaaggaggccaaggaggccccagcccagcctgcccctgagaaggtgaaggtggaggtgaagaagtttgtgaagattggccggcccggctacaaggtgaccaagcagagggacagcgagatgggccagcagagcctgctcttccagattgactacccagaaattgctgagggcatcatgcccaggcaccgcttcatgtctgcctatgagcagagaattgagcccccagaccggcgctggcagtacctgctgatggctgctgagccctatgagaccatcgccttcaaggtgcccagccgggagattgacaaggccgagggcaagttctggacccactggaaccgggagaccaagcagttcttcctgcagttccacttcaagatggagaagcccccagccccacccagcctgcctgctggccccccaggagtgaagaggcctcctccacccctgatgaatggcctgccccccaggcctcccctgcctgagagcctgcccccacctcctcctgggggcctgcccctgccccccatgcccccaactggacctgcccccagcggccccccaggccccccccagctgcccccaccagcccctggggtgcaccccccagcccctgtggtgcaccccccagccagcggcgtgcaccccccagcccctggggtgcaccccccagcccctggggtgcaccccccagcccctggggtgcacccccccaccagcggcgtgcaccccccagcccctggggtgcaccccccagcccctggggtgcaccccccagcccctggggtgcaccccccagcccctggggtgcaccccccagcccctggggtgcaccccccaccttctgctggggtgcacccccaggcccctggggtgcaccctgctgccccagctgtgcacccccaggcccctggggtgcaccccccagcccctggcatgcacccccaggcccctggggtgcacccccagcccccaggagtgcaccccagcgcccctggggtgcacccccagcccccaggagtgcaccccagcaaccctggggtgcacccccccacccccatgccacccatgctgcggccccccctgcccagcgagggccctggcaacatccccccacctccacccaccaactag

SEQ ID NO: 143826 - DNA, 1437 bp, synthetic construct
  misc_feature 1..1437: note = Description of Artificial Sequence: Synthetic coding sequence
  source 1..1437: mol_type = other DNA
atgctgggcagcctgggcctgtgggccctgctgcccacagctgtggaggccccacccaacagaaggacctgtgtgttctttgaggcccctggggtgcggggcagcaccaagaccctgggggagctgctggacacaggaacagagctgccccgggccatccgctgcctgtacagccgctgctgcttcggcatctggaacctgacccaggaccgggcccaggtggagatgcagggctgccgggacagtgatgagcccggctgtgagagcctgcactgtgaccccagcccccgggcccaccccagccctggcagcaccctcttcacctgcagctgtggcacagacttctgcaatgccaactacagccacctgcccccacctggcagccctggcaccccaggcagccagggcccccaggccgcccctggagagagcatctggatggccctggtgctgctgggcctcttcctgctgctgctgctgctgctgggcagcatcatcctggccctgctgcagaggaagaactacagagtgcggggggagcctgtgcctgagcccaggccagattctggccgggactggagcgtggagctgcaggagctgcctgagctgtgcttcagccaggtgatccgggagggcggccatgctgtggtgtgggccggccagctgcagggcaagctggtggccatcaaggccttccccccaagatctgtggcccagttccaggccgagcgggccctgtatgagctgcccggcctgcagcacgaccacatcgtgcgcttcatcacagccagccggggcggccctggccgcctgctgagcggccccctgctggtgctggagctgcaccccaagggcagcctgtgccactacctgacccagtacaccagtgactggggcagcagcctgaggatggccctgagcctggcccagggcctggccttcctgcacgaggagcgctggcagaatggccagtacaagccaggcatcgcccaccgggacctgagcagccagaatgtgctgatcagagaagatggcagctgtgccatcggggacctgggcctggccctggtgctgcccggcctgacccagcccccagcctggacccccacccagccccagggccctgctgccatcatggaggaccctgatggcctgcgggagctgctggaggactgctgggatgctgaccctgaggcccggctgacagcagaatgtgtgcagcagaggctggccgccctggcccacccccaggagagccaccccttccctgagagctgcccccggggctgcccccccctgtgcccagaggactgcaccagcatcccagcccccaccatcctgccctgccggccccagaggtctgcctgccacttctctgtgcagcagggcccctgcagcaggaacccccagcctgcctgcaccctgagccctgtgtag

SEQ ID NO: 143827 - DNA, 1437 bp, synthetic construct
  misc_feature 1..1437: note = Description of Artificial Sequence: Synthetic coding sequence
  source 1..1437: mol_type = other DNA
atgctgggcagcctgggcctgtgggccctgctgcccacagctgtggaggccccacccaacagaaggacctgtgtgttctttgaggcccctggggtgcggggcagcaccaagaccctgggggagctgctggacacaggaacagagctgccccgggccatccgctgcctgtacagccgctgctgcttcggcatctggaacctgacccaggaccgggcccaggtggagatgcagggctgccgggacagtgatgagcccggctgtgagagcctgcactgtgaccccagcccccgggcccaccccagccctggcagcaccctcttcacctgcagctgtggcacagacttctgcaatgccaactacagccacctgcccccacctggcagccctggcaccccaggcagccagggcccccaggccgcccctggagagagcatctggatggccctggtgctgctgggcctcttcctgctgctgctgctgctgctgggcagcatcatcctggccctgctgcagaggaagaactacagagtgcggggggagcctgtgcctgagcccaggccagattctggccgggactggagcgtggagctgcaggagctgcctgagctgtgcttcagccaggtgatccgggagggcggccatgctgtggtgtgggccggccagctgcagggcaagctggtggccatcaaggccttccccccaagatctgtggcccagttccaggccgagcgggccctgtatgagctgcccggcctgcagcacgaccacatcgtgcgcttcatcacagccagccggggcggccctggccgcctgctgagcggccccctgctggtgctggagctgcaccccaagggcagcctgtgccactacctgacccagtacaccagtgactggggcagcagcctgaggatggccctgagcctggcccagggcctggccttcctgcacgaggagcgctggcagaatggccagtacaagccaggcatcgcccaccgggacctgagcagccagaatgtgctgatcagagaagatggcagctgtgccatcggggacctgggcctggccctggtgctgcccggcctgacccagcccccagcctggacccccacccagccccagggccctgctgccatcatggaggccggcacccagcgctacatggcccctgagctgctggacaagaccctggacctgcaggactggggcatggccctgcggcgggctgacatctacagcctggccctgctgctgtgggagatcctgagccgctgcccagacctgcggcctgctgtgcaccaccccagcaactggcccatgaggcagaactgggccatccccctgcccctgatgtcctatggcccctggcagtgccggcggggcggcgtgcccaccagccaccccccaggggccgccctgccccagaccctgatgggctag

SEQ ID NO: 143828 - DNA, 1722 bp, synthetic construct
  misc_feature 1..1722: note = Description of Artificial Sequence: Synthetic coding sequence
  source 1..1722: mol_type = other DNA
atgctgggcagcctgggcctgtgggccctgctgcccacagctgtggaggccccacccaacagaaggacctgtgtgttctttgaggcccctggggtgcggggcagcaccaagaccctgggggagctgctggacacaggaacagagctgccccgggccatccgctgcctgtacagccgctgctgcttcggcatctggaacctgacccaggaccgggcccaggtggagatgcagggctgccgggacagtgatgagcccggctgtgagagcctgcactgtgaccccagcccccgggcccaccccagccctggcagcaccctcttcacctgcagctgtggcacagacttctgcaatgccaactacagccacctgcccccacctggcagccctggcaccccaggcagccagggcccccaggccgcccctggagagagcatctggatggccctggtgctgctgggcctcttcctgctgctgctgctgctgctgggcagcatcatcctggccctgctgcagaggaagaactacagagtgcggggggagcctgtgcctgagcccaggccagattctggccgggactggagcgtggagctgcaggagctgcctgagctgtgcttcagccaggtgatccgggagggcggccatgctgtggtgtgggccggccagctgcagggcaagctggtggccatcaaggccttccccccaagatctgtggcccagttccaggccgagcgggccctgtatgagctgcccggcctgcagcacgaccacatcgtgcgcttcatcacagccagccggggcggccctggccgcctgctgagcggccccctgctggtgctggagctgcaccccaagggcagcctgtgccactacctgacccagtacaccagtgactggggcagcagcctgaggatggccctgagcctggcccagggcctggccttcctgcacgaggagcgctggcagaatggccagtacaagccaggcatcgcccaccgggacctgagcagccagaatgtgctgatcagagaagatggcagctgtgccatcggggacctgggcctggccctggtgctgcccggcctgacccagcccccagcctggacccccacccagccccagggccctgctgccatcatggaggccggcacccagcgctacatggcccctgagctgctggacaagaccctggacctgcaggactggggcatggccctgcggcgggctgacatctacagcctggccctgctgctgtgggagatcctgagccgctgcccagacctgcggccagacagcagccccccacccttccagctggcctatgaggccgagctgggcaacacccccaccagtgatgagctgtgggccctggccgtgcaggagcggcggcggccctacatccccagcacctggcgctgctttgccacagatcctgatggcctgcgggagctgctggaggactgctgggatgctgaccctgaggcccggctgacagcagaatgtgtgcagcagaggctggccgccctggcccacccccaggagagccaccccttccctgagagctgcccccggggctgcccccccctgtgcccagaggactgcaccagcatcccagcccccaccatcctgccctgccggccccagaggtctgcctgccacttctctgtgcagcagggcccctgcagcaggaacccccagcctgcctgcaccctgagccctgtgtag

SEQ ID NO: 143829 - DNA, 1347 bp, synthetic construct
  misc_feature 1..1347: note = Description of Artificial Sequence: Synthetic coding sequence
  source 1..1347: mol_type = other DNA
atgaagggcttcattgatgatgccaactacagcgtgggcctgctggatgagggcaccaacctgggcaatgtgattgacaactacgtgtatgagcacaccctgaccgggaagaatgccttctttgtgggggacctgggcaagatcgtgaagaagcacagccagtggcagaatgtggtggcccagatcaagcccttctacacagtgaagtgcaacagcgccccagctgtgctggagatcctggccgccctgggcactggatttgcctgcagcagcaagaatgagatggccctggtgcaggagctgggcgtgcccccagagaacatcatctacatcagcccctgcaagcaggtgtcccagatcaagtatgctgccaaggtgggcgtgaacatcctgacctgtgacaatgaaattgagctgaagaagatcgccaggaaccaccccaatgccaaggtgctgctgcacatcgccacagaggacaacattggaggagaggagggcaacatgaagtttggcaccaccctgaagaactgccgccacctgctggagtgtgccaaggagctggatgtgcagatcatcggcgtgaagttccacgtgagcagcgcctgcaaggagagccaggtgtatgtgcacgccctgagtgatgcccgctgtgtgtttgacatggccggggagatcggcttcaccatgaacatgctggacatcggcggcggcttcaccggcacagagttccagctggaggaggtgaaccacgtgatcagccccctgctggacatctacttccctgagggcagcggcgtgaagatcatcagcgagcccggcagctactacgtgtcctctgccttcaccctggccgtgaacatcatcgccaagaaggtggtggagaatgacaagttccccagcggcgtggagaagacaggcagtgatgagcccgccttcatgtactacatgaatgatggagtgtatggcagctttgccagcaagctgtctgaggacctgaacaccatccctgaggtgcacaagaagtacaaggaggatgagcccctcttcaccagcagcctgtggggccccagctgtgatgagctggaccagatcgtggagagctgcctgctgcctgagctgaatgtgggggactggctgatctttgacaacatgggcgctgacagcttccacgagcccagcgccttcaatgacttccagaggcctgccatctactacatgatgtccttcagtgactggtatgagatgcaggatgctggcatcaccagtgacagcatgatgaagaacttcttctttgtgcccagctgcatccagctgagccaggaggacagcttctctgctgaggcctag

SEQ ID NO: 143830 - DNA, 1347 bp, synthetic construct; identical to SEQ ID NO: 143829
  misc_feature 1..1347: note = Description of Artificial Sequence: Synthetic coding sequence
  source 1..1347: mol_type = other DNA

SEQ ID NO: 143831 - DNA, 102 bp, synthetic construct
  misc_feature 1..102: note = Description of Artificial Sequence: Synthetic coding sequence
  source 1..102: mol_type = other DNA
atgaagggcttcattgatgatgccaactacagcgtgggcctgctggatgagggcaccaacctgggcaatgtgattgacaactacgtgtatgagcacacctag

SEQ ID NO: 143832 - DNA, 294 bp, synthetic construct
  misc_feature 1..294: note = Description of Artificial Sequence: Synthetic coding sequence
  source 1..294: mol_type = other DNA
atgaagggcttcattgatgatgccaactacagcgtgggcctgctggatgagggcaccaacctgggcaatgtgattgacaactacgtgtatgagcacaccctgaccgggaagaatgccttctttgtgggggacctgggcaagatcgtgaagaagcacagccagtggcagaatgtggtggcccagatcaagcccttctacacagtgaagtgcaacagcgccccagctgtgctggagatcctggccgccctgggcactggatttgcctgcagcagcaagaatgagatggccctgtag

SEQ ID NO: 143833 - DNA, 780 bp, synthetic construct
  misc_feature 1..780: note = Description of Artificial Sequence: Synthetic coding sequence
  source 1..780: mol_type = other DNA
atgagaagagctgtggcctacatggccatcaagattgaggtgcagggccaccagagctttgccatccccagcggcaccttctggctgtggaggagcctgctgagccaggacaaggagcacccccgctacctgatccctgagctgtgcaagcagttctaccacctgggctgggtgactggaactggaggcggcatcagcctgaagcatggagatgagatctacatcgcccccagcggcgtgcagaaggagcgcatccagcctgaggacatgtttgtgtgtgacatcaatgagaaggacatcagcggccccagccccagcaagaagctgaagaagagccagtgcacccccctcttcatgaatgcctacaccatgagaggagctggagctgtgatccacacccacagcaaggctgctgtgatggccaccctgctcttccctggccgggagttcaagatcacccaccaggagatgatcaagggcatcaagaagtgcaccagcggcggctactaccgctatgatgacatgctggtggtgcccatcatcgagaacaccccagaggagaaggacctgaaggacaggatggcccacgccatgaatgagtacccagacagctgtgctgtgctggtgagaagacatggagtgtatgtgtggggcgagacctgggagaaggccaagaccatgtgtgaatgttatgactacctgtttgatattgctgtgtccatgaagaaggtgggcctggaccccagccagctgcctgtgggagaaaatggcatcgtgtag

SEQ ID NO: 143834 - DNA, 729 bp, synthetic construct
  misc_feature 1..729: note = Description of Artificial Sequence: Synthetic coding sequence
  source 1..729: mol_type = other DNA
atgagcggctgtgatgcccgggagggggactgctgcagccgccgctgtggggcccaggacaaggagcacccccgctacctgatccctgagctgtgcaagcagttctaccacctgggctgggtgacaggcaccggcggcggcatcagcctgaagcatggagatgagatctacatcgcccccagcggcgtgcagaaggagcgcatccagcctgaggacatgtttgtgtgtgacatcaatgagaaggacatcagcggccccagccccagcaagaagctgaagaagagccagtgcacccccctcttcatgaatgcctacaccatgagaggagctggggccgtcatccacacccacagcaaggctgctgtgatggccaccctgctcttccctggccgggagttcaagatcacccaccaggagatgatcaagggcatcaagaagtgcaccagcggcggctactaccgctatgatgacatgctggtggtgcccatcatcgagaacaccccagaggagaaggacctgaaggacaggatggcccacgccatgaatgagtacccagacagctgtgctgtgctggtgagaagacatggagtgtatgtgtggggcgagacctgggagaaggccaagaccatgtgtgagtgctatgactacctgtttgatattgctgtgtccatgaagaaggtgggcctggaccccagccagctgcctgtgggggagaatggaattgtgtag

SEQ ID NO: 143835 - DNA, 234 bp, synthetic construct
  misc_feature 1..234: note = Description of Artificial Sequence: Synthetic coding sequence
  source 1..234: mol_type = other DNA
atgaacctgcggctgtgtgtgcaggccctgctgctgctgtggctgagcctgacagctgtgtgtggcggcagcctgatgcccctgcctgatggaaatggcctggaggatggaaatgtgcgccacctggtgcagccccggggcagcagaaatggacctggcccctggcagggcggccgcaggaagttccggcggcagaggccccggctgagccacaagggccccatgcccttctag

SEQ ID NO: 143836 - DNA, 369 bp, synthetic construct
  misc_feature 1..369: note = Description of Artificial Sequence: Synthetic coding sequence
  source 1..369: mol_type = other DNA
atgtctgccacctggtgcagccctgagggccagggcatgggccagggccctggccgggaggtgggcggcaacagcgctgccagcggccctgccagccccatccgggacccctgcctgtctgaggccggcctgaagggccccccatctgcccacccccggcggctgtgcctgctgcaccggctggtgtgcttcagcggcggcctgaccagcatccagctgagccccaggacctgctgcagccaccagtgggcccagctgttctccccagcctgcttcccccagtggagggcccctggctgcagcctggatgacagccgcagcctgacccgcatccggcctgtgcacctgcccggccccagcctggactag

SEQ ID NO: 143837 - DNA, 369 bp, synthetic construct; identical to SEQ ID NO: 143836
  misc_feature 1..369: note = Description of Artificial Sequence: Synthetic coding sequence
  source 1..369: mol_type = other DNA

SEQ ID NO: 143838 - DNA, 303 bp, synthetic construct
  misc_feature 1..303: note = Description of Artificial Sequence: Synthetic coding sequence
  source 1..303: mol_type = other DNA
atgaagctgctggccgccaccgtgctgctgctgaccatctgcagcctggagggcgccctggtgcggcggcaggccaaggagccctgtgtggagagcctggtgtcccagtacttccagacagtgacagattatggcaaggacctgatggagaaggtgaagagccctgagctgcaggccgaggccaagagctactttgagaagagcaaggagcagctgacccccctcatcaagaaggccggcacagagctggtgaacttcctgagctactttgtggagctgggcacccagcctgccacccagtag

SEQ ID NO: 143839 - DNA, 1191 bp, synthetic construct
  misc_feature 1..1191: note = Description of Artificial Sequence: Synthetic coding sequence
  source 1..1191: mol_type = other DNA
atgttcctgaaggctgtggtgctgaccctggccctggtggccgtggccggggcccgggcagaggtgtctgctgaccaggtggccaccgtgatgtgggactacttcagccagctgagcaacaatgccaaggaggccgtggagcacctgcagaagtctgagctgacccagcagctgaatgccctcttccaggacaagctgggggaggtgaacacctacgccggggacctgcagaagaagctggtgccctttgccacagagctgcacgagcggctggccaaggacagcgagaagctgaaggaggagatcggcaaggagctggaggagctgcgggcccggctgctgccccacgccaatgaggtgtcccagaagatcggggacaacctgcgggagctgcagcagaggctggagccctatgctgaccagctgcggacccaggtgtccacccaggccgagcagctgcggcggcagctgaccccctatgcccagaggatggagcgggtgctgcgggagaatgctgacagcctgcaggccagcctgcggccccatgctgatgagctgaaggccaagattgaccagaatgtggaggagctgaagggccgcctgaccccctatgcagatgagttcaaggtgaagattgaccagacagtggaggagctgcggcgcagcctggccccctatgcccaggacacccaggagaagctgaaccaccagctggagggcctgaccttccagatgaagaagaatgctgaggagctgaaggcccgcatcagcgccagcgctgaggagctgcggcagaggctggcccccctggccgaggatgtgcggggcaacctgcggggcaacacagagggcctgcagaagagcctggccgagctgggcggccacctggaccagcaggtggaggagttcagaagaagagtggagccctacggggagaacttcaacaaggccctggtgcagcagatggagcagctgcggcagaagctgggcccccatgctggagatgtggagggccacctgtccttcctggagaaggacctgcgggacaaggtgaacagcttcttcagcaccttcaaggagaaggagagccaggacaagaccctgagcctgcctgagctggagcagcagcaggagcagcagcaggagcagcagcaggagcaggtgcagatgctggcccccctggagagctag

SEQ ID NO: 143840 - DNA, 1281 bp, synthetic construct
  misc_feature 1..1281: note = Description of Artificial Sequence: Synthetic coding sequence
  source 1..1281: mol_type = other DNA
atggccatcgcccagctggccacagaatatgtgttcagtgacttcctgctgaaggagcccacagagcccaagttcaagggcctgcggctggagctggccgtggacaagatggtgacctgcatcgctgtgggcctgcccctgctgctgatcagcctggcctttgcccaggagatcagcatcggcacccagatcagctgcttcagccccagcagcttctcctggaggcaggccgcctttgtggacagctactgctgggccgctgtgcagcagaagaacagcctgcagagcgagagcggcaacctgcccctgtggctgcacaagttcttcccctacatcctgctgctgtttgccatcctgctgtacctgcccccactcttctggaggtttgctgctgccccccacatctgcagcgacctgaagttcatcatggaggagctggacaaggtgtacaacagagccatcaaggccgccaagagcgcccgggacctggacatgagagatggagcctgcagcgtgcctggggtgacagagaacctgggccagagcctgtgggaggtgtctgagagccacttcaagtaccccatcgtggagcagtacctgaagaccaagaagaacagcaacaacctgatcatcaagtacatcagctgccgcctgctgaccctcatcatcatcctgctggcctgcatctacctgggctactacttcagcctgagcagcctgagtgatgaatttgtgtgcagcatcaagagcggcatcctgagaaatgacagcacagtgcctgaccagttccagtgcaagctgattgctgtgggcatcttccagctgctgagcgtcatcaacctggtggtgtatgtgctgctggcccctgtggtggtgtacaccctgtttgtgcccttccggcagaagacagatgtgctgaaggtgtatgagatcctgcccacctttgatgtgctgcacttcaagtctgagggctacaatgacctgagcctgtacaacctcttcctggaggagaacatcagcgaggtgaagagctacaagtgcctgaaggtgctggagaacatcaagagcagcggccagggcatcgaccccatgctgctgctgaccaacctgggcatgatcaagatggatgtggtggatggcaagacccccatgtctgctgagatgagggaggagcagggcaaccagacagctgagctgcagggcatgaacatcgacagcgagaccaaggccaacaacggggagaagaatgcccggcagaggctgctggacagcagctgctag

SEQ ID NO: 143841 - DNA, 489 bp, synthetic construct
  misc_feature 1..489: note = Description of Artificial Sequence: Synthetic coding sequence
  source 1..489: mol_type = other DNA
atggcctccatggctgctgtgctgacctgggccctggccctgctgagcgccttcagcgccacccaggccaggaagggcttctgggactacttcagccagaccagcggggacaagggccgggtggagcagatccaccagcagaagatggcccgggagcccgccaccctgaaggacagcctggagcaggacctgaacaacatgaacaagttcctggagaagctgcggcccctgagcggcagcgaggccccccggctgccccaggaccctgtgggcatgaggcggcagctgcaggaggagctggaggaggtgaaggcccggctgcagccctacatggccgaggcccacgagctggtgggctggaacctggagggcctgcggcagcagctgaagccctacaccatggacctgatggagcaggtggccctgcgggtgcaggagctgcaggagcagctgcgggtggtgggggaggacaccaaggcccagctgtag

SEQ ID NO: 143842 - DNA, 1101 bp, synthetic construct
  misc_feature 1..1101: note = Description of Artificial Sequence: Synthetic coding sequence
  source 1..1101: mol_type = other DNA
atggcctccatggctgctgtgctgacctgggccctggccctgctgagcgccttcagcgccacccaggccaggaagggcttctgggactacttcagccagaccagcggggacaagggccgggtggagcagatccaccagcagaagatggcccgggagcccgccaccctgaaggacagcctggagcaggacctgaacaacatgaacaagttcctggagaagctgcggcccctgagcggcagcgaggccccccggctgccccaggaccctgtgggcatgaggcggcagctgcaggaggagctggaggaggtgaaggcccggctgcagccctacatggccgaggcccacgagctggtgggctggaacctggagggcctgcggcagcagctgaagccctacaccatggacctgatggagcaggtggccctgcgggtgcaggagctgcaggagcagctgcgggtggtgggggaggacaccaaggcccagctgctgggcggcgtggatgaggcctgggccctgctgcagggcctgcagagccgggtggtgcaccacacaggccgcttcaaggagctgttccacccctatgcagagagcctggtgtctggcatcggcagacatgtgcaggagctgcacaggtctgtggccccccacgccccagccagccctgcccggctgagccgctgtgtgcaggtgctgagcaggaagctgaccctgaaggccaaggccctgcacgcccgcatccagcagaacctggaccagctgcgggaggagctgagccgggcctttgctggcaccggcacagaggagggcgccggccctgacccccagatgctgtctgaggaggtgcggcagaggctgcaggccttccggcaggacacctacctgcagattgctgccttcacccgggccatcgaccaggagacagaggaggtgcagcagcagctggcccctcctcctcctggccacagcgcctttgcccctgagttccagcagacagattctgggaaggtgctgagcaagctgcaggcccggctggatgacctgtgggaggacatcacccacagcctgcatgaccagggccacagccacctgggggacccctag

SEQ ID NO: 143843 - DNA, 1074 bp, synthetic construct
  misc_feature 1..1074: note = Description of Artificial Sequence: Synthetic coding sequence
  source 1..1074: mol_type = other DNA
atgaacccccagatccggaaccccatggagaggatgtacagagacaccttctatgacaactttgaaaatgagcccatcctgtatggccgcagctacacctggctgtgctatgaggtgaagatcaagaggggccgcagcaacctgctgtgggacaccggggtcttccggggccaggtgtacttcaagccccagtaccacgccgagatgtgcttcctgtcctggttctgtggcaaccagctgcctgcctacaagtgcttccagatcacctggtttgtgtcctggaccccctgcccagactgtgtggccaagctggccgagttcctgtctgagcaccccaacgtgaccctgaccatctctgctgcccggctgtactactactgggagcgggactaccgccgggccctgtgccgcctgagccaggccggggcccgggtgaccatcatggactatgaggagtttgcctactgctgggagaactttgtgtacaatgaaggccagcagttcatgccctggtacaagtttgatgagaactatgccttcctgcacaggaccctgaaggagatcctgcgctacctgatggaccctgacaccttcaccttcaacttcaacaatgaccccctggtgctgcggcggcggcagacctacctgtgctatgaggtggagcggctggacaatggcacctgggtgctgatggaccagcacatgggcttcctgtgcaatgagctggaccctgcccagatctacagagtgacctggttcatctcctggagcccctgcttctcctggggctgtgccggggaggtgcgggccttcctgcaggagaacacccacgtgcggctgcgcatctttgctgcccgcatctatgactatgaccccctgtacaaggaggccctgcagatgctgagagatgctggggcccaggtgtccatcatgacctatgatgaatttgagtactgctgggacacctttgtgtaccggcagggctgccccttccagccctgggatggcctggaggagcacagccaggccctgagcggccgcctgcgggccatcctgcagaaccagggcaactag

SEQ ID NO: 143844 - DNA, 306 bp, synthetic construct
  misc_feature 1..306: note = Description of Artificial Sequence: Synthetic coding sequence
  source 1..306: mol_type = other DNA
atgaagccccacttcaggaacacagtggagaggatgtacagagacaccttctcctacaacttctacaaccggcccatcctgagcagaagaaacacagtgtggctgtgctatgaggtgaagaccaagggccccagccggccccggctggatgccaagatcttccggggccaggtgcccaggagcttcatccgggcccccttccaggtgctgagcagccccttcggccagtgtgcccctcctcatggaacagcccaggtgcagtggccaccccagctgacagctggccgggagcagggccggccctag

SEQ ID NO: 143845 - DNA, 381 bp, synthetic construct
  misc_feature 1..381: note = Description of Artificial Sequence: Synthetic coding sequence
  source 1..381: mol_type = other DNA
atggccagcgccagcacccagcctgctgccctgtctgctgagcaggccaaggtggtgctggccgaggtgatccaggccttcagcgccccagaaaatgctgtgaggatggatgaggcccgggacaatgcctgcaatgacatgggcaagatgctgcagtttgtgctgcctgtggccacccagatccagcaggaggtgatcaaggcctacggcttcagctgtgatggagaaggagtgctgaagtttgcccggctggtgaagagctatgaggcccaggaccctgagatcgccagcctgagcggcaagctgaaggccctcttcctgccccccatgaccctgccccctcatggccctgctgctgggggctctgtggccgccagctag

SEQ ID NO: 143846 - DNA, 675 bp, synthetic construct
  misc_feature 1..675: note = Description of Artificial Sequence: Synthetic coding sequence
  source 1..675: mol_type = other DNA
atggcccagaaggaggaggccgctgtggccacagaagctgccagccagaatggagaggacctggagaacctggatgatcctgagaagctgaaggagctgattgagctgcccccatttgaaattgtgactggagagcggctgcctgccaacttcttcaagttccagttcagaaatgtggagtacagcagtggaagaaacaagaccttcctgtgctacgtggtggaggcccagggcaaaggaggccaggtgcaggccagccggggctacctggaggatgagcacgccgccgcccatgctgaggaggccttcttcaacaccatcctgcctgcctttgatcctgccctgcgctacaacgtgacctggtacgtgagcagcagcccctgtgccgcctgtgccgaccgcatcatcaagaccctgagcaagaccaagaacctgcggctgctgatcctggtgggccgcctcttcatgtgggaggagcctgagatccaggccgccctgaagaagctgaaggaggccggctgcaagctgcgcatcatgaagccccaggactttgaatatgtgtggcagaactttgtggagcaggaggagggggagagcaaggccttccagccctgggaggacatccaggagaacttcctgtactatgaggagaagctggccgacatcctgaagtag

SEQ ID NO: 143847 - DNA, 393 bp, synthetic construct
  misc_feature 1..393: note = Description of Artificial Sequence: Synthetic coding sequence
  source 1..393: mol_type = other DNA
atggcccagaaggaggaggccgctgtggccacagaagctgccagccagaatggagaggacctggagaacctggatgatcctgagaagctgaaggagctgattgagctgcccccatttgaaattgtgactggagagcggctgcctgccaacttcttcaagttccagttcagaaatgtggagtacagcagcggcaggaagctgagcagcacccccagctgccagcccagcacccagccctgtggcaccatgagccctggcatgtgccccccagcccctgtgcagagggtgctgacagccctgagcaagcccctggcccggcccaggacctgtgtgtgcagcttctggtgggtggacagcagctgtggccgcagcagaagaagccggctgctgtag

SEQ ID NO: 143848 - DNA, 600 bp, synthetic construct
  misc_feature 1..600: note = Description of Artificial Sequence: Synthetic coding sequence
  source 1..600: mol_type = other DNA
atggaggccagccctgccagcggccccaggcacctgatggacccccacatcttcaccagcaacttcaacaacggcatcggccgccacaagacctacctgtgctatgaggtggagcggctggacaatggcacctctgtgaagatggaccagcaccggggcttcctgcacaaccaggccaagaacctgctgtgtggcttctacggcagacatgctgagctgcgcttcctggacctggtgcccagcctgcagctggaccctgcccagatctacagagtgacctggttcatctcctggagcccctgcttctcctggggctgtgccggggaggtgcgggccttcctgcaggagaacacccacgtgcggctgcgcatctttgctgcccgcatctatgactatgaccccctgtacaaggaggccctgcagatgctgagagatgctggggcccaggtgtccatcatgacctatgatgagttcaagcactgctgggacacctttgtggaccaccagggctgccccttccagccctgggatggcctggatgagcacagccaggccctgagcggccgcctgcgggccatcctgcagaaccagggcaactag

SEQ ID NO: 143849 - DNA, 600 bp, synthetic construct; identical to SEQ ID NO: 143848
  misc_feature 1..600: note = Description of Artificial Sequence: Synthetic coding sequence
  source 1..600: mol_type = other DNA

SEQ ID NO: 143850 - DNA, 1149 bp, synthetic construct
  misc_feature 1..1149: note = Description of Artificial Sequence: Synthetic coding sequence
  source 1..1149: mol_type = other DNA
atgaacccccagatccggaaccccatggagaggatgtacagagacaccttctatgacaactttgaaaatgagcccatcctgtatggccgcagctacacctggctgtgctatgaggtgaagatcaagaggggccgcagcaacctgctgtgggacaccggggtcttccggggccaggtgtacttcaagccccagtaccacgccgagatgtgcttcctgtcctggttctgtggcaaccagctgcctgcctacaagtgcttccagatcacctggtttgtgtcctggaccccctgcccagactgtgtggccaagctggccgagttcctgtctgagcaccccaacgtgaccctgaccatctctgctgcccggctgtactactactgggagcgggactaccgccgggccctgtgccgcctgagccaggccggggcccgggtgaccatcatggactatgaggagtttgcctactgctgggagaactttgtgtacaatgaaggccagcagttcatgccctggtacaagtttgatgagaactatgccttcctgcacaggaccctgaaggagatcctgcgctacctgatggaccctgacaccttcaccttcaacttcaacaatgaccccctggtgctgcggcggcggcagacctacctgtgctatgaggtggagcggctggacaatggcacctgggtgctgatggaccagcacatgggcttcctgtgcaatgaggccaagaacctgctgtgtggcttctacggcagacatgctgagctgcgcttcctggacctggtgcccagcctgcagctggaccctgcccagatctacagagtgacctggttcatctcctggagcccctgcttctcctggggctgtgccggggaggtgcgggccttcctgcaggagaacacccacgtgcggctgcgcatctttgctgcccgcatctatgactatgaccccctgtacaaggaggccctgcagatgctgagagatgctggggcccaggtgtccatcatgacctatgatgaatttgagtactgctgggacacctttgtgtaccggcagggctgccccttccagccctgggatggcctggaggagcacagccaggccctgagcggccgcctgcgggccatcctgcagaaccagggcaactag

SEQ ID NO: 143851 - DNA, 573 bp, synthetic construct
  misc_feature 1..573: note = Description of Artificial Sequence: Synthetic coding sequence
  source 1..573: mol_type = other DNA
atgaacccccagatccggaaccccatgaaggccatgtacccaggcaccttctacttccagttcaagaacctgtgggaggccaatgacagaaatgagacctggctgtgcttcaccgtggagggcatcaagagaagatctgtggtgtcctggaagacaggagtcttcaggaaccaggtggacagcgagacccactgccacgccgagcgctgcttcctgtcctggttctgtgatgacatcctgagccccaacaccaagtaccaggtgacctggtacacctcctggagcccctgcccagactgtgccggggaggtggccgagttcctggcccggcacagcaatgtgaacctgaccatcttcaccgcccggctgtactacttccagtacccctgctaccaggagggcctgcggagcctgagccaggagggcgtggccgtggagatcatggactatgaggacttcaagtactgctgggagaactttgtgtacaatgacaatgagcccttcaagccctggaagggcctgaagaccaacttccggctgctgaagaggcggctgcgggagagcctgcagtag

SEQ ID NO: 143852 - DNA, 1122 bp, synthetic construct
  misc_feature 1..1122: note = Description of Artificial Sequence: Synthetic coding sequence
  source 1..1122: mol_type = other DNA
atgaagccccacttcaggaacacagtggagaggatgtacagagacaccttctcctacaacttctacaaccggcccatcctgagcagaagaaacacagtgtggctgtgctatgaggtgaagaccaagggccccagccggccccggctggatgccaagatcttccggggccaggtgtacagccagcctgagcaccacgccgagatgtgcttcctgtcctggttctgtggcaaccagctgcctgcctacaagtgcttccagatcacctggtttgtgtcctggaccccctgcccagactgtgtggccaagctggccgagttcctggccgagcaccccaacgtgaccctgaccatctctgctgcccggctgtactactactgggagcgggactacagaagagccctgtgccgcctgagccaggccggggcccgggtgaagatcatggatgatgaggagtttgcctactgctgggagaactttgtgtacagcgagggccagcccttcatgccctggtacaagtttgatgacaactatgccttcctgcacaggaccctgaaggagatcctgaggaaccccatggaggccatgtacccccacatcttctacttccacttcaagaacctgaggaaggcctatggaagaaatgaatcctggctgtgcttcaccatggaggtggtgaagcaccacagccctgtgtcctggaagaggggcgtcttcaggaaccaggtggaccctgagacccactgccacgccgagcgctgcttcctgtcctggttctgtgatgacatcctgagccccaacaccaactatgaggtgacctggtacacctcctggagcccctgcccagaatgtgccggggaggtggccgagttcctggcccggcacagcaatgtgaacctgaccatcttcaccgcccggctgtactacttctgggacacagactaccaggagggcctgcggagcctgagccaggagggcgcctctgtggagatcatgggctacaaggacttcaagtactgctgggagaactttgtgtacaatgatgatgagcccttcaagccctggaagggcctgaagtacaacttcctgttcctggacagcaagctgcaggagatcctggagtag

SEQ ID NO: 143853 - DNA, 1155 bp, synthetic construct
  misc_feature 1..1155: note = Description of Artificial Sequence: Synthetic coding sequence
  source 1..1155: mol_type = other DNA
atgaagccccacttcaggaacacagtggagaggatgtacagagacaccttctcctacaacttctacaaccggcccatcctgagcagaagaaacacagtgtggctgtgctatgaggtgaagaccaagggccccagcaggcctcccctggatgccaagatcttccggggccaggtgtacagcgagctgaagtaccaccctgagatgaggttcttccactggttcagcaagtggaggaagctgcaccgggaccaggagtatgaggtgacctggtacatctcctggagcccctgcaccaagtgcacccgggacatggccaccttcctggccgaggaccccaaggtgaccctgaccatctttgtggcccggctgtactacttctgggaccctgactaccaggaggccctgcggagcctgtgccagaagagagatggcccccgggccaccatgaagatcatgaactatgatgagttccagcactgctggagcaagtttgtgtacagccagcgggagctgtttgagccctggaacaacctgcccaagtactacatcctgctgcacatcatgctgggggagatcctgcggcacagcatggacccccccaccttcaccttcaacttcaacaatgagccctgggtgcggggcagacatgagacctacctgtgctatgaggtggagaggatgcacaatgacacctgggtgctgctgaaccagaggcggggcttcctgtgcaaccaggccccccacaagcacggcttcctggagggcagacatgctgagctgtgcttcctggatgtgatccccttctggaagctggacctggaccaggactacagagtgacctgcttcacctcctggagcccctgcttcagctgtgcccaggagatggccaagttcatcagcaagaacaagcacgtgtccctgtgcatcttcaccgcccgcatctatgatgaccagggccgctgccaggagggcctgcggaccctggccgaggccggggccaagatcagcatcatgacctacagcgagttcaagcactgctgggacacctttgtggaccaccagggctgccccttccagccctgggatggcctggatgagcacagccaggacctgagcggccgcctgcgggccatcctgcagaaccaggagaactag

SEQ ID NO: 143854 - DNA, 1155 bp, synthetic construct; identical to SEQ ID NO: 143853
  misc_feature 1..1155: note = Description of Artificial Sequence: Synthetic coding sequence
  source 1..1155: mol_type = other DNA

SEQ ID NO: 143855 - DNA, 549 bp, synthetic construct
  misc_feature 1..549: note = Description of Artificial Sequence: Synthetic coding sequence
  source 1..549: mol_type = other DNA
atggccctgctgacagctgagaccttccggctgcagttcaacaacaagaggcggctgcggcggccctactaccccaggaaggccctgctgtgctaccagctgaccccccagaatggcagcacccccacccggggctactttgagaacaagaagaagtgccacgccgagatctgcttcatcaatgagatcaagtccatgggcctggatgagacccagtgctaccaggtgacctgctacctgacctggagcccctgcagcagctgtgcctgggagctggtggacttcatcaaggcccatgaccacctgaacctgggcatctttgccagccggctgtactaccactggtgcaagccccagcagaagggcctgcggctgctgtgtggcagccaggtgcctgtggaggtgatgggcttccccaagtttgctgactgctgggagaactttgtggaccacgagaagcccctgtccttcaacccctacaagatgctggaggagctggacaagaacagccgggccatcaagaggcggctggagcgcatcaagagctag

SEQ ID NO: 143856 - DNA, 603 bp, synthetic construct
  misc_feature 1..603: note = Description of Artificial Sequence: Synthetic coding sequence
  source 1..603: mol_type = other DNA
atggccctgctgacagctgagaccttccggctgcagttcaacaacaagaggcggctgcggcggccctactaccccaggaaggccctgctgtgctaccagctgaccccccagaatggcagcacccccacccggggctactttgagaacaagaagaagtgccacgccgagatctgcttcatcaatgagatcaagtccatgggcctggatgagacccagtgctaccaggtgacctgctacctgacctggagcccctgcagcagctgtgcctgggagctggtggacttcatcaaggcccatgaccacctgaacctgggcatctttgccagccggctgtactaccactggtgcaagccccagcagaagggcctgcggctgctgtgtggcagccaggtgcctgtggaggtgatgggcttccccaagtttgctgactgctgggagaactttgtggaccacgagaagcccctgtccttcaacccctacaagatgctggaggagctggacaagaacagccgggccatcaagaggcggctggagcgcatcaagatccctggggtgcgggcccagggccgctacatggacatcctgtgtgatgctgaggtgtag

SEQ ID NO: 143857 - DNA, 465 bp, synthetic construct
  misc_feature 1..465: note = Description of Artificial Sequence: Synthetic coding sequence
  source 1..465: mol_type = other DNA
atggccctgctgacagctgagaccttccggctgcagttcaacaacaagaggcggctgcggcggccctactaccccaggaaggccctgctgtgctaccagctgaccccccagaatggcagcacccccacccggggctactttgagaacaagaagaagtgccacgccgagatctgcttcatcaatgagatcaagtccatgggcctggatgagacccagtgctaccaggtgacctgctacctgacctggagcccctgcagcagctgtgcctgggagctggtggacttcatcaaggcccatgaccacctgaacctgggcatctttgccagccggctgtactaccactggtgcaagccccagcagaagggcctgcggctgctgtgtggcagccaggtgcctgtggaggtgatgggcttccccaacagccggggcacctgtgccggcagcctgcacggctacatcgtgtag

SEQ ID NO: 143858 - DNA, 552 bp, synthetic construct
  misc_feature 1..552: note = Description of Artificial Sequence: Synthetic coding sequence
  source 1..552: mol_type = other DNA
atggccctgctgacagctgagaccttccggctgcagttcaacaacaagaggcggctgcggcggccctactaccccaggaaggccctgctgtgctaccagctgaccccccagaatggcagcacccccacccggggctactttgagaacaagaagaagtgccacgccgagatctgcttcatcaatgagatcaagtccatgggcctggatgagacccagtgctaccaggtgacctgctacctgacctggagcccctgcagcagctgtgcctgggagctggtggacttcatcaaggcccatgaccacctgaacctgggcatctttgccagccggctgtactaccactggtgcaagccccagcagaagggcctgcggctgctgtgtggcagccaggtgcctgtggaggtgatgggcttccccaagtttgctgactgctgggagaactttgtggaccacgagaagcccctgtccttcaacccctacaagatgctggaggagctggacaagaacagccgggccatcaagaggcggctggagcgcatcaagcagagctag

SEQ ID NO: 143859 - DNA, 1104 bp, synthetic construct
  misc_feature 1..1104: note = Description of Artificial Sequence: Synthetic coding sequence
  source 1..1104: mol_type = other DNA
atggagcccatctatgaggagtacctggccaaccacggcaccatcgtgaagccctactactggctgtccttcagcctggactgcagcaactgcccctaccacatcagaactggagaggaggcccgggtgtccctgacagagttctgccagatcttcggcttcccctacggcaccaccttcccccagaccaagcacctgaccttctatgagctgaagaccagcagcggcagcctggtgcagaagggccacgccagcagctgcaccggcaactacatccaccctgagagcatgctgtttgagatgaatggctacctggacagcgccatctacaacaatgacagcatccgccacatcatcctgtacagcaacaacagcccctgcaatgaggccaaccactgctgcatcagcaagatgtacaacttcctgatcacctacccaggcatcaccctgagcatctacttcagccagctgtaccacacagagatggacttccctgccagcgcctggaaccgggaggccctgcggagcctggccagcctgtggccccgggtggtgctgagccccatcagcggcggcatctggcacagcgtgctgcacagcttcatctctggagtgtctggcagccacgtgttccagcccatcctgaccggccgggccctggccgacagacacaatgcctatgagatcaatgccatcactggagtgaagccctacttcacagatgtgctgctgcagaccaagaggaaccccaacaccaaggcccaggaggccctggagagctaccccctgaacaatgccttccctggccagttcttccagatgcccagcggccagctgcagcccaacctgcccccagacctgcgggcccctgtggtgtttgtgctggtgcccctgcgggacctgccccccatgcacatgggccagaaccccaacaagcccaggaacatcgtgcgccacctgaacatgccccagatgtccttccaggagaccaaggacctgggccgcctgcccaccggccgctctgtggagatcgtggagatcacagagcagtttgccagcagcaaggaggctgatgagaagaagaagaagaagggcaagaagtag

SEQ ID NO: 143860 - DNA, 252 bp, synthetic construct
  misc_feature 1..252: note = Description of Artificial Sequence: Synthetic coding sequence
  source 1..252: mol_type = other DNA
atgaggctcttcctgagcctgcctgtgctggtggtggtgctgagcatcgtgctggagggccctgccccagcccagggcaccccagatgtgagcagcgccctggacaagctgaaggagtttggaaacaccctggaggacaaggcccgggagctgatcagccgcatcaagcagagcgagctgagcgccaagatgagggagtggttcagcgagaccttccagaaggtgaaggagaagctgaagattgacagctag

SEQ ID NO: 143861 - DNA, 306 bp, synthetic construct
  misc_feature 1..306: note = Description of Artificial Sequence: Synthetic coding sequence
  source 1..306: mol_type = other DNA
atgggcacccggctgctgcctgccctcttcctggtgctgctggtgctgggctttgaggtgcagggcacccagcagccccagcaggatgagatgcccagccccaccttcctgacccaggtgaaggagagcctgagcagctactgggagagcgccaagacagctgcccagaacctgtatgagaagacctacctgcctgctgtggatgagaagctgcgggacctgtacagcaagagcacagctgccatgagcacctacacaggcatcttcacagaccaggtgctgtctgtgctgaagggggaggagtag

SEQ ID NO: 143862 - DNA, 384 bp, synthetic construct
  misc_feature 1..384: note = Description of Artificial Sequence: Synthetic coding sequence
  source 1..384: mol_type = other DNA
atgagcctgctgaggaaccggctgcaggccctgcctgccctgtgcctgtgtgtgctggtgctggcctgcatcggggcctgccagcctgaggcccaggagggcaccctgagccccccacccaagctgaagatgagccgctggagcctggtgcggggccgcatgaaggagctgctggagaccgtggtgaacagaacaagagatggctggcagtggttctggagccccagcaccttccggggcttcatgcagacctactatgatgaccacctgcgggacctgggccccctgaccaaggcctggttcctggagagcaaggacagcctgctgaagaagacccacagcctgtgcccccggctggtgtgtggggacaaggaccagggctag

SEQ ID NO: 143863 - DNA, 1101 bp, synthetic construct; identical to SEQ ID NO: 143842
  misc_feature 1..1101: note = Description of Artificial Sequence: Synthetic coding sequence
  source 1..1101: mol_type = other DNA

SEQ ID NO: 143864 - DNA, 354 bp, synthetic construct
  misc_feature 1..354: note = Description of Artificial Sequence: Synthetic coding sequence
  source 1..354: mol_type = other DNA
atgggcacctggggcgccccccacaggaccctgccctgcaggaacagaggagccatgcagccccgggtgctgctggtggtggccctgctggccctgctggccagcgcccgggccagcgaggccgaggatgccagcctgctgtccttcatgcagggctacatgaagcacgccaccaagacagccaaggatgccctgagctctgtgcaggagagccaggtggcccagcaggcccggggctgggtgacagatggcttcagcagcctgaaggactactggagcacagtgaaggacaagttcagcgagttctgggacctggaccctgaggtgcggcccaccagcgctgtggccgcctag

SEQ ID NO: 143865 - DNA, 168 bp, synthetic construct
  misc_feature 1..168: note = Description of Artificial Sequence: Synthetic coding sequence
  source 1..168: mol_type = other DNA
atgcagccccgggtgctgctggtggtggccctgctggccctgctggccagcgcccgggccagcgaggccgaggatgccagcctgctgtccttcatgcagggctacatgaagcacgccaccaagacagccaaggatgccctgagctctgtgcaggagagccaggtgtag

SEQ ID NO: 143866 - DNA, 384 bp, synthetic construct; identical to SEQ ID NO: 143862
  misc_feature 1..384: note = Description of Artificial Sequence: Synthetic coding sequence
  source 1..384: mol_type = other DNA

SEQ ID NO: 143867 - DNA, 384 bp, synthetic construct; identical to SEQ ID NO: 143862
  misc_feature 1..384: note = Description of Artificial Sequence: Synthetic coding sequence
  source 1..384: mol_type = other DNA

SEQ ID NO: 143868 - DNA, 570 bp, synthetic construct
  misc_feature 1..570: note = Description of Artificial Sequence: Synthetic coding sequence
  source 1..570: mol_type = other DNA
atggtgatgctgctgctgctgctgagcgccctggccggcctgtttggagctgctgagggccaggccttccacctgggcaaatgtcccaacccccctgtgcaggagaactttgatgtgaacaagtacctgggccgctggtatgaaattgagaagatccccaccacctttgaaaatggccgctgcatccaggccaactacagcctgatggagaatggcaagatcaaggtgctgaaccaggagctgcgggcagatggcaccgtgaaccagatcgagggggaggccacccctgtgaacctgacagagcccgccaagctggaggtgaagttctcctggttcatgcccagcgccccctactggatcctggccacagattatgagaactatgccctggtgtacagctgcacctgcatcatccagctgttccacgtggactttgcctggatcctggccaggaaccccaacctgcccccagagaccgtggacagcctgaagaacatcctgaccagcaacaacattgatgtgaagaagatgacagtgacagaccaggtgaactgccccaagctgtcctag

SEQ ID NO: 143869 - DNA, 450 bp, synthetic construct
  misc_feature 1..450: note = Description of Artificial Sequence: Synthetic coding sequence
  source 1..450: mol_type = other DNA
atggtgatgctgctgctgctgctgagcgccctggccggcctgtttggagctgctgagggccaggccttccacctgggcaaatgtcccaacccccctgtgcaggagaactttgatgtgaacaagtacctgggccgctggtatgaaattgagaagatccccaccacctttgaaaatggccgctgcatccaggccaactacagcctgatggagaatggcaagatcaaggtgctgaaccaggagctgcgggcagatggcaccgtgaaccagatcgagggggaggccacccctgtgaacctgacagagcccgccaagctggaggtgaagttctcctggttcatgcccagcgccccctactggatcctggccacagattatgagaactatgccctggtgtacagctgcacctgcatcatccagctgttccacgtggactttgcctggatcctgtag

SEQ ID NO: 143870 - DNA, 954 bp, synthetic construct
  misc_feature 1..954: note = Description of Artificial Sequence: Synthetic coding sequence
  source 1..954: mol_type = other DNA
atgaaggtgctgtgggccgccctgctggtgaccttcctggccggctgccaggccaaggtggagcaggccgtggagacagagcctgagcctgagctgcggcagcagacagagtggcagagcggccagcgctgggagctggccctgggccgcttctgggactacctgcgctgggtgcagaccctgtctgagcaggtgcaggaggagctgctgagcagccaggtgacccaggagctgcgggccctgatggatgagaccatgaaggagctgaaggcctacaagtctgagctggaggagcagctgacccctgtggccgaggagacccgggcccggctgagcaaggagctgcaggccgcccaggcccggctgggcgctgacatggaggatgtgtgtggccgcctggtgcagtacagaggagaggtgcaggccatgctgggccagagcacagaggagctgcgggtgcggctggccagccacctgaggaagctgaggaagaggctgctgagagatgctgatgacctgcagaagaggctggccgtgtaccaggccggggcccgggagggcgctgagcggggcctgagcgccatccgggagcggctgggccccctggtggagcagggccgggtgcgggccgccaccgtgggcagcctggccggccagcccctgcaggagcgggcccaggcctggggcgagcggctgcgggccaggatggaggagatgggcagcaggacccgggaccggctggatgaggtgaaggagcaggtggccgaggtgcgggccaagctggaggagcaggcccagcagatccggctgcaggccgaggccttccaggcccggctgaagtcctggtttgagcccctggtggaggacatgcagaggcagtgggccggcctggtggagaaggtgcaggccgctgtgggcaccagcgctgcccctgtgcccagcgacaaccactag

SEQ ID NO: 143871 - DNA, 660 bp, synthetic construct
  misc_feature 1..660: note = Description of Artificial Sequence: Synthetic coding sequence
  source 1..660: mol_type = other DNA
atgaaggtgctgtgggccgccctgctggtgaccttcctggccggctgccaggccaaggtggagcaggccgtggagacagagcctgagcctgagctgcggcagcagacagagtggcagagcggccagcgctgggagctggccctgggccgcttctgggactacctgcgctgggtgcagaccctgtctgagcaggtgcaggaggagctgctgagcagccaggtgacccaggagctgcgggccctgatggatgagaccatgaaggagctgaaggcctacaagtctgagctggaggagcagctgacccctgtggccgaggagacccgggcccggctgagcaaggagctgcaggccgcccaggcccggctgggcgctgacatggaggatgtgtgtggccgcctggtgcagtacagaggagaggtgcaggccatgctgggccagagcacagaggagctgcgggtgcggctggccagccacctgaggaagctgaggaagaggctgctgagagatgctgatgacctgcagaagaggctggccgtgtaccaggccggggcccgggagggcgctgagcggggcctgagcgccatccgggagcggctgggccccctggtggagcagggccgggtgcgggccgccaccgtgggcagcctggccggccagtag

SEQ ID NO: 143872 - DNA, 867 bp, synthetic construct
  misc_feature 1..867: note = Description of Artificial Sequence: Synthetic coding sequence
  source 1..867: mol_type = other DNA
gaggtgaaggatgtgctgccccaggagcctgtgcgctctgctgtgggcggcaccggcatgagcagcggggccagcaggaagtcctgggaccccggcaacccctggcccccagactggcccatcaccggcaggaagatgaaggtgctgtgggccgccctgctggtgaccttcctggccggctgccaggccaaggtggagcaggccgtggagacagagcctgagcctgagctgcggcagcagacagagtggcagagcggccagcgctgggagctggccctgggccgcttctgggactacctgcgctgggtgcagaccctgtctgagcaggtgcaggaggagctgctgagcagccaggtgacccaggagctgcgggccctgatggatgagaccatgaaggagctgaaggcctacaagtctgagctggaggagcagctgacccctgtggccgaggagacccgggcccggctgagcaaggagctgcaggccgcccaggcccggctgggcgctgacatggaggatgtgtgtggccgcctggtgcagtacagaggagaggtgcaggccatgctgggccagagcacagaggagctgcgggtgcggctggccagccacctgaggaagctgaggaagaggctgctgagagatgctgatgacctgcagaagaggctggccgtgtaccaggccggggcccgggagggcgctgagcggggcctgagcgccatccgggagcggctgggccccctggtggagcagggccgggtgcgggccgccaccgtgggcagcctggccggccagcccctgcaggagcgggcccaggcctggggcgagcggctgcgggccaggatggaggagatgggcagcaggacatag

SEQ ID NO: 143873 - DNA, 651 bp, synthetic construct
  misc_feature 1..651: note = Description of Artificial Sequence: Synthetic coding sequence
  source 1..651: mol_type = other DNA
atgaaggtgctgtgggccgccctgctggtgaccttcctggccggctgccaggccaaggtggagcaggccgtggagacagagcctgagcctgagctgcggcagcagacagagtggcagagcggccagcgctgggagctggccctgggccgcttctgggactacctgcgctgggtgcagaccctgtctgagcaggtgcaggaggagctgctgagcagccaggtgacccaggagctgcgggccctgatggatgagaccatgaaggagctgaaggcctacaagtctgagctggaggagcagctgacccctgtggccgaggagacccgggcccggctgagcaaggagctgcaggccgcccaggcccggctgggcgctgacatggaggatgtgtgtggccgcctggtgcagtacagaggagaggtgcaggccatgctgggccagagcacagaggagctgcgggtgcggctggccagccacctgaggaagctgaggaagaggctgctgagagatgctgatgacctgcagaagaggctggccgtgtaccaggccggggcccgggagggcgctgagcggggcctgagcgccatccgggagcggctgggccccctggtggagcagggccgggtgcgggccgccaccgtgggcagcctgtag

SEQ ID NO: 143874 - DNA, 10593 bp, synthetic construct
  misc_feature 1..10593: note = Description of Artificial Sequence: Synthetic coding sequence
  source 1..10593: mol_type = other DNA
atggccaaggaggaggatgaggagaagaaggccaagaagggcaagaagggcaagaaggcccctgagcctgagaagcccaagaggagcctgaagggcaccagccgcctcttcatgggcttccgggacaggacccccaagatcagcaagaagggccagttccgcagcgccagcgccttcttctggggcctgcacacaggcccccagaagaccaagaggaagaggaaggccaggacagtgctgaagagcaccagcaagctgatgacccagatgaggatgggcaagaagaagagggccatgaagggcaagaagcccagcttcatggtgatccgcttccctggccggcggggctacggccgcctgcggccccgggcccggagcctgagcaaggccagcacagccatcaactggctgaccaagaagttcctgctgaagaaggccgaggagagcggcagcgagcaggccaccgtggatgcctggctgcagaggagcagcagcaggatgggcagcaggaagctgcccttccccagcggggctgagatcctgcggcctgggggccgcctgcggcgcttccccaggagccgcagcatctatgccagcggggagcccctgggcttcctgccctttgaagatgaggcccccttccaccacagcggcagcaggaagagcctgtatggcctggagggcttccaggacctgggggagtactatgactaccacagagatggagatgactactatgaccggcagagcctgcacagatatgaggagcaggagccctacctggccggcctgggcccctacagccctgcctggccaccctacggggaccactactacggctacccacctgaggacccctatgactactaccacccagactactatggaggcccctttgatcctggctacacctacggctacggctatgatgattatgagcccccctatgccccacccagcggctacagcagcccctacagctaccatgatggctatgaaggagaggcccacccctacggctactacctggacccctatgccccctatgatgccccctacccaccctatgacctgccctaccacaccccctatgatgtgccctactttgacccctacggcgtgcactacacagtgccctatgcagagggcgtgtatggaggaggagatgaggccatctacccacctgaggtgccctacttctacccagaggagagcgccagcgcctttgtgtacccctgggtgcccccacccatccccagcccccacaacccctatgcccacgccatggatgacattgctgagctggaggagccagaagatgctggggtggagcggcagggcaccagcttccggctgcccagcgctgccttctttgagcagcagggcatggacaagccagcccggagcaagctgagcctcatcaggaagttccgcctcttcccccggccccaggtgaagctgtttgggaaggagaagctggaggtgcccctgccccccagcctggacatccccctgcccctgggagatgctgatgaggaggaggatgaggaggagctgccccctgtgtctgctgtgccctacggccaccccttctggggcttcctgaccccccggcagaggaacctgcagagggccctgagcgcctttggagcccaccggggcctgggctttggacctgagtttggccggcctgtgcccaggcctgccaccagcctggcccgcttcctgaagaagaccctgtctgagaagaagcccatcgcccggctgcggggcagccagaaggcccgggccggcggccctgctgtgcgggaggccgcctacaagcgcttcggctacaagctggccggcatggaccctgagaagccaggcacccccatcgtgctgcggcgggcccagccccgggcccggagcagcaatgatgcccggcggcccccagccccccagcctgcccccaggaccctgagccactggagcgccctgctgagcccccctgtgccccccaggcctcccagcagcggccccccaccagccccacccctgagccctgccctgagcggcctgcccaggcctgccagcccctacggcagcctgcggcggcaccccccaccctgggccgccccagcccacgtgcccccagccccccaggcctcctggtgggcctttgtggagcccccagctgtgtccccagaggtgcccccagacctgctggccttccctggcccccggcccagcttccggggcagcagaagaagaggagctgccttcggcttccctggggccagcccccgggccagcagaagaagagcctggagccccctggccagcccccagcccagcctgcggagcagccctggcctgggctactgcagccccctggccccacccagcccccagctgagcctgaggacaggccccttccagccccccttcctgcccccagcccggcggcccaggagcctgcaggagagccctgcccccaggagagctgctggccgcctgggccccccaggcagccccctgcccggcagcccccggccccccagcccccccctgggcctgtgccacagcccccggcgcagcagcctgaacctgcccagccggctgccccacacctggaggcggctgtctgagccccccaccagggctgtgaagccccaggtgcggctgcccttccaccggccccccagggctggggcctggagggcccccctggagcaccgggagagcccccgggagcctgaggacagcgagaccccctggacagtgccccccctggcccccagctgggatgtggacatgccacccacccagaggcctcccagcccctggccaggaggagctggcagccggcggggcttcagccggcccccacctgtgcctgagaaccccttcctgcagctgctgggccctgtgcccagccccaccctgcagccagaagatcctgctgctgacatgaccagggtcttcctgggccgccaccacgagcccggccctggccagctgaccaagtctgctggccccaccccagagaagccagaggaggaggccaccctgggggacccccagctgcctgctgagaccaagccacccaccccagccccacccaaggatgtgaccccacccaaggacatcaccccacccaaggatgtgctgcctgagcagaagaccctgcggcccagcctgagctaccccctggccgcctgtgaccagacccgggccacctggccaccctggcaccgctggggcaccctgccccaggccgccgcccccctggcccccatccgggcccctgagcccctgcccaagggcggggagcggcggcaggccgcccctggccgctttgctgtggtgatgccccgggtgcagaagctgagcagcttccagagggtgggccctgccaccctgaagccccaggtgcagcccatccaggaccccaagccccgggcctgcagcctgcgctggagctgcctgtggctgcgggcagatgcctacggcccctggccccgggtgcacacccacccccagagctgccacctgggccctggagctgcctgcctgagcctgcggggctcctgggaggaggtgggccccccatcctggaggaacaagatgcacagcatccggaacctgcccagcatgaggttccgggagcagcacggagaagatggagtggaggacatgacccagctggaggacctgcaggagaccaccgtgctgagcaacctgaagatccgctttgagaggaacctgatctacacctacatcggcagcatcctggtgtctgtgaacccctaccagatgtttggcatctacggccctgagcaggtgcagcagtacaacggccgggccctgggggagaaccccccccacctgtttgctgtggccaacctggcctttgccaagatgctggatgccaagcagaaccagtgcatcatcatcagcggggagagcggcagcggcaagacagaggccaccaagctgatcctgcgctacctggccgccatgaaccagaagcgggaggtgatgcagcagatcaagatcctggaggccacccccctgctggagagctttggaaatgccaagacagtgagaaatgacaacagcagcagatttgggaagtttgtggagatcttcctggagggcggcgtcatcagcggggccatcaccagccagtacctgctggagaagagcagaattgtgttccaggccaagaatgaaagaaactaccacatcttctatgagctgctggccggcctgcctgcccagctgcggcaggccttcagcctgcaggaggccgagacctactactacctgaaccagggcggcaactgtgaaattgctgggaagagtgatgctgatgacttccggcggctgctggccgccatggaggtgctgggcttcagcagcgaggaccaggacagcatcttccgcatcctggccagcatcctgcacctgggcaatgtgtactttgagaagtatgaaacagatgcccaggaggtggcctctgtggtgtctgcccgggagatccaggccgtggccgagctgctgcagatcagccctgagggcctgcagaaggccatcaccttcaaggtgacagagaccatgagggagaagatcttcacccccctgactgtggagagcgctgtggatgccagagatgccatcgccaaggtgctgtatgccctgctcttctcctggctgatcaccagggtgaatgccctggtgagcccccggcaggacaccctgagcatcgccatcctggacatctacggctttgaggacctgtccttcaacagctttgagcagctgtgcatcaactatgccaatgaaaacctgcagtacctgttcaacaagatcgtgttccaggaggagcaggaggagtacatccgggagcagattgactggcaggagatcacctttgctgacaaccagccctgcatcaacctgatcagcctgaagccctacggcatcctgcgcatcctggatgaccagtgctgcttcccccaggccacagaccacaccttcctgcagaagtgccactaccaccacggggccaaccccctgtacagcaagcccaagatgcccctgcctgagttcaccatcaagcactacgccggcaaggtgacctaccaggtgcacaagttcctggacaagaaccacgaccaggtgcggcaggatgtgctggacctgtttgtgcgcagcaggaccagggtggtggcccacctgttcagcagccacgccccccaggccgccccccagaggctgggcaagagcagctctgtgacccggctgtacaaggcccacacagtggccgccaagttccagcagagcctgctggacctggtggagaagatggagcgctgcaaccccctcttcatgcgctgcctgaagcccaaccacaagaaggagcccggcctgtttgagccagatgtggtgatggcccagctgcgctacagcggcgtgctggagaccgtgcgcatcaggaaggagggcttccctgtgcggctgcccttccagggcttcatcgaccgctactgctgcctggtggccctgaagcatgacctgcctgccaacggggacatgtgtgtgtctgtgctgagccggctgtgcaaggtgatgcccaacatgtacagagtgggcgtgtccaagctgttcctgaaggagcacctgtaccagctgctggagagcatgagggagcacgtgctgaacctggccgccctgaccctgcagcgctgcctgcggggcttcttcatcaagaggcgcttccgcagcctgcggcacaagatcatcctgctgcagagccgggcccggggctacctggcccggcagcgctaccagcagatgagaagaagcctggtgaagttccgcagcctggtgcacgcctacgtgtccagaagacgctacctgaagctgcgggcagagtggcgctgccaggtggagggcgccctgctgtgggagcaggaggagctgagcaagcgggaggtggtggccgtgggccacctggaggtgcctgctgagctggccggcctgctgcaggccgtggccggcctgggcctggcccaggtgccccaggtggcccctgtgaggaccccccggctgcaggccgagccccgggtgaccctgcccctggacatcaacaactaccccatggccaagtttgtgcagtgccacttcaaggagcccgccttcggcatgctgactgtgcccctgcggacccccctgacccagctgcctgctgagcaccacgccgaggccgtgtccatcttcaagctgatcctgcgcttcatgggagacccccacctgcacggggcccgggagaacatctttggaaactacatcgtgcagaagggcctggccgtgcctgagctgagagatgagatcctggcccagctggccaaccaggtgtggcacaaccacaatgcccacaatgctgagcggggctggctgctgctggccgcctgcctgagcggctttgcccccagcccctgcttcaacaagtacctgctgaagtttgtgtctgactatggaagaaatggcttccaggccgtgtgccagcaccggctgatgcaggccatgggccgggcccagcagcagggcagcggggccgcccggaccctgccccccacccagctggagtggacagccacctatgagaaggcctccatggccctggatgtgggctgcttcaacggggaccagttcagctgccctgtgcacagctggagcactggagaggaggtggccggggacatcctgcggcaccggggcctggctgatggctggaggggctggacagtggccatgaagaatggagtgcagtgggccgagctggccggccatgactatgtgctggacctggtgtctgacctggagctgctgcgggacttcccccggcagaagagctacttcatcgtgggcacagagggccctgctgccagcagaggaggccccaaggtggtgtttggaaacagctgggacagtgatgaggacatgagcacccggccccagccccaggagcacatgcccaaggtgctggacagtgatggctacagcagccacaaccaggacggcaccaatggagaaacagaggcccagaggggcacagccacccaccaggagagtgacagcctgggggagcctgctgtgccccacaagggcctggactgctacctggacagcctgtttgatcctgtgctgtcctatggagatgctgacctggagaagcccacagccatcgcctacaggatgaagggcggcggccagcccggcggcggcagcagcagcggcacagaggacaccccaagaagacctcctgagcccaagcccatccctggcctggatgccagcaccctggccctgcagcaggccttcatccacaagcaggccgtgctgctggcccgggagatgaccctgcaggccacagccctgcagcagcagcccctgtctgctgccctgcggagcctgcctgctgagaagcccccagcccctgaggcccagcccacctctgtgggcactggacctccagccaagcctgtgctgctgcgggccacccccaagcccctggccccagcccccctggccaaggccccccggctgcccatcaagcctgtggccgcccctgtgctggcccaggaccaggccagccctgagaccaccagccccagccctgagctggtgcgctacagcaccctgaacagcgagcacttcccccagcccacccagcagatcaagaacatcgtgcggcagtaccagcagcccttccggggcggccggcctgaggccctgaggaaggatggcggcaaggtgttcatgaagaggccagacccccatgaggaggccctgatgatcctgaagggccagatgacccacctggccgccgcccctggcacccaggtgtcccgggaggccgtggccctggtgaagcctgtgaccagcgccccccggcccagcatggcccccaccagcgccctgcccagccgcagcctggagcccccagaggagctgacccagacccggctgcacaggctcatcaaccccaacttctacggctaccaggatgccccctggaagatcttcctgaggaaggaggtgttctaccccaaggacagctacagccaccctgtgcagctggacctgctcttccggcagatcctgcatgacaccctgtctgaggcctgcctgcgcatcagtgaagatgagcggctgaggatgaaggccctgtttgcccagaaccagctggacacccagaagcccctggtgacagagagcgtgaagagagctgtggtgtccacagcccgggacacctgggaggtgtacttcagccgcatcttccctgccaccggctctgtgggcactggagtgcagctgctggccgtgagccacgtgggcatcaagctgctgaggatggtgaagggcggccaggaggccggcggccagctgcgggtgctgcgggcctacagctttgctgacatcctgtttgtgaccatgcccagccagaacatgctggagttcaacctggccagcgagaaggtgatcctcttcagcgcccgggcccaccaggtgaagaccctggtggatgacttcatcctggagctgaagaaggacagcgactatgtggtggccgtgaggaacttcctgcctgaagatcctgccctgctggccttccacaagggggacatcatccacctgcagcccctggagcccccccgggtgggctacagcgctggctgtgtggtgcggaggaaggtggtgtacctggaggagctgcggcggcggggccctgactttggctggaggtttggcaccatccacggccgggtgggccgcttccccagcgagctggtgcagcctgctgctgccccagacttcctgcagctgcccacagagcccggccggggccgggctgctgctgtggccgctgctgtggccagcgctgctgctgcccaggaggtgggcagaagaagagagggcccccctgtgcgggcccggtctgctgaccacggggaggatgccctggccctgcccccctacaccatgctggagtttgcccagaagtacttccgggacccccagaggcggccccaggacggcctgcggctgaagagcaaggagccccgggagagcaggaccctggaggacatgctgtgcttcaccaagacccccctgcaggagagcctcatcgagctgagtgacagcagcctgagcaagatggccacagacatgttcctggccgtgatgaggttcatgggagatgcccccctgaagggccagagcgacctggatgtgctgtgcaacctgctgaagctgtgtggggaccacgaggtgatgagagatgagtgctactgccaggtggtgaagcagatcacagacaacaccagcagcaagcaggacagctgccagaggggctggaggctgctgtacatcgtgacagcctaccacagctgcagcgaggtgctgcacccccacctgacccgcttcctgcaggatgtgtccaggaccccaggcctgcccttccagggcatcgccaaggcctgtgagcagaacctgcagaagaccctgcgctttggaggccgcctggagctgcccagcagcattgagctgcgggccatgctggccggccgcagcagcaagaggcagctgttcctgctgcccggcggcctggagcggcacctgaagatcaagacctgcaccgtggccctggatgtggtggaggagatctgtgccgagatggccctgaccaggcctgaggccttcaatgaatatgtgatctttgtggtgaccaacagaggccagcacgtgtgccccctgagcagaagagcctacatcctggatgtggccagcgagatggagcaggtggatggcggctacatgctgtggttccggcgggtgctgtgggaccagcccctgaagtttgaaaatgagctgtatgtgaccatgcactacaaccaggtgctgcctgactacctgaagggcctcttcagctctgtgcctgccagccggcccagcgagcagctgctgcagcaggtgtccaagctggccagcctgcagcaccgggccaaggaccacttctacctgcccagcgtgcgggaggtgcaggagtacatcccagcccagctgtaccgcaccacagctggcagcacctggctgaacctggtgtcccagcaccggcagcagacccaggccctgagcccccaccaggcccgggcccagttcctgggcctgctgagcgccctgcccatgtttggcagcagcttcttcttcatccagagctgcagcaacattgctgtgcctgccccctgcatcctggccatcaaccacaacggcctgaacttcctgagcacagagacccatgagctgatggtgaagttccccctgaaggagatccagagcaccaggacccagaggcccacagccaacagcagctacccctacgtggagatcgccctgggagatgtggccgcccagaggaccctgcagctgcagctggagcagggcctggagctgtgccgggtggtggccgtgcacgtggagaacctgctgagcgcccacgagaagaggctgaccctgcccccatctgagatcaccctgctgtag

SEQ ID NO: 143875 - DNA, 840 bp, synthetic construct
  misc_feature 1..840: note = Description of Artificial Sequence: Synthetic coding sequence
  source 1..840: mol_type = other DNA
atgttccgggccccctgccaccggctgcgggcccggggcaccaggaaggcccgggccggggcctggaggggctgcaccttcccctgcctgggcaagggcatggagaggcctgctgcccgggagccccacggcccagatgccctgcggcgcttccagggcctgctgctggaccggcggggccgcctgcacggccaggtgctgcggctgcgggaggtggcccggcggctggagcggctgcggcggcgcagcctggtggccaacgtggccggcagcagcctgagcgccaccggggccctggccgccatcgtgggcctgagcctgagccctgtgaccctgggcaccagcctgctggtgtctgctgtgggcctgggcgtggccacagctgggggcgctgtgaccatcaccagtgacctgagcctcatcttctgcaacagccgggagctgcggcgggtgcaggagattgctgccacctgccaggaccagatgagggagatcctgagctgcctggagttcttctgccgctggcagggctgtggggaccggcagctgctgcagtgtggcagaaatgccagcatcgccctgtacaacagcgtgtacttcatcgtgttcttcggcagccggggcttcctgatccccaggagagctgagggggacaccaaggtgtcccaggccgtgctgaaggccaagatccagaagctggccgagagcctggagagctgcacaggagccctggatgagctgtctgagcagctggagagccgggtgcagctgtgcaccaagagcagccggggccatgacctgaagatctctgctgaccagagagctggcctcttcttctag

SEQ ID NO: 143876 - DNA, 747 bp, synthetic construct
  misc_feature 1..747: note = Description of Artificial Sequence: Synthetic coding sequence
  source 1..747: mol_type = other DNA
atgggcatggagaggcctgctgcccgggagccccacggcccagatgccctgcggcgcttccagggcctgctgctggacagaagaggccgcctgcacggccaggtgctgcggctgcgggaggtggcccggcggctggagcggctgcggcggcgcagcctggtggccaacgtggccggcagcagcctgagcgccactggagccctggccgccatcgtgggcctgagcctgagccctgtgaccctgggcaccagcctgctggtgtctgctgtgggcctgggcgtggccacagctggaggagctgtgaccatcaccagtgacctgagcctcatcttctgcaacagccgggagctgcggcgggtgcaggagattgctgccacctgccaggaccagatgagggagatcctgagctgcctggagttcttctgccgctggcagggctgtggggaccggcagctgctgcagtgtggcagaaatgccagcatcgccctgtacaacagcgtgtacttcatcgtgttcttcggcagccggggcttcctgatcccccggcgggcagagggggacaccaaggtgtcccaggccgtgctgaaggccaagatccagaagctggccgagagcctggagagctgcaccggggccctggatgagctgtctgagcagctggagagccgggtgcagctgtgcaccaagagcagccggggccatgacctgaagatctctgctgaccagagagctggcctcttcttctag

SEQ ID NO: 143877 - DNA, 1245 bp, synthetic construct
  misc_feature 1..1245: note = Description of Artificial Sequence: Synthetic coding sequence
  source 1..1245: mol_type = other DNA
atgaggttcaagagccacacagtggagctgcggcggccctgcagcgacatggagggcgccgccctgctgcgggtgtctgtgctgtgcatctggatgtctgccctcttcctgggcgtgggcgtgcgggcagaggaggccggggcccgggtgcagcagaatgtgcccagcggcacagacaccggggacccccagagcaagcccctgggggactgggccgccggcaccatggaccctgagagcagcatcttcattgaagatgccatcaagtacttcaaggagaaggtgtccacccagaacctgctgctgctgctgacagacaatgaggcctggaatggatttgtggccgctgctgagctgcccagaaatgaagcagatgagctgaggaaggccctggacaacctggcccggcagatgatcatgaaggacaagaactggcatgacaagggccagcagtacagaaactggttcctgaaggagttcccccggctgaagtctgagctggaggacaacatccggcggctgcgggccctggctgatggagtgcagaaggtgcacaagggcaccaccatcgccaacgtggtgtctggcagcctgagcatcagcagcggcatcctgaccctggtgggcatgggcctggcccccttcacagagggcggcagcctggtgctgctggagcccggcatggagctgggcatcacagctgccctgaccggcatcaccagcagcaccatggactatggcaagaagtggtggacccaggcccaggcccatgacctggtgatcaagagcctggacaagctgaaggaggtgcgggagttcctgggggagaacatcagcaacttcctgagcctggccggcaacacctaccagctgacccggggcatcggcaaggacatccgggccctgcggcgggcccgggccaacctgcagagcgtgccccacgccagcgccagccggccccgggtgacagagcccatctctgctgagagcggggagcaggtggagcgggtgaatgagcccagcatcctggagatgagccggggcgtgaagctgacagatgtggcccctgtgtccttcttcctggtgctggatgtggtgtacctggtgtatgagagcaagcacctgcacgagggcgccaagtcagaaacagctgaggagctgaagaaggtggcccaggagctggaggagaagctgaacatcctgaacaacaactacaagatcctgcaggccgaccaggagctgtag

SEQ ID NO: 143878 - DNA, 834 bp, synthetic construct
  misc_feature 1..834: note = Description of Artificial Sequence: Synthetic coding sequence
  source 1..834: mol_type = other DNA
atgatcatgaaggacaagaactggcatgacaagggccagcagtacagaaactggttcctgaaggagttcccccggctgaagtctgagctggaggacaacatccggcggctgcgggccctggctgatggagtgcagaaggtgcacaagggcaccaccatcgccaacgtggtgtctggcagcctgagcatcagcagcggcatcctgaccctggtgggcatgggcctggcccccttcacagaaggaggcagcctggtgctgctggagcccggcatggagctgggcatcacagctgccctgaccggcatcaccagcagcaccatggactatggcaagaagtggtggacccaggcccaggcccatgacctggtgatcaagagcctggacaagctgaaggaggtgcgggagttcctgggggagaacatcagcaacttcctgagcctggccggcaacacctaccagctgacccggggcatcggcaaggacatccgggccctgcggcgggcccgggccaacctgcagagcgtgccccacgccagcgccagccggccccgggtgacagagcccatctctgctgagagcggggagcaggtggagcgggtgaatgagcccagcatcctggagatgagcagaggagtgaagctgacagatgtggcccctgtgtccttcttcctggtgctggatgtggtgtacctggtgtatgagagcaagcacctgcatgaaggagccaagtcagaaacagctgaggagctgaagaaggtggcccaggagctggaggagaagctgaacatcctgaacaacaactacaagatcctgcaggccgaccaggagctgtag

SEQ ID NO: 143879 - DNA, 1197 bp, synthetic construct
  misc_feature 1..1197: note = Description of Artificial Sequence: Synthetic coding sequence
  source 1..1197: mol_type = other DNA
atggagggcgccgccctgctgcgggtgtctgtgctgtgcatctggatgtctgccctcttcctgggcgtgggcgtgcgggcagaggaggccggggcccgggtgcagcagaatgtgcccagcggcacagacaccggggacccccagagcaagcccctgggggactgggccgccggcaccatggaccctgagagcagcatcttcattgaagatgccatcaagtacttcaaggagaaggtgtccacccagaacctgctgctgctgctgacagacaatgaggcctggaatggatttgtggccgctgctgagctgcccagaaatgaagcagatgagctgaggaaggccctggacaacctggcccggcagatgatcatgaaggacaagaactggcatgacaagggccagcagtacagaaactggttcctgaaggagttcccccggctgaagtctgagctggaggacaacatccggcggctgcgggccctggctgatggagtgcagaaggtgcacaagggcaccaccatcgccaacgtggtgtctggcagcctgagcatcagcagcggcatcctgaccctggtgggcatgggcctggcccccttcacagagggcggcagcctggtgctgctggagcccggcatggagctgggcatcacagctgccctgaccggcatcaccagcagcaccatggactatggcaagaagtggtggacccaggcccaggcccatgacctggtgatcaagagcctggacaagctgaaggaggtgcgggagttcctgggggagaacatcagcaacttcctgagcctggccggcaacacctaccagctgacccggggcatcggcaaggacatccgggccctgcggcgggcccgggccaacctgcagagcgtgccccacgccagcgccagccggccccgggtgacagagcccatctctgctgagagcggggagcaggtggagcgggtgaatgagcccagcatcctggagatgagccggggcgtgaagctgacagatgtggcccctgtgtccttcttcctggtgctggatgtggtgtacctggtgtatgagagcaagcacctgcacgagggcgccaagtcagaaacagctgaggagctgaagaaggtggcccaggagctggaggagaagctgaacatcctgaacaacaactacaagatcctgcaggccgaccaggagctgtag

SEQ ID NO: 143880 - DNA, 1197 bp, synthetic construct; identical to SEQ ID NO: 143879
  misc_feature 1..1197: note = Description of Artificial Sequence: Synthetic coding sequence
  source 1..1197: mol_type = other DNA

SEQ ID NO: 143881 - DNA, 1197 bp, synthetic construct; identical to SEQ ID NO: 143879
  misc_feature 1..1197: note = Description of Artificial Sequence: Synthetic coding sequence
  source 1..1197: mol_type = other DNA

SEQ ID NO: 143882 - DNA, 1197 bp, synthetic construct; identical to SEQ ID NO: 143879
  misc_feature 1..1197: note = Description of Artificial Sequence: Synthetic coding sequence
  source 1..1197: mol_type = other DNA

SEQ ID NO: 143883 - DNA, 1143 bp, synthetic construct
  misc_feature 1..1143: note = Description of Artificial Sequence: Synthetic coding sequence
  source 1..1143: mol_type = other DNA
atggagggcgccgccctgctgcgggtgtctgtgctgtgcatctgggtgcagcagaatgtgcccagcggcacagacaccggggacccccagagcaagcccctgggggactgggccgccggcaccatggaccctgagagcagcatcttcattgaagatgccatcaagtacttcaaggagaaggtgtccacccagaacctgctgctgctgctgacagacaatgaggcctggaatggatttgtggccgctgctgagctgcccagaaatgaagcagatgagctgaggaaggccctggacaacctggcccggcagatgatcatgaaggacaagaactggcatgacaagggccagcagtacagaaactggttcctgaaggagttcccccggctgaagtctgagctggaggacaacatccggcggctgcgggccctggctgatggagtgcagaaggtgcacaagggcaccaccatcgccaacgtggtgtctggcagcctgagcatcagcagcggcatcctgaccctggtgggcatgggcctggcccccttcacagagggcggcagcctggtgctgctggagcccggcatggagctgggcatcacagctgccctgaccggcatcaccagcagcaccatggactatggcaagaagtggtggacccaggcccaggcccatgacctggtgatcaagagcctggacaagctgaaggaggtgcgggagttcctgggggagaacatcagcaacttcctgagcctggccggcaacacctaccagctgacccggggcatcggcaaggacatccgggccctgcggcgggcccgggccaacctgcagagcgtgccccacgccagcgccagccggccccgggtgacagagcccatctctgctgagagcggggagcaggtggagcgggtgaatgagcccagcatcctggagatgagccggggcgtgaagctgacagatgtggcccctgtgtccttcttcctggtgctggatgtggtgtacctggtgtatgagagcaagcacctgcacgagggcgccaagtcagaaacagctgaggagctgaagaaggtggcccaggagctggaggagaagctgaacatcctgaacaacaactacaagatcctgcaggccgaccaggagctgtag

SEQ ID NO: 143884 - DNA, 483 bp, synthetic construct
  misc_feature 1..483: note = Description of Artificial Sequence: Synthetic coding sequence
  source 1..483: mol_type = other DNA
atggagggcgccgccctgctgcgggtgtctgtgctgtgcatctggatgtctgccctcttcctgggcgtgggcgtgcgggcagaggaggccggggcccgggtgcagcagaatgtgcccagcggcacagacaccggggacccccagagcaagcccctgggggactgggccgccggcaccatggaccctgagagcagcatcttcattgaagatgccatcaagtacttcaaggagaaggtgtccacccagaacctgctgctgctgctgacagacaatgaggcctggaatggatttgtggccgctgctgagctgcccagaaatgaagcagatgagctgaggaaggccctggacaacctggcccggcagatgatcatgaaggacaagaactggcatgacaagggccagcagtacagaaactggttcctgaaggagttcccccggctgaagtctgagctggaggacaacatccggcggctgcgggcctag

SEQ ID NO: 143885 - DNA, 426 bp, synthetic construct
  misc_feature 1..426: note = Description of Artificial Sequence: Synthetic coding sequence
  source 1..426: mol_type = other DNA
atggagggcgccgccctgctgcgggtgtctgtgctgtgcatctggatgtctgccctcttcctgggcgtgggcgtgcgggcagaggaggccggggcccgggtgcagcagaatgtgcccagcggcacagacaccggggacccccagagcaagcccctgggggactgggccgccggcaccatggaccccggccctgctggcagcagaggagacagcggggagccctgcaccctgcggcctgcctgccggggccagaggcagcacggcggggccagccgcatctctgctgagggccctgcccccatgcccaggaggaggacccccagcacagcccacctgcgggtgcccaagaccagcagaagaaacctgctgtgcatgagagctgtgtccctgctgaggatgcccctgagcatcagcaggaagaagtag

SEQ ID NO: 143886 - DNA, 357 bp, synthetic construct
  misc_feature 1..357: note = Description of Artificial Sequence: Synthetic coding sequence
  source 1..357: mol_type = other DNA
atgaggttcaagagccacacagtggagctgcggagcaccctgagccagcccctcttcagctgcagcagaagaagaccctgcagcgacatggagggcgccgccctgctgcgggtgtctgtgctgtgcatctggatgtctgccctcttcctgggcgtgggcgtgcgggcagaggaggccggggcccgggtgcagcagaatgtgcccagcggcacagacacaggagacccccagagcaagcccctgggggactgggccgccggcaccatggaccctgagagcagcatcttcattgaagatgccatcaagtacttcaaggagaaggtgtccacccagaacctgctgctgctgctgacctag

SEQ ID NO: 143887 - DNA, 426 bp, synthetic construct; identical to SEQ ID NO: 143885
  misc_feature 1..426: note = Description of Artificial Sequence: Synthetic coding sequence
  source 1..426: mol_type = other DNA

SEQ ID NO: 143888 - DNA, 1014 bp, synthetic construct
  misc_feature 1..1014: note = Description of Artificial Sequence: Synthetic coding sequence
  source 1..1014: mol_type = other DNA
atgaaccctgagagcagcatcttcatcgaggactacctgaagtacttccaggaccaggtgtcccgggagaacctgctgcagctgctgacagatgatgaggcctggaatggatttgtggccgctgctgagctgcccagagatgaagcagatgagctgaggaaggccctgaacaagctggccagccacatggtgatgaaggacaagaacagacatgacaaggaccagcagcaccggcagtggttcctgaaggagttcccccggctgaagcgggagctggaggaccacatcaggaagctgcgggccctggccgaggaggtggagcaggtgcaccggggcaccaccatcgccaacgtggtgagcaacagcgtgggcaccaccagcggcatcctgaccctgctgggcctgggcctggcccccttcacagagggcatcagctttgtgctgctggacaccggcatgggcctgggcgctgctgctgctgtggccggcatcacctgcagcgtggtggagctggtgaacaagctgcgggcccgggcccaggccaggaacctggaccagagcggcaccaacgtggccaaggtgatgaaggagtttgtgggcggcaacaccccaaatgtgctgaccctggtggacaactggtaccaggtgacccagggcatcggcaggaacatccgggccatccggcgggcccgggccaacccccagctgggcgcctatgcccccccaccccacatcatcggccgcatctctgctgagggcggggagcaggtggagcgggtggtggagggccctgcccaggccatgagccggggcaccatgattgtgggcgccgccactggaggcatcctgctgctgctggatgtggtgtccctggcctatgagagcaagcacctgctggagggcgccaagtctgagagcgctgaggagctgaagaagagggcccaggagctggagggcaagctgaacttcctgaccaagatccacgagatgctgcagcccggccaggaccagtag

SEQ ID NO: 143889 - DNA, 1014 bp, synthetic construct; identical to SEQ ID NO: 143888
  misc_feature 1..1014: note = Description of Artificial Sequence: Synthetic coding sequence
  source 1..1014: mol_type = other DNA

SEQ ID NO: 143890 - DNA, 1350 bp, synthetic construct
  misc_feature 1..1350: note = Description of Artificial Sequence: Synthetic coding sequence
  source 1..1350: mol_type = other DNA
atgcacagctggacctgggacccccacagcagcgagcagctggacctggcccagagcctgtctgaggaggaccccctgagcagcctgcggggcagcatccagccccagcccccagctgaggccccagacaagggcggcagccaggccaacaatgaccccggcggctgggaccccggctgcagcagcagccaggtgctgggccgcacccggggcccctgcctgggcgtgcgggtgcgggaggaggaggccggcaccagggtgaaggagaacctgcctgtgtggacagtgactggagagctgcagggcaagcccctgggcaacccagctgctggcaccatgaaccctgagagcagcatcttcatcgaggactacctgaagtacttccaggaccaggtgtcccgggagaacctgctgcagctgctgacagatgatgaggcctggaatggatttgtggccgctgctgagctgcccagagatgaagcagatgagctgaggaaggccctgaacaagctggccagccacatggtgatgaaggacaagaacagacatgacaaggaccagcagcaccggcagtggttcctgaaggagttcccccggctgaagcgggagctggaggaccacatcaggaagctgcgggccctggccgaggaggtggagcaggtgcaccggggcaccaccatcgccaacgtggtgagcaacagcgtgggcaccaccagcggcatcctgaccctgctgggcctgggcctggcccccttcacagagggcatcagctttgtgctgctggacaccggcatgggcctgggcgctgctgctgctgtggccggcatcacctgcagcgtggtggagctggtgaacaagctgcgggcccgggcccaggccaggaacctggaccagagcggcaccaacgtggccaaggtgatgaaggagtttgtgggcggcaacaccccaaatgtgctgaccctggtggacaactggtaccaggtgacccagggcatcggcaggaacatccgggccatccggcgggcccgggccaacccccagctgggcgcctatgcccccccaccccacatcatcggccgcatctctgctgagggcggggagcaggtggagcgggtggtggagggccctgcccaggccatgagccggggcaccatgattgtgggcgccgccactggaggcatcctgctgctgctggatgtggtgtccctggcctatgagagcaagcacctgctggagggcgccaagtctgagagcgctgaggagctgaagaagagggcccaggagctggagggcaagctgaacttcctgaccaagatccacgagatgctgcagcccggccaggaccagtag

SEQ ID NO: 143891 - DNA, 225 bp, synthetic construct
  misc_feature 1..225: note = Description of Artificial Sequence: Synthetic coding sequence
  source 1..225: mol_type = other DNA
atgaaccctgagagcagcatcttcatcgaggactacctgaagtacttccaggaccaggtgtcccgggagaacctgctgcagctgctgacagatgatgaggcctggaatggatttgtggccgctgctgagctgcccagagatgaagcagatgagctgaggaaggccctgaacaagctggccagccacatggtgatgaaggacaagaacagacatgacaaggactag

SEQ ID NO: 143892 - DNA, 387 bp, synthetic construct
  misc_feature 1..387: note = Description of Artificial Sequence: Synthetic coding sequence
  source 1..387: mol_type = other DNA
atgaaccctgagagcagcatcttcatcgaggactacctgaagtacttccaggaccaggtgtcccgggagaacctgctgcagctgctgacagatgatgaggcctggaatggatttgtggccgctgctgagctgcccagagatgaagcagatgagctgaggaaggccctgaacaagctggccagccacatggtgatgaaggacaagaacagacatgacaaggaccagcagcaccggcagtggttcctgaaggagttcccccggctgaagcgggagctggaggaccacatcaggaagctgcgggccctggccgaggaggtggagcaggtgcaccggggcaccaccatcgccaacgtggtgagcaacagcgtgggcaccaccagcggctag

SEQ ID NO: 143893 - DNA, 1209 bp, synthetic construct
  misc_feature 1..1209: note = Description of Artificial Sequence: Synthetic coding sequence
  source 1..1209: mol_type = other DNA
atgggcctgggccagggctggggctgggaggccagctgctttgcctgcctgatccgcagctgctgccaggtggtgaccttcaccttccccttcggcttccagggcatcagccagagcctggagaatgtgtctggctactatgcagatgcccggctggaggtgggcagcacccagctgaggacagctggcagctgcagccacagcttcaagaggagcttcctggagaagaagcgcttcacagaggaggccaccaagtacttccgggagcgggtgtcccctgtgcacctgcagatcctgctgaccaacaatgaggcctggaagagatttgtgacagctgctgagctgcccagagatgaagcagatgccctgtatgaggccctgaagaagctgcggacctacgccgccattgaagatgaatatgtgcagcagaaggatgagcagttccgggagtggttcctgaaggagttcccccaggtgaagaggaagatccaggagagcattgagaagctgcgggccctggccaatggaattgaggaggtgcaccggggctgcaccatcagcaatgtggtgagcagcagcactggagctgccagcggcatcatgagcctggccggcctggtgctggcccccttcaccgctggcaccagcctggccctgacagctgctggggtgggcctgggcgccgccagcgctgtgacaggcatcaccaccagcatcgtggagcacagctacaccagcagcgctgaggccgaggccagccggctgacagccaccagcattgaccggctgaaggtgttcaaggaggtgatgagggacatcacccccaacctgctgagcctgctgaacaactactatgaggccacccagaccatcggcagcgagatccgggccatccggcaggcccgggcccgggcccggctgcctgtgaccacctggaggatctctgctggcagcggcggccaggccgagaggaccatcgccggcaccaccagggctgtgtccagaggagcccgcatcctgagcgccaccaccagcggcatcttcctggccctggatgtggtgaacctggtgtatgagagcaagcacctgcacgagggcgccaagagcgccagcgctgaggagctgcggcggcaggcccaggagctggaggagaacctgatggagctgacccagatctaccagaggctgaacccctgccacacccactag

SEQ ID NO: 143894 - DNA, 609 bp, synthetic construct
  misc_feature 1..609: note = Description of Artificial Sequence: Synthetic coding sequence
  source 1..609: mol_type = other DNA
atgagcctggccggcctggtgctggcccccttcaccgctggcaccagcctggccctgacagctgctggggtgggcctgggcgccgccagcgctgtgacaggcatcaccaccagcatcgtggagcacagctacaccagcagcgctgaggccgaggccagccggctgacagccaccagcattgaccggctgaaggtgttcaaggaggtgatgagggacatcacccccaacctgctgagcctgctgaacaactactatgaggccacccagaccatcggcagcgagatccgggccatccggcaggcccgggcccgggcccggctgcctgtgaccacctggaggatctctgctggcagcggcggccaggccgagaggaccatcgccggcaccaccagggctgtgtccagaggagcccgcatcctgagcgccaccaccagcggcatcttcctggccctggatgtggtgaacctggtgtatgagagcaagcacctgcacgagggcgccaagagcgccagcgctgaggagctgcggcggcaggcccaggagctggaggagaacctgatggagctgacccagatctaccagaggctgaacccctgccacacccactag

SEQ ID NO: 143895 - DNA, 609 bp, synthetic construct; identical to SEQ ID NO: 143894
  misc_feature 1..609: note = Description of Artificial Sequence: Synthetic coding sequence
  source 1..609: mol_type = other DNA

SEQ ID NO: 143896 - DNA, 996 bp, synthetic construct
  misc_feature 1..996: note = Description of Artificial Sequence: Synthetic coding sequence
  source 1..996: mol_type = other DNA
atggattctgagaagaagcgcttcacagaggaggccaccaagtacttccgggagcgggtgtcccctgtgcacctgcagatcctgctgaccaacaatgaggcctggaagagatttgtgacagctgctgagctgcccagagatgaagcagatgccctgtatgaggccctgaagaagctgcggacctatgctgccattgaagatgaatatgtgcagcagaaggatgagcagttccgggagtggttcctgaaggagttcccccaggtgaagaggaagatccaggagagcattgagaagctgcgggccctggccaacggcatcgaggaggtgcaccggggctgcaccatcagcaatgtggtgagcagcagcactggagctgccagcggcatcatgagcctggccggcctggtgctggcccccttcaccgctggcaccagcctggccctgacagctgctggggtgggcctgggcgccgccagcgctgtgacaggcatcaccaccagcatcgtggagcacagctacaccagcagcgctgaggccgaggccagccggctgacagccaccagcattgaccggctgaaggtgttcaaggaggtgatgagggacatcacccccaacctgctgagcctgctgaacaactactatgaggccacccagaccatcggcagcgagatccgggccatccggcaggcccgggcccgggcccggctgcctgtgaccacctggaggatctctgctggcagcggcggccaggccgagaggaccatcgccggcaccaccagggctgtgtccagaggagcccgcatcctgagcgccaccaccagcggcatcttcctggccctggatgtggtgaacctggtgtatgagagcaagcacctgcatgaaggagccaagagcgccagcgctgaggagctgcggcggcaggcccaggagctggaggagaacctgatggagctgacccagatctaccagaggctgaacccctgccacacccactag

SEQ ID NO: 143897 - DNA, 609 bp, synthetic construct; identical to SEQ ID NO: 143894
  misc_feature 1..609: note = Description of Artificial Sequence: Synthetic coding sequence
  source 1..609: mol_type = other DNA

SEQ ID NO: 143898 - DNA, 324 bp, synthetic construct
  misc_feature 1..324: note = Description of Artificial Sequence: Synthetic coding sequence
  source 1..324: mol_type = other DNA
atgggctcctgggtgcagctgatcacctctgtgggcaccagcggcctcttcctgggcgtgcgggtgcgggaggagggcgccggcatgcgctgcagcaagaccatccaggccggccagtggctggacagcagcaagggccccctgggccccagccccccacctgtgcccacagctggctacagcagcagcttctgtgtgcactacgtgaacctgctgcccggggtgctggtgctgtctgtgaccagccagtacccccacctgtccatggccctgtgccagctggccgcccatgactggccccggctgagctgtgtgtgtgtgtag

SEQ ID NO: 143899 - DNA, 1044 bp, synthetic construct
  misc_feature 1..1044: note = Description of Artificial Sequence: Synthetic coding sequence
  source 1..1044: mol_type = other DNA
atgggctcctgggtgcagctgatcacctctgtgggcgtgcagcagaaccaccctggctggacagtggccggccagttccaggagaagaagcgcttcacagaggaggtgattgagtacttccagaagaaggtgtcccctgtgcacctgaagatcctgctgaccagtgatgaggcctggaagagatttgtgcgggtggccgagctgccccgggaggaggctgatgccctgtatgaggccctgaagaacctgaccccctacgtggccatcgaggacaaggacatgcagcagaaggagcagcagttccgggagtggttcctgaagttcccccagatccgctggaagatccaggagagcattgagcggctgcgggtgattgccaatgaaattgagaaggtgcaccggggctgcgtcatcgccaacgtggtgtctggcagcacaggcatcctgagcgtcatcggcgtgatgctggcccccttcaccgctggcctgagcctgagcatcacagctgctggggtgggcctgggcatcgccagcgccacagctggcatcgccagcagcatcgtggagaacacctacaccaggtctgctgagctgacagccagccggctgacagccaccagcacagaccagctggaggccctgcgggacatcctgcgggacatcacccccaacgtgctgagctttgccctggactttgatgaggccaccaagatgattgccaatgatgtgcacaccctgcggcgcagcaaggccaccgtgggccggcccctcatcgcctggaggtatgtgcccatcaacgtggtggagaccctgcggaccaggggggcccccacccgcatcgtgaggaaggtggccaggaacctgggcaaggccaccagcggcgtgctggtggtgctggatgtggtgaacctggtgcaggacagcctggacctgcacaagggggccaagtctgagagcgctgagagcctgcggcagtgggcccaggagctggaggagaacctgaatgagctgacccacatccaccagagcctgaaggccggctag

SEQ ID NO: 143900 - DNA, 1053 bp, synthetic construct
  misc_feature 1..1053: note = Description of Artificial Sequence: Synthetic coding sequence
  source 1..1053: mol_type = other DNA
atggagggcgccgccctgctgaagatctttgtggtgtgcatctgggtgcagcagaaccaccctggctggacagtggccggccagttccaggagaagaagcgcttcacagaggaggtgattgagtacttccagaagaaggtgtcccctgtgcacctgaagatcctgctgaccagtgatgaggcctggaagagatttgtgcgggtggccgagctgccccgggaggaggctgatgccctgtatgaggccctgaagaacctgaccccctacgtggccatcgaggacaaggacatgcagcagaaggagcagcagttccgggagtggttcctgaagttcccccagatccgctggaagatccaggagagcattgaaaggctgcgggtcatcgccaatgaaattgagaaggtgcaccggggctgtgtgattgccaacgtggtgtctggcagcacaggcatcctgtctgtgattggagtgatgctggcccccttcaccgctggcctgagcctgagcatcacagctgctggggtgggcctgggcatcgccagcgccacagctggcatcgccagcagcatcgtggagaacacctacaccaggtctgctgagctgacagccagccggctgacagccaccagcacagaccagctggaggccctgcgggacatcctgcgggacatcaccccaaatgtgctgagctttgccctggactttgatgaggccaccaagatgattgccaatgatgtgcacaccctgcggcgcagcaaggccaccgtgggccggcccctgattgcctggaggtatgtgcccatcaacgtggtggagaccctgcggaccaggggggcccccaccagaattgtgaggaaggtggccaggaacctgggcaaggccaccagcggcgtgctggtggtgctggatgtggtgaacctggtgcaggacagcctggacctgcacaagggggccaagtctgagagcgctgagagcctgcggcagtgggcccaggagctggaggagaacctgaatgagctgacccacatccaccagagcctgaaggccggctag

SEQ ID NO: 143901 - DNA, 393 bp, synthetic construct
  misc_feature 1..393: note = Description of Artificial Sequence: Synthetic coding sequence
  source 1..393: mol_type = other DNA
atggagggcgccgccctgctgaagatctttgtggtgtgcatctgggtgcagcagaaccaccctggctggacagtggccggccagttccaggagaagaagcgcttcacagaggaggtgattgagtacttccagaagaaggtgtcccctgtgcacctgaagatcctgctgaccagtgatgaggcctggaagagatttgtgcgggtggccgagctgccccgggaggaggctgatgccctgtatgaggccctgaagaacctgaccccctacgtggccatcgaggacaaggacatgcagcagaaggagcagcagttccgggagtggttcctgaaggtgagcagcaaccagatggaggacagcggcgtgcacaggaaggccagctgccactgcaagtag

SEQ ID NO: 143902 - DNA, 384 bp, synthetic construct
  misc_feature 1..384: note = Description of Artificial Sequence: Synthetic coding sequence
  source 1..384: mol_type = other DNA
atgggctcctgggtgcagctgatcacctctgtgggcgtgcagcagaaccaccctggctggacagtggccggccagttccaggagaagaagcgcttcacagaggaggtgattgagtacttccagaagaaggtgtcccctgtgcacctgaagatcctgctgaccagtgatgaggcctggaagagatttgtgcgggtggccgagctgccccgggaggaggctgatgccctgtatgaggccctgaagaacctgaccccctacgtggccatcgaggacaaggacatgcagcagaaggagcagcagttccgggagtggttcctgaaggtgagcagcaaccagatggaggacagcggcgtgcacaggaaggccagctgccactgcaagtag

SEQ ID NO: 143903 - DNA, 198 bp, synthetic construct
  misc_feature 1..198: note = Description of Artificial Sequence: Synthetic coding sequence
  source 1..198: mol_type = other DNA
atgggctcctgggtgcagctgatcacctctgtgggcgtgcagcagaaccaccctggctggacagtggccggccagttccaggagaagaagcgcttcacagaggaggtgattgagtacttccagaagaaggtgtcccctgtgcacctgaagatcctgctgaccagtgatgaggcctggaagagatttgtgcgggtgtag

SEQ ID NO: 143904 - DNA, 384 bp, synthetic construct; identical to SEQ ID NO: 143902
  misc_feature 1..384: note = Description of Artificial Sequence: Synthetic coding sequence
  source 1..384: mol_type = other DNA

SEQ ID NO: 143905 - DNA, 183 bp, synthetic construct
  misc_feature 1..183: note = Description of Artificial Sequence: Synthetic coding sequence
  source 1..183: mol_type = other DNA
atgggctcctgggtgcagctgatcacctctgtgggcgtgcagcagaaccaccctggctggacagtggccggccagttccaggagaagaagcgcttcacagaggaggtgattgagtacttccagaagaaggtgtcccctgtgcacctgaagatcctgctgaccagtgatgaggcctggaagtag

SEQ ID NO: 143906 - DNA, 219 bp, synthetic construct
  misc_feature 1..219: note = Description of Artificial Sequence: Synthetic coding sequence
  source 1..219: mol_type = other DNA
atgggctcctgggtgcagctgatcacctctgtgggcgtgcagcagaaccaccctggctggacagtggccggccagttccaggagaagaagcgcttcacagaggaggtgattgagtacttccagaagaaggtgtcccctgtgcacctgaagatcctgctgaccagtgatgaggcctggaagagatttgtgcgggtggccgagctgccccgggaggagtag

SEQ ID NO: 143907 - DNA, 213 bp, synthetic construct
  misc_feature 1..213: note = Description of Artificial Sequence: Synthetic coding sequence
  source 1..213: mol_type = other DNA
atgggctcctgggtgcagctgatcacctctgtgggcgtgcagcagaaccaccctggctggacagtggccggccagttccaggagaagaagcgcttcacagaggaggtgattgagtacttccagaagaaggtgtcccctgtgcacctgaagatcctgctgaccagtgatgaggcctggaagagatttgtgcgggtggccgagctgcccaggtag

SEQ ID NO: 143908 - DNA, 1302 bp, synthetic construct
  misc_feature 1..1302: note = Description of Artificial Sequence: Synthetic coding sequence
  source 1..1302: mol_type = other DNA
atgccctgtgggaagcagggcaacctgcaggtgcccggcagcaaggtgctgcccggcctgggggagggctgcaaggagatgtggctgaggaaggtgatctacggcggggaggtgtggggcaagagccctgagcctgagttccccagcctggtgaacctgtgccagagctggaagatcaacaacctgatgagcacagtgcacagtgatgaagctggcatgctgagctacttcctgtttgaggagctgatgagatgtgacaaggacagcatgccagatggcaacctgtctgaggaggagaagctgttcctgagctacttccccctgcacaagtttgagctggagcagaacatcaaggagctgaacaccctggccgaccaggtggacaccacccatgagctgctgaccaagaccagcctggtggccagcagcagcggggctgtgtctggagtgatgaacatcctgggcctggccctggcccctgtgacagctgggggcagcctgatgctgagcgccaccggcaccggcctgggcgctgctgctgccatcaccaacatcgtgaccaacgtgctggagaacagaagcaacagcgctgcccgggacaaggccagccggctgggccccctgaccaccagccatgaggcctttggaggcatcaactggagcgagattgaagctgctggcttctgtgtgaacaagtgtgtgaaggccatccagggcatcaaggacctgcacgcctaccagatggccaagagcaacagcggcttcatggccatggtgaagaactttgtggccaagaggcacatccccttctggacagcccggggcgtgcagagggcctttgagggcaccaccctggccatgaccaatggagcctgggtgatgggcgctgctggagctggcttcctgctgatgaaggacatgagcagcttcctgcagagctggaagcacctggaggatggagccaggacagaaacagctgaggagctgcgggccctggccaagaagctggagcaggagctggaccggctgacccagcaccaccgccacctgccccagaaggccagccagacctgcagcagcagccggggccgggctgtgcggggcagccgggtggtgaagccagagggcagccgcagccccctgccctggcctgtggtggagcaccagccccggctgggccctggggtggccctgcggacccccaagaggacagtgtctgcccccaggatgctgggccaccagcctgcccccccagccccagccaggaagggccggcaggcccctggccgccaccggcagtag

SEQ ID NO: 143909 - DNA, 1032 bp, synthetic construct
  misc_feature 1..1032: note = Description of Artificial Sequence: Synthetic coding sequence
  source 1..1032: mol_type = other DNA
atggacaaccaggccgagcgggagagcgaggccggcgtgggcctgcagagagatgaagatgatgcccccctgtgtgaagatgtggagctgcaggatggagacctgagccctgaggagaagatcttcctgcgggagttcccccggctgaaggaggacctgaagggcaacatcgacaagctgcgggccctggctgatgacatcgacaagacccacaagaagttcaccaaggccaacatggtggccaccagcacagctgtgatcagcggcgtgatgagcctgctgggcctggccctggccccagccaccggcggcggcagcctgctgctgagcacagctggccagggcctggccacagctgctggggtgaccagcatcgtgtctggcaccctggagaggagcaagaacaaggaggcccaggcccgggcagaggacatcctgcccacctatgaccaggaggacagagaagatgaggaggagaaggctgactatgtgacagctgctgggaagatcatctacaacctgaggaacaccctgaagtatgccaagaagaatgtgcgggccttctggaagctgcgggccaacccccggctggccaatgccaccaagaggctgctgaccaccggccaggtgagcagccgcagccgggtgcaggtgcagaaggcctttgctggcaccaccctggccatgaccaagaatgcccgggtgctgggcggcgtgatgtctgccttcagcctgggctatgacctggccaccctgagcaaggagtggaagcacctgaaggagggcgcccggaccaagtttgctgaggagctgcgggccaaggccctggagctggagaggaagctgacagagctgacccagctgtacaagagcctgcagcagaaggtgcgcagccgggcccggggcgtgggcaaggacctgaccggcacctgtgaaacagaggcctactggaaggagctgcgggagcacgtgtggatgtggctgtggctgtgtgtgtgcctgtgtgtgtgtgtgtatgtgcagttcacctag

SEQ ID NO: 143910 - DNA, 540 bp, synthetic construct
  misc_feature 1..540: note = Description of Artificial Sequence: Synthetic coding sequence
  source 1..540: mol_type = other DNA
atgttcaaggtgatccagaggtctgtgggccctgccagcctgagcctgctgaccttcaaggtgtatgctgcccccaagaaggacagcccccccaagaacagcgtgaaggtggatgagctgagcctgtacagcgtgcctgagggccagagcaaatatgtggaggaggcccggagccagctggaggagagcatcagccagctgcggcactactgtgagccctacaccacctggtgccagacagccatgaccatcagcaagatgcacctgctcttcttcccccggctgggcgtcatcggctttgctggcctcatcggcctgctgctggcccggggcagcaagatcaagaagctggtgtacccacctggcttcatgggcctggccgccagcctgtactacccccagcaggccatcgtgtttgcccaggtgtctggagagcggctgtatgactggggcctgcggggctacatcgtgattgaggacctgtggaaggagaacttccagaagccaggaaatgtgaagaacagccctggcaccaagtag

SEQ ID NO: 143911 - DNA, 597 bp, synthetic construct
  misc_feature 1..597: note = Description of Artificial Sequence: Synthetic coding sequence
  source 1..597: mol_type = other DNA
atgttcaaggtgatccagaggtctgtgggccctgccagcctgagcctgctgaccttcaaggtgtatgctgcccccaagaaggacagcccccccaagaacagcgtgaaggtggatgagctgagcctgtacagcgtgcctgagggccagagcaaatatgtggaggaggcccggagccagctggaggagagcatcagccagctgcggcactactgtgagccctacaccacctggtgccaggagacctacagccagaccaagcccaagatgcagagcctggtgcagtggggcctggacagctatgactacctgcagaatgcccctcctggcttcttcccccggctgggcgtgattggatttgctggcctgattggcctgctgctggcccggggcagcaagatcaagaagctggtgtacccacctggcttcatgggcctggccgccagcctgtactacccccagcaggccatcgtgtttgcccaggtgtctggagagcggctgtatgactggggcctgcggggctacatcgtgattgaggacctgtggaaggagaacttccagaagccaggaaatgtgaagaacagccctggcaccaagtag

SEQ ID NO: 143912 - DNA, 537 bp, synthetic construct
  misc_feature 1..537: note = Description of Artificial Sequence: Synthetic coding sequence
  source 1..537: mol_type = other DNA
gtgtatgctgcccccaagaaggacagcccccccaagaacagcgtgaaggtggatgagctgagcctgtacagcgtgcctgagggccagagcaaatatgtggaggaggcccggagccagctggaggagagcatcagccagctgcggcactactgtgagccctacaccacctggtgccaggagacctacagccagaccaagcccaagatgcagagcctggtgcagtggggcctggacagctatgactacctgcagaatgcccctcctggcttcttcccccggctgggcgtgattggatttgctggcctgattggcctgctgctggcccggggcagcaagatcaagaagctggtgtacccacctggcttcatgggcctggccgccagcctgtactacccccagcaggccatcgtgtttgcccaggtgtctggagagcggctgtatgactggggcctgcggggctacatcgtgattgaggacctgtggaaggagaacttccagaagccaggaaatgtgaagaacagccctggcaccaagtag

SEQ ID NO: 143913 - DNA, 1332 bp, synthetic construct
  misc_feature 1..1332: note = Description of Artificial Sequence: Synthetic coding sequence
  source 1..1332: mol_type = other DNA
atggaccggctgggccccttcagcaatgaccccagcgacaagccaccctgccggggctgcagcagctacctgatggagccctacatcaagtgtgctgaatgtggccccccacccttcttcctgtgcctgcagtgcttcacccggggctttgagtacaagaagcaccagagcgaccacacctatgagatcatgaccagtgacttccctgtgctggaccccagctggacagcccaggaggagatggccctgctggaggccgtgatggactgtggcttcggcaactggcaggatgtggccaaccagatgtgcaccaagaccaaggaggagtgtgagaagcactacatgaagcacttcatcaacaaccccctgtttgccagcaccctgctgaacctgaagcaggccgaggaggccaagacagctgacacagccatccccttccacagcacagatgaccccccccggcccacctttgacagcctgctgagccgggacatggccggctacatgcctgcccgggctgacttcatcgaggagtttgacaactatgcagagtgggacctgcgggacatcgactttgtggaggatgacagcgacatcctgcacgccctgaagatggctgtggtggacatctaccacagccggctgaaggagcggcagaggaggaagaagatcatccgggaccacggcctcatcaacctgaggaagttccagctgatggagcggcgctaccccaaggaggtgcaggacctgtatgagaccatgagaagatttgcccgcatcgtgggccctgtggagcatgacaagttcatcgagagccacgccctggagtttgagctgcggcgggagatcaagaggctgcaggagtacagaacagctggcatcaccaacttctgcagcgcccggacctatgaccacctgaagaagacccgggaggaggagcggctgaagaggaccatgctgtctgaggtgctgcagtacatccaggacagcagcgcctgccagcagtggctgcggcggcaggccgacattgattctggcctgagccccagcatccccatggccagcaacagcggcagaagaagtgccccacccctgaacctgaccggcctgcctggaacagagaagctgaatgagaaggagaaggagctgtgccagatggtgcggctggtgcctggggcctacctggagtacaagagcgccctgctgaatgaatgcaacaagcagggcggcctgcggctggcccaggcccgggccctgatcaagattgatgtgaacaagaccaggaagatctatgacttcctgatccgggagggctacatcaccaagggctag

SEQ ID NO: 143914 - DNA, 978 bp, synthetic construct
  misc_feature 1..978: note = Description of Artificial Sequence: Synthetic coding sequence
  source 1..978: mol_type = other DNA
atggtgccccgggaggcccctgagagcgcccagtgcctgtgccccagcctgaccatccccaatgccaaggatgtgctgaggaagaggcacaagaggaggagccggcagcaccagcgcttcatggccaggaaggccctgctgcaggagcagggcctgctgtccatgcctcctgagcccggcagcagccccctgcccaccccatttggagctgccacagccacagaggccgccagcagcggcaagcagtgcctgcgggccggcagcggcagcgccccctgcagcagaagacctgcccctgggaaggccagcggccccctgcccagcaaatgtgtggccatcgactgtgagatggtgggcaccggcccccggggccgggtgtctgagctggcccgctgcagcatcgtgtcctaccacggcaatgtgctgtatgacaagtacatccggcctgagatgcccatcgctgactaccgcacccgctggagcggcatcacccggcagcacatgaggaaggctgtgcccttccaggtggcccagaaggagatcctgaagctgctgaagggcaaggtggtggtgggccacgccctgcacaatgacttccaggccctgaagtatgtgcaccccaggagccagacccgggacaccacctacgtgcccaacttcctgtctgagcccggcctgcacacccgggcccgggtgtccctgaaggacctggccctgcagctgctgcacaagaagatccaggtgggccagcacggccacagctctgtggaggatgccaccacagccatggagctgtaccgcctggtggaggtgcagtgggagcagcaggaggcccggagcctgtggacctgcccagaggaccgggagccagacagcagcacagacatggagcagtacatggaggaccagtactggccagatgacctggcccacggcagcagaggaggagcccgggaggcccaggacagaagaaattag

SEQ ID NO: 143915 - DNA, 984 bp, synthetic construct
  misc_feature 1..984: note = Description of Artificial Sequence: Synthetic coding sequence
  source 1..984: mol_type = other DNA
atggtgccccgggaggcccctgagagcgcccagtgcctgtgccccagcctgaccatccccaatgccaaggatgtgctgaggaagaggcacaagaggaggagccggcagcaccagcgcttcatggccaggaaggccctgctgcaggagcagggcctgctgtccatgcctcctgagcccggcagcagccccctgcccaccccatttggagctgccacagccacagaggccgccagcagcggcaagcagtgcctgcgggccggcagcggcagcgccccctgcagcagaagacctgcccctgggaaggccagcggccccctgcccagcaaatgtgtggccatcgactgtgagatggtgggcaccggcccccggggccgggtgtctgagctggcccgctgcagcatcgtgtcctaccacggcaatgtgctgtatgacaagtacatccggcctgagatgcccatcgctgactaccgcacccgctggagcggcatcacccggcagcacatgaggaaggctgtgcccttccaggtggcccagaaggagatcctgaagctgctgaagggcaaggtggtggtgggccacgccctgcacaatgacttccaggccctgaagtatgtgcaccccaggagccagacccgggacaccacctacgtgcccaacttcctgtctgagcccggcctgcacacccgggcccgggtgtccctgaaggacctggccctgcagctgctgcacaagaagatccaggtgggccagcacggccacagctctgtggaggatgccaccacagccatggagctgtaccgcctggtggaggtgcagtgggagcagcaggaggcccggagcctgtggacctgcccagaggaccgggagccagacagcagcacagacatggagcagtacatggaggaccagagcacccagtactgggccctgaagcagaagtctgagaagcaggacagcggcctgaacagcggggcctttgtgtag

SEQ ID NO: 143916 - DNA, 1515 bp, synthetic construct
  misc_feature 1..1515: note = Description of Artificial Sequence: Synthetic coding sequence
  source 1..1515: mol_type = other DNA
atgcccaccgtggaggagctgtacagaaattatggcatcctggctgatgccacagagcaggtgggccagcacaaggatgcctaccaggtgatcctggatggagtgaagggcggcaccaaggagaagaggctggccgcccagttcatccccaagttcttcaagcacttccctgagctggccgacagcgccatcaatgcccagctggacctgtgtgaagatgaagatgtgtccatccggcggcaggccatcaaggagctgccccagtttgccactggagagaacctgccccgggtggccgacatcctgacccagctgctgcagacagatgattctgctgagttcaacctggtgaacaatgccctgctgagcatcttcaagatggatgccaagggcaccctgggcggcctcttcagccagatcctgcagggcgaggacatcgtgcgggagcgggccatcaagttcctgagcaccaagctgaagaccctgcctgatgaggtgctgaccaaggaggtggaggagctgatcctgacagagagcaagaaggtgctggaggatgtgactggagaggagtttgtgctcttcatgaagatcctgagcggcctgaagagcctgcagacagtgtctggccggcagcagctggtggagctggtggccgagcaggccgacctggagcagaccttcaaccccagcgaccctgactgtgtggaccggctgctgcagtgcacccggcaggccgtgcccctcttcagcaagaatgtgcacagcaccaggtttgtgacctacttctgtgagcaggtgctgcccaacctgggcaccctgaccacccctgtggagggcctggacatccagctggaggtgctgaagctgctggccgagatgagcagcttctgtggggacatggagaagctggagaccaacctgaggaagctgtttgacaagctgctggagtacatgcccctgcccccagaggaggccgagaatggagaaaatgctggaaatgaggagcccaagctgcagttctcctatgtggagtgcctgctgtacagcttccaccagctgggcaggaagctgcctgacttcctgacagccaagctgaatgctgagaagctgaaggacttcaagatccggctgcagtactttgcccggggcctgcaggtgtacatccggcagctgcggctggccctgcagggcaagacaggagaggccctgaagacagaggagaacaagatcaaggtggtggccctgaagatcaccaacaacatcaacgtgctgatcaaggacctcttccacatcccccccagctacaagagcacagtgaccctgtcctggaagcctgtgcagaaggtggagatcggccagaagagggccagcgaggacaccaccagcggcagcccccccaagaagagcagcgctggccccaagagagatgcccggcagatctacaaccccccatctgggaagtacagcagcaacctgggcaacttcaactatgaaagaagcctgcagggcaagtag

SEQ ID NO: 143917 - DNA, 1353 bp, synthetic construct
  misc_feature 1..1353: note = Description of Artificial Sequence: Synthetic coding sequence
  source 1..1353: mol_type = other DNA
atgcccaccgtggaggagctgtacagaaattatggcatcctggctgatgccacagagcaggtgggccagatccggcggcaggccatcaaggagctgccccagtttgccactggagagaacctgccccgggtggccgacatcctgacccagctgctgcagacagatgattctgctgagttcaacctggtgaacaatgccctgctgagcatcttcaagatggatgccaagggcaccctgggcggcctcttcagccagatcctgcagggcgaggacatcgtgcgggagcgggccatcaagttcctgagcaccaagctgaagaccctgcctgatgaggtgctgaccaaggaggtggaggagctgatcctgacagagagcaagaaggtgctggaggatgtgactggagaggagtttgtgctcttcatgaagatcctgagcggcctgaagagcctgcagacagtgtctggccggcagcagctggtggagctggtggccgagcaggccgacctggagcagaccttcaaccccagcgaccctgactgtgtggaccggctgctgcagtgcacccggcaggccgtgcccctcttcagcaagaatgtgcacagcaccaggtttgtgacctacttctgtgagcaggtgctgcccaacctgggcaccctgaccacccctgtggagggcctggacatccagctggaggtgctgaagctgctggccgagatgagcagcttctgtggggacatggagaagctggagaccaacctgaggaagctgtttgacaagctgctggagtacatgcccctgcccccagaggaggccgagaatggagaaaatgctggaaatgaggagcccaagctgcagttctcctatgtggagtgcctgctgtacagcttccaccagctgggcaggaagctgcctgacttcctgacagccaagctgaatgctgagaagctgaaggacttcaagatccggctgcagtactttgcccggggcctgcaggtgtacatccggcagctgcggctggccctgcagggcaagacaggagaggccctgaagacagaggagaacaagatcaaggtggtggccctgaagatcaccaacaacatcaacgtgctgatcaaggacctcttccacatcccccccagctacaagagcacagtgaccctgtcctggaagcctgtgcagaaggtggagatcggccagaagagggccagcgaggacaccaccagcggcagcccccccaagaagagcagcgctggccccaagagagatgcccggcagatctacaaccccccatctgggaagtacagcagcaacctgggcaacttcaactatgaaagaagcctgcagggcaagtag

SEQ ID NO: 143918 - DNA, 1575 bp, synthetic construct
  misc_feature 1..1575: note = Description of Artificial Sequence: Synthetic coding sequence
  source 1..1575: mol_type = other DNA
atgcccaccgtggaggagctgtacagaaattatggcatcctggctgatgccacagagcaggtgggccagcacaaggatgcctaccaggtgatcctggatggagtgaagggcggcaccaaggagaagaggctggccgcccagttcatccccaagttcttcaagcacttccctgagctggccgacagcgccatcaatgcccagctggacctgtgtgaagatgaagatgtgtccatccggcggcaggccatcaaggagctgccccagtttgccactggagagaacctgccccgggtggccgacatcctgacccagctgctgcagacagatgattctgctgagttcaacctggtgaacaatgccctgctgagcatcttcaagatggatgccaagggcaccctgggcggcctcttcagccagatcctgcagggcgaggacatcgtgcgggagcgggccatcaagttcctgagcaccaagctgaagaccctgcctgatgaggtgctgaccaaggaggtggaggagctgatcctgacagagagcaagaaggtgctggaggatgtgactggagaggagtttgtgctcttcatgaagatcctgagcggcctgaagagcctgcagacagtgtctggccggcagcagctggtggagctggtggccgagcaggccgacctggagcagaccttcaaccccagcgaccctgactgtgtggaccggctgctgcagtgcacccggcaggccgtgcccctcttcagcaagaatgtgcacagcaccaggtttgtgacctacttctgtgagcaggtgctgcccaacctgggcaccctgaccacccctgtggagggcctggacatccagctggaggtgctgaagctgctggccgagatgagcagcttctgtggggacatggagaagctggagaccaacctgaggaagctgtttgacaagctgctggagtacatgcccctgcccccagaggaggccgagaatggagaaaatgctggaaatgaggagcccaagctgcagttctcctatgtggagtgcctgctgtacagcttccaccagctgggcaggaagctgcctgacttcctgacagccaagctgaatgctgagaagctgaaggacttcaagatccggctgcagtactttgcccggggcctgcaggtgtacatccggcagctgcggctggccctgcagggcaagacaggagaggccctgaagacagaggagaacaagatcaaggtggtggccctgaagatcaccaacaacatcaacgtgctgatcaaggacctcttccacatcccccccagctacaagagcacagtgaccctgtcctggaagcctgtgcagaaggtggagatcggccagaagagggccagcgaggacaccaccagcggcagcccccccaagaagagcagcgctggccccaagagagatgcccggcagatctacaaccccccatctgggaagtacagcagcaacctgggcaacttcaactatgagcagagaggagccttccggggcagccggggcggccggggctggggcacccggggcaacagaagccggggccgcctgtactag

SEQ ID NO: 143919 - DNA, 1533 bp, synthetic construct
  misc_feature 1..1533: note = Description of Artificial Sequence: Synthetic coding sequence
  source 1..1533: mol_type = other DNA
atgcccaccgtggaggagctgtacagaaattatggcatcctggctgatgccacagagcaggtgggccagcacaaggatgcctaccaggtgatcctggatggagtgaagggcggcaccaaggagaagaggctggccgcccagttcatccccaagttcttcaagcacttccctgagctggccgacagcgccatcaatgcccagctggacctgtgtgaagatgaagatgtgtccatccggcggcaggccatcaaggagctgccccagtttgccactggagagaacctgccccgggtggccgacatcctgacccagctgctgcagacagatgattctgctgagttcaacctggtgaacaatgccctgctgagcatcttcaagatggatgccaagggcaccctgggcggcctcttcagccagatcctgcagggcgaggacatcgtgcgggagcgggccatcaagttcctgagcaccaagctgaagaccctgcctgatgaggtgctgaccaaggaggtggaggagctgatcctgacagagagcaagaaggtgctggaggatgtgactggagaggagtttgtgctcttcatgaagatcctgagcggcctgaagagcctgcagacagtgtctggccggcagcagctggtggagctggtggccgagcaggccgacctggagcagaccttcaaccccagcgaccctgactgtgtggaccggctgctgcagtgcacccggcaggccgtgcccctcttcagcaagaatgtgcacagcaccaggtttgtgacctacttctgtgagcaggtgctgcccaacctgggcaccctgaccacccctgtggagggcctggacatccagctggaggtgctgaagctgctggccgagatgagcagcttctgtggggacatggagaagctggagaccaacctgaggaagctgtttgacaagctgctggagtacatgcccctgcccccagaggaggccgagaatggagaaaatgctggaaatgaggagcccaagctgcagttctcctatgtggagtgcctgctgtacagcttccaccagctgggcaggaagctgcctgacttcctgacagccaagctgaatgctgagaagctgaaggacttcaagatccggctgcagtactttgcccggggcctgcaggtgtacatccggcagctgcggctggccctgcagggcaagacaggagaggccctgaagacagaggagaacaagatcaaggtggtggccctgaagatcaccaacaacatcaacgtgctgatcaaggacctcttccacatcccccccagctacaagagcacagtgaccctgtcctggaagcctgtgcagaaggtggagatcggccagaagagggccagcgaggacaccaccagcggcagcccccccaagaagagcagcgctggccccaagagagatgcccggcagatctacaaccccccatctgggaagtacagcagcaacctgggcaacttcaactatggagagcgcttccggctgggcaccaggaacatgagggactag

SEQ ID NO: 143920 - DNA, 1089 bp, synthetic construct
  misc_feature 1..1089: note = Description of Artificial Sequence: Synthetic coding sequence
  source 1..1089: mol_type = other DNA
atgcaggccgagcggggggcccggggcggccggggcagaagacctggccggggccggcctggaggagacagacacagcgagaggcctggagctgctgctgctgtggcccggggcggcggcggcggcggcggcggagatggcggcggccggcggggccggggccggggccggggcttccggggggcccggggcggccggggcggcggcggggccccccggggcagccggcgggagcccggcggctggggcgctggggccagcgcccctgtggaggatgacagtgatgctgagacctatggagaggagaatgatgagcagggcaactacagcaagaggaagatcgtgagcaactgggaccgctaccaggacatcgagaaggaggtgaacaatgaaagtggagagagccagaggggcacagacttctctgtgctgctgagcagcgctggggacagcttcagccagttccgctttgctgaggagaaggagtgggacagcgaggccagctgccccaagcagaacagcgccttctacgtggacagcgagctgctggtgcgggccctgcaggagctgcccctgtgcctgcggctgaatgtggccgctgagctggtgcagggcaccgtgcccctggaggtgccccaggtgaagcccaagaggacagatgatggcaagggcctgggcatgcagctgaagggccccctgggccctgggggccggggccccatctttgagctgaagtctgtggccgccggctgccctgtgctgctgggcaaggacaaccccagccctggccccagccgggacagccagaagcccaccagccccctgcagagcgctggggaccacctggaggaggagctggacctgctgctgaacctggatgcccccatcaaggagggggacaacatcctgcctgaccagaccagccaggacctgaagagcaaagaagatggagaggtggtgcaggaggaggaggtgtgtgccaagcccagcgtgacagaggagaagaacatggagcctgagcagcccagcaccagcaagaatgtgacagaggaggagctggaggactggctggacagcatgatctcctag

SEQ ID NO: 143921 - DNA, 4125 bp, synthetic construct
  misc_feature 1..4125: note = Description of Artificial Sequence: Synthetic coding sequence
  source 1..4125: mol_type = other DNA
atgagcagcagcttcttcaaccccagctttgccttcagcagccactttgatcctgatggagcccccctgtctgagctgtcctggcccagcagcctggccgtggtggccgtgtccttcagcggcctgtttgctgtgattgtgctgatgctggcctgcctgtgctgcaagaagggcggcatcggcttcaaggagtttgaaaatgcagaaggagatgaatatgctgctgacctggcccagggcagccctgccacagctgcccagaatggaccagatgtgtatgtgctgcccctgacagaggtgtccctgcccatggccaagcagcccggccgctctgtgcagctgctgaagagcacagatgtgggccgccacagcctgctgtacctgaaggagatcggccggggctggtttgggaaggtgttcctgggggaggtgaacagcggcatcagcagcgcccaggtggtggtgaaggagctgcaggccagcgcctctgtgcaggagcagatgcagttcctggaggaggtgcagccctaccgggccctgaagcacagcaacctgctgcagtgcctggcccagtgtgccgaggtgaccccctacctgctggtgatggagttctgccccctgggggacctgaagggctacctgcggagctgccgggtggccgagagcatggccccagaccccaggaccctgcagaggatggcctgtgaggtggcctgtggggtgctgcacctgcacaggaacaactttgtgcacagcgacctggccctgaggaactgcctgctgacagctgacctgactgtgaagattggagactatggcctggcccactgcaagtaccgggaggactactttgtgacagctgaccagctgtgggtgcccctgcgctggatcgcccctgagctggtggatgaggtgcacagcaacctgctggtggtggaccagaccaagtctggaaatgtgtggagcctgggcgtgaccatctgggagctgtttgagctgggcacccagccctacccccagcacagcgaccagcaggtgctggcctacacagtgcgggagcagcagctgaagctgcccaagccccagctgcagctgaccctgagtgaccgctggtatgaggtgatgcagttctgctggctgcagcctgagcagaggcccacagctgaggaggtgcacctgctgctgagctacctgtgtgccaagggggccacagaggccgaggaggagtttgagcggcgctggaggagcctgcggcctgggggcggcggcgtgggccctggccctggagctgctggccccatgctgggcggcgtggtggagctggccgccgccagcagcttccccctgctggagcagtttgctggagatggcttccacgcagatggagatgatgtgctgactgtgacagagaccagccggggcctgaactttgagtacaagtgggaggccggcagaggagctgaggccttccctgccaccctgagccctggccgcacagcccggctgcaggagctgtgtgccccagatggagcccctcctggggtggtgcctgtgctgagcgcccacagccccagcctgggcagcgagtacttcatccggctggaggaggccgccccagctgctggccatgaccctgactgtgccggctgtgcccccagccccccagccacagctgaccaggatgatgacagtgatggcagcacagctgccagcctggccatggagcccctgctgggccacggcccccctgtggatgtgccctggggccgcggggaccactacccccggcgcagcctggcccgggaccccctgtgccccagccgcagccccagccccagcgctggccccctgagcctggccgagggcggcgcagaagatgctgactggggcgtggccgccttctgcccagccttctttgaggaccccctgggcaccagccccctgggcagcagcggggccccacccctgcccctgactggagaagatgagctggaggaggtgggcgcccggcgggccgcccagaggggccactggaggagcaatgtgtctgccaacaacaacagcggcagccgctgcccagagagctgggaccctgtgtctgctgggggccatgctgagggctgccccagccccaagcagaccccccgggccagccctgagcccggctacccaggagagcccctgctgggcctgcaggccgccagcgcccaggagcccggctgctgccccggcctgccccacctgtgcagcgcccagggcctggccccagccccctgcctggtgacccccagctggacagaaacagccagcagtggaggagaccacccccaggccgagcccaagctggccacagaggccgagggcaccaccggcccccggctgcccctgcccagcgtgcccagccccagccaggagggcgcccccctgcccagcgaggaggccagcgccccagatgccccagatgccctgcctgacagccccaccccagccactggaggagaggtgtctgccatcaagctggccagcgccctgaatggcagcagcagcagccctgaggtggaggcccccagcagtgaagatgaggacacagctgaggccaccagcggcatcttcacagacaccagcagtgatggcctgcaggcccggcggccagatgtggtgcctgccttccgcagcctgcagaagcaggtgggcaccccagacagcctggacagcctggacatccccagcagcgccagtgatggcggctatgaggtgttcagccccagcgccaccggccccagcggcggccagccccgggccctggacagcggctatgacacagagaactatgagagccctgagtttgtgctgaaggaggcccaggagggctgtgagccccaggcctttgctgagctggccagcgagggggagggccctggccctgagacccggctgagcaccagcctgagcggcctgaatgagaagaacccctacagagattctgcctacttcagtgacctggaggccgaggccgaggccaccagcggccctgagaagaagtgtggcggggaccgggcccctggccctgagctgggcctgcccagcacaggccagcccagcgagcaggtgtgcctgcggcctggggtgtctggagaggcccagggcagcggccctggagaggtgctgccccccctgctgcagctggagggcagcagccctgagcccagcacctgccccagcggcctggtgcctgagcccccagagccccagggccctgccaaggtgcggcccggccccagccccagctgcagccagttcttcctgctgacccctgtgcccctgcggtctgagggcaacagcagcgagttccagggccccccaggcctgctgagcggccctgccccccagaagaggatgggcggccctggcaccccccgggcccccctgcggctggccctgcccggcctgcctgctgccctggagggccggcctgaggaggaggaggaggacagcgaggacagtgatgaaagtgatgaggagctgcgctgctacagcgtgcaggagcccagtgaagattctgaggaggaggccccagctgtgcctgtggtggtggccgagagccagagcgccaggaacctgcggagcctgctgaagatgcccagcctgctgtctgagaccttctgtgaggacctggagaggaagaagaaggctgtgtccttctttgatgatgtgacagtgtacctgtttgaccaggagagccccacccgggagctgggggagcccttccctggggccaaggagagcccccccaccttcctgcggggcagccctggcagccccagcgcccccaaccggccccagcaggctgatggcagccccaacggcagcacagctgaggagggcggcggctttgcctgggatgatgacttccccctgatgacagccaaggccgcctttgccatggccctggaccctgctgccccagccccagctgcccccacccccaccccagcccccttcagccgcttcaccgtgtccccagcccccaccagccgcttcagcatcacccacgtgtctgacagtgatgctgagagcaagaggggccctgaggccggggccggcggggagagcaaggaggcctag

SEQ ID NO: 143922 - DNA, 2640 bp, synthetic construct
  misc_feature 1..2640: note = Description of Artificial Sequence: Synthetic coding sequence
  source 1..2640: mol_type = other DNA
atgagcagcagcttcttcaaccccagctttgccttcagcagccactttgatcctgatggagcccccctgtctgagctgtcctggcccagcagcctggccgtggtggccgtgtccttcagcggcctgtttgctgtgattgtgctgatgctggcctgcctgtgctgcaagaagggcggcatcggcttcaaggagtttgaaaatgcagaaggagatgaatatgctgctgacctggcccagggcagccctgccacagctgcccagaatggaccagatgtgtatgtgctgcccctgacagaggtgtccctgcccatggccaagcagcccggccgctctgtgcagctgctgaagagcacagatgtgggccgccacagcctgctgtacctgaaggagatcggccggggctggtttgggaaggtgttcctgggggaggtgaacagcggcatcagcagcgcccaggtggtggtgaaggagctgcaggccagcgcctctgtgcaggagcagatgcagttcctggaggaggtgcagccctaccgggccctgaagcacagcaacctgctgcagtgcctggcccagtgtgccgaggtgaccccctacctgctggtgatggagttctgccccctgggggacctgaagggctacctgcggagctgccgggtggccgagagcatggccccagaccccaggaccctgcagaggatggcctgtgaggtggcctgtggggtgctgcacctgcacaggaacaactttgtgcacagcgacctggccctgaggaactgcctgctgacagctgacctgactgtgaagattggagactatggcctggcccactgcaagtaccgggaggactactttgtgacagctgaccagctgtgggtgcccctgcgctggatcgcccctgagctggtggatgaggtgcacagcaacctgctggtggtggaccagaccaagtctggaaatgtgtggagcctgggcgtgaccatctgggagctgtttgagctgggcacccagccctacccccagcacagcgaccagcaggtgctggcctacacagtgcgggagcagcagctgaagctgcccaagccccagctgcagctgaccctgagtgaccgctggtatgaggtgatgcagttctgctggctgcagcctgagcagaggcccacagctgaggaggtgcacctgctgctgagctacctgtgtgccaagggggccacagaggccgaggaggagtttgagcggcgctggaggagcctgcggcctgggggcggcggcgtgggccctggccctggagctgctggccccatgctgggcggcgtggtggagctggccgccgccagcagcttccccctgctggagcagtttgctggagatggcttccacgcagatggagatgatgtgctgacagagctgtgtgccccagatggagcccctcctggggtggtgcctgtgctgagcgcccacagccccagcctgggcagcgagtacttcatccggctggaggaggccgccccagctgctggccatgaccctgactgtgccggctgtgcccccagccccccagccacagctgaccaggatgatgacagtgatggcagcacagctgccagcctggccatggagcccctgctgggccacggcccccctgtggatgtgccctggggccgcggggaccactacccccggcgcagcctggcccgggaccccctgtgccccagccgcagccccagccccagcgctggccccctgagcctggccgagggcggcgcagaagatgctgactggggcgtggccgccttctgcccagccttctttgaggaccccctgggcaccagccccctgggcagcagcggggccccacccctgcccctgactggagaagatgagctggaggaggtgggcgcccggcgggccgcccagaggggccactggaggagcaatgtgtctgccaacaacaacagcggcagccgctgcccagagagctgggaccctgtgtctgctgggggccatgctgagggctgccccagccccaagcagaccccccgggccagccctgagcccggctacccaggagagcccctgctgggcctgcaggccgccagcgcccaggagcccggctgctgccccggcctgccccacctgtgcagcgcccagggcctggccccagccccctgcctggtgacccccagctggacagaaacagccagcagtggaggagaccacccccaggccgagcccaagctggccacagaggccgagggcaccaccggcccccggctgcccctgcccagcgtgcccagccccagccaggagggcgcccccctgcccagcgaggaggccagcgccccagatgccccagatgccctgcctgacagccccaccccagccactggaggagaggtgtctgccatcaagctggccagcgccctgaatggcagcagcagcagccctgaggtggaggcccccagcagtgaagatgaggacacagctgaggccaccagcggcatcttcacagacaccagcagtgatggcctgcaggcccggcggccagatgtggtgcctgccttccgcagcctgcagaagcagtggccccagcgggaggagagcctgccccggctgtgcctgctgctgcggccccggggctag

SEQ ID NO: 143923 - DNA, 3984 bp, synthetic construct
  misc_feature 1..3984: note = Description of Artificial Sequence: Synthetic coding sequence
  source 1..3984: mol_type = other DNA
tgacaccaggtgaaggtgcagggctgctggggccgctggcgctggcaggagtttgaaaatgcagaaggagatgaatatgctgctgacctggcccagggcagccctgccacagctgcccagaatggaccagatgtgtatgtgctgcccctgacagaggtgtccctgcccatggccaagcagcccggccgctctgtgcagctgctgaagagcacagatgtgggccgccacagcctgctgtacctgaaggagatcggccggggctggtttgggaaggtgttcctgggggaggtgaacagcggcatcagcagcgcccaggtggtggtgaaggagctgcaggccagcgcctctgtgcaggagcagatgcagttcctggaggaggtgcagccctaccgggccctgaagcacagcaacctgctgcagtgcctggcccagtgtgccgaggtgaccccctacctgctggtgatggagttctgccccctgggggacctgaagggctacctgcggagctgccgggtggccgagagcatggccccagaccccaggaccctgcagaggatggcctgtgaggtggcctgtggggtgctgcacctgcacaggaacaactttgtgcacagcgacctggccctgaggaactgcctgctgacagctgacctgactgtgaagatcggggactatggcctggcccactgcaagtaccgggaggactactttgtgacagctgaccagctgtgggtgcccctgcgctggatcgcccctgagctggtggatgaggtgcacagcaacctgctggtggtggaccagaccaagtctggaaatgtgtggagcctgggcgtgaccatctgggagctgtttgagctgggcacccagccctacccccagcacagcgaccagcaggtgctggcctacacagtgcgggagcagcagctgaagctgcccaagccccagctgcagctgaccctgagtgaccgctggtatgaggtgatgcagttctgctggctgcagcctgagcagaggcccacagctgaggaggtgcacctgctgctgagctacctgtgtgccaagggggccacagaagctgaggaggagtttgaaagacgctggaggagcctgcggcctgggggcggcggcgtgggccctggccctggagctgctggccccatgctgggcggcgtggtggagctggccgccgccagcagcttccccctgctggagcagtttgctggagatggcttccacgcagatggagatgatgtgctgactgtgacagagaccagccggggcctgaactttgagtacaagtgggaggccggccgcggggctgaggccttccctgccaccctgagccctggccgcacagcccggctgcaggagctgtgtgccccagatggagcccctcctggggtggtgcctgtgctgagcgcccacagccccagcctgggcagcgagtacttcatccggctggaggaggccgccccagctgctggccatgaccctgactgtgccggctgtgcccccagccccccagccacagctgaccaggatgatgacagtgatggcagcacagctgccagcctggccatggagcccctgctgggccacggcccccctgtggatgtgccctggggccgcggggaccactaccccaggaggagcctggcccgggaccccctgtgccccagccgcagccccagccccagcgctggccccctgagcctggccgagggcggcgcagaagatgctgactggggcgtggccgccttctgcccagccttctttgaggaccccctgggcaccagccccctgggcagcagcggggccccacccctgcccctgaccggggaggatgagctggaggaggtgggcgccaggagagctgcccagaggggccactggaggagcaatgtgtctgccaacaacaacagcggcagccgctgcccagagagctgggaccctgtgtctgctgggggccacgccgagggctgccccagccccaagcagaccccccgggccagccctgagcccggctacccaggagagcccctgctgggcctgcaggccgccagcgcccaggagcccggctgctgccccggcctgccccacctgtgcagcgcccagggcctggccccagccccctgcctggtgacccccagctggacagaaacagccagcagcggcggggaccacccccaggccgagcccaagctggccacagaagctgagggcaccaccggcccccggctgcccctgcccagcgtgcccagccccagccaggagggcgcccccctgcccagcgaggaggccagcgccccagatgccccagatgccctgcctgacagccccaccccagccaccggcggggaggtgtctgccatcaagctggccagcgccctgaatggcagcagcagcagccctgaggtggaggcccccagcagtgaagatgaggacacagctgaggccaccagcggcatcttcacagacaccagcagtgatggcctgcaggcccggcggccagatgtggtgcctgccttccgcagcctgcagaagcaggtgggcaccccagacagcctggacagcctggacatccccagcagcgccagtgatggcggctatgaggtgttcagccccagcgccaccggccccagcggcggccagccccgggccctggacagcggctatgacacagaaaattatgagagccctgagtttgtgctgaaggaggcccaggagggctgtgagccccaggcctttgctgagctggccagcgagggggagggccctggccctgagacccggctgagcaccagcctgagcggcctgaatgagaagaacccctacagagacagcgcctacttcagtgacctggaggccgaggccgaggccaccagcggccctgagaagaagtgtggcggggaccgggcccctggccctgagctgggcctgcccagcacaggccagcccagcgagcaggtgtgcctgcggcctggggtgtctggagaggcccagggcagcggccctggagaggtgctgccccccctgctgcagctggagggcagcagccctgagcccagcacctgccccagcggcctggtgcctgagcccccagagccccagggccctgccaaggtgcggcccggccccagccccagctgcagccagttcttcctgctgacccctgtgcccctgcggtctgagggcaacagcagcgagttccagggccccccaggcctgctgagcggccctgccccccagaagaggatgggcggccctggcaccccccgggcccccctgcggctggccctgcccggcctgcctgctgccctggagggccggcctgaggaggaggaggaggacagtgaagattctgatgaaagtgatgaggagctgcgctgctacagcgtgcaggagcccagcgaggacagcgaggaggaggccccagctgtgcctgtggtggtggccgagagccagagcgccaggaacctgcggagcctgctgaagatgcccagcctgctgtctgagaccttctgtgaggacctggagaggaagaagaaggctgtgtccttctttgatgatgtgacagtgtacctgtttgaccaggagagccccacccgggagctgggggagcccttccctggggccaaggagagcccccccaccttcctgcggggcagccctggcagccccagcgcccccaaccggccccagcaggctgatggcagccccaacggcagcacagctgaggagggcggcggctttgcctgggatgatgacttccccctgatgacagccaaggccgcctttgccatggccctggaccctgctgccccagccccagctgcccccacccccaccccagcccccttcagccgcttcaccgtgtccccagcccccaccagccgcttcagcatcacccacgtgtctgacagtgatgctgagagcaagaggggccctgaggccggggccggcggggagagcaaggaggcctag

SEQ ID NO: 143924 - DNA, 417 bp, synthetic construct
  misc_feature 1..417: note = Description of Artificial Sequence: Synthetic coding sequence
  source 1..417: mol_type = other DNA
atggaggaggaggccgagacagaggagcagcagcgcttctcctaccagcagaggctgaaggctgctgtgcactacacagtgggctgcctgtgtgaggaggtggccctggacaaggagatgcagttcagcaagcagaccatcgccgccatcagcgagctgaccttccggcagtgtgaaaattttgccaaggacctggagatgtttgcccggcatgccaagaggaccaccatcaacacagaagatgtgaagctgctggcccggcgcagcaacagcctgctgaagtacatcacagacaagtctgaggagatcgcccagatcaacctggagaggaaggcccagaagaagaagaagtcagaagatggcagcaagaacagccggcagcctgctgaggccggcgtggtggagagtgaaaattag

SEQ ID NO: 143925 - DNA, 495 bp, synthetic construct
  misc_feature 1..495: note = Description of Artificial Sequence: Synthetic coding sequence
  source 1..495: mol_type = other DNA
atggaggaggaggccgagacagaggagcagcagcgcttctcctaccagcagaggctgaaggctgctgtgcactacacagtgggctgcctgtgtgaggaggtggccctggacaaggagatgcagttcagcaagcagaccatcgccgccatcagcgagctgaccttccggcagtgtgaaaattttgccaaggacctggagatgtttgcccggcatgccaagaggaccaccatcaacacagaagatgtgaagctgctggcccggcgcagcaacagcctgcacatgcaggaggccgccggcatcaggaagagcagcctgctgaccttcctggcctggtggtttgagtggaccagccaggccagcgctggccccctgattggagaggaggcccgggaggtggcccggcggcaggagggcgccccaccccagcagagcgcccggcgggacaggatgccctgcaggaacttcttctggaagaccttcagcagctgcaagtag

SEQ ID NO: 143926 - DNA, 234 bp, synthetic construct
  misc_feature 1..234: note = Description of Artificial Sequence: Synthetic coding sequence
  source 1..234: mol_type = other DNA
atggaggaggaggccgagacagaggagcagcagcgcttctcctaccagcagaggctgaaggctgctgtgcactacacagtgggctgcctgtgtgaggaggtggccctggacaaggagatgcagttcagcaagcagaccatcgccgccatcagcgagctgaccttccggcagtgtgaaaattttgccaaggacctggagatgtttgccagcatctgcaggaagaggcaggagtag

SEQ ID NO: 143927 - DNA, 921 bp, synthetic construct
  misc_feature 1..921: note = Description of Artificial Sequence: Synthetic coding sequence
  source 1..921: mol_type = other DNA
atgagcaatgtgaacctgtctgtgtctgacttctggagggtgatgatgagggtgtgctggctggtgcggcaggacagccgccaccagaggatccggctgccccacctggaggccgtggtgattggccggggccctgagaccaagatcacagacaagaagtgcagccggcagcaggtgcagctgaaggccgagtgcaacaagggctacgtgaaggtgaagcaggtgggcgtgaaccccaccagcattgacagcgtggtgattggcaaggaccaggaggtgaagctgcagcccggccaggtgctgcacatggtgaatgagctgtacccctacatcgtggagtttgaggaggaggccaagaaccctggcctggagacccacaggaagaggaagaggagcggcaacagcgacagcattgaaagagatgctgcccaggaggccgaggccggcaccggcctggagcccggcagcaacagcggccagtgcagcgtgcccctgaagaagggcaaggatgcccccatcaagaaggagagcctgggccactggagccagggcctgaagatctccatgcaggaccccaagatgcaggtgtacaaggatgagcaggtggtggtgatcaaggacaagtaccccaaggcccgctaccactggctggtgctgccctggaccagcatcagcagcctgaaggctgtggcccgggagcacctggagctgctgaagcacatgcacacagtgggggagaaggtgattgtggactttgctggcagcagcaagctgcgcttccggctgggctaccacgccatccccagcatgagccacgtgcacctgcacgtgatcagccaggactttgacagcccctgcctgaagaacaagaagcactggaacagcttcaacacagagtacttcctggagagccaggagtag

SEQ ID NO: 143928 - DNA, 1014 bp, synthetic construct
  misc_feature 1..1014: note = Description of Artificial Sequence: Synthetic coding sequence
  source 1..1014: mol_type = other DNA
atgagcaatgtgaacctgtctgtgtctgacttctggagggtgatgatgagggtgtgctggctggtgcggcaggacagccgccaccagaggatccggctgccccacctggaggccgtggtgattggccggggccctgagaccaagatcacagacaagaagtgcagccggcagcaggtgcagctgaaggccgagtgcaacaagggctacgtgaaggtgaagcaggtgggcgtgaaccccaccagcattgacagcgtggtgattggcaaggaccaggaggtgaagctgcagcccggccaggtgctgcacatggtgaatgagctgtacccctacatcgtggagtttgaggaggaggccaagaaccctggcctggagacccacaggaagaggaagaggagcggcaacagcgacagcattgaaagagatgctgcccaggaggccgaggccggcaccggcctggagcccggcagcaacagcggccagtgcagcgtgcccctgaagaagggcaaggatgcccccatcaagaagaaggtgtacaaggatgagcaggtggtggtgatcaaggacaagtaccccaaggcccgctaccactggctggtgctgccctggaccagcatcagcagcctgaaggctgtggcccgggagcacctggagctgctgaagcacatgcacacagtgggggagaaggtgattgtggactttgctggcagcagcaagctgcgcttccggctgggctaccacgccatccccagcatgagccacgtgcacctgcacgtgatcagccaggactttgacagcccctgcctgaagaacaagaagcactggaacagcttcaacacagagtacttcctggagagccaggccgtgattgagatggtgcaggaggccggccgggtgacagtgagagatggcatgcctgagctgctgaagctgcccctgcgctgccacgagtgccagcagctgctgcccagcatcccccagctgaaggagcacctgaggaagcactggacccagtag

SEQ ID NO: 143929 - DNA, 1029 bp, synthetic construct
  misc_feature 1..1029: note = Description of Artificial Sequence: Synthetic coding sequence
  source 1..1029: mol_type = other DNA
atgatgagggtgtgctggctggtgcggcaggacagccgccaccagaggatccggctgccccacctggaggccgtggtgattggccggggccctgagaccaagatcacagacaagaagtgcagccggcagcaggtgcagctgaaggccgagtgcaacaagggctacgtgaaggtgaagcaggtgggcgtgaaccccaccagcattgacagcgtggtgattggcaaggaccaggaggtgaagctgcagcccggccaggtgctgcacatggtgaatgagctgtacccctacatcgtggagtttgaggaggaggccaagaaccctggcctggagacccacaggaagaggaagaggagcggcaacagcgacagcattgaaagagatgctgcccaggaggccgaggccggcaccggcctggagcccggcagcaacagcggccagtgcagcgtgcccctgaagaagggcaaggatgcccccatcaagaaggagagcctgggccactggagccagggcctgaagatctccatgcaggaccccaagatgcaggtgtacaaggatgagcaggtggtggtgatcaaggacaagtaccccaaggcccgctaccactggctggtgctgccctggaccagcatcagcagcctgaaggctgtggcccgggagcacctggagctgctgaagcacatgcacacagtgggggagaaggtgattgtggactttgctggcagcagcaagctgcgcttccggctgggctaccacgccatccccagcatgagccacgtgcacctgcacgtgatcagccaggactttgacagcccctgcctgaagaacaagaagcactggaacagcttcaacacagagtacttcctggagagccaggccgtcatcgagatggtgcaggaggccggccgggtgacagtgagagatggcatgcctgagctgctgaagctgcccctgcgctgccacgagtgccagcagctgctgcccagcatcccccagctgaaggagcacctgaggaagcactggacccagtag

SEQ ID NO: 143930 - DNA, 1071 bp, synthetic construct
  misc_feature 1..1071: note = Description of Artificial Sequence: Synthetic coding sequence
  source 1..1071: mol_type = other DNA
atgagcaatgtgaacctgtctgtgtctgacttctggagggtgatgatgagggtgtgctggctggtgcggcaggacagccgccaccagaggatccggctgccccacctggaggccgtggtgattggccggggccctgagaccaagatcacagacaagaagtgcagccggcagcaggtgcagctgaaggccgagtgcaacaagggctacgtgaaggtgaagcaggtgggcgtgaaccccaccagcattgacagcgtggtgattggcaaggaccaggaggtgaagctgcagcccggccaggtgctgcacatggtgaatgagctgtacccctacatcgtggagtttgaggaggaggccaagaaccctggcctggagacccacaggaagaggaagaggagcggcaacagcgacagcattgaaagagatgctgcccaggaggccgaggccggcaccggcctggagcccggcagcaacagcggccagtgcagcgtgcccctgaagaagggcaaggatgcccccatcaagaaggagagcctgggccactggagccagggcctgaagatctccatgcaggaccccaagatgcaggtgtacaaggatgagcaggtggtggtgatcaaggacaagtaccccaaggcccgctaccactggctggtgctgccctggaccagcatcagcagcctgaaggctgtggcccgggagcacctggagctgctgaagcacatgcacacagtgggggagaaggtgattgtggactttgctggcagcagcaagctgcgcttccggctgggctaccacgccatccccagcatgagccacgtgcacctgcacgtgatcagccaggactttgacagcccctgcctgaagaacaagaagcactggaacagcttcaacacagagtacttcctggagagccaggccgtcatcgagatggtgcaggaggccggccgggtgacagtgagagatggcatgcctgagctgctgaagctgcccctgcgctgccacgagtgccagcagctgctgcccagcatcccccagctgaaggagcacctgaggaagcactggacccagtag

SEQ ID NO: 143931 - DNA, 921 bp, synthetic construct; identical to SEQ ID NO: 143927
  misc_feature 1..921: note = Description of Artificial Sequence: Synthetic coding sequence
  source 1..921: mol_type = other DNA

SEQ ID NO: 143932 - DNA, 855 bp, synthetic construct
  misc_feature 1..855: note = Description of Artificial Sequence: Synthetic coding sequence
  source 1..855: mol_type = other DNA
atgagcaatgtgaacctgtctgtgtctgacttctggagggtgatgatgagggtgtgctggctggtgcggcaggacagccgccaccagaggatccggctgccccacctggaggccgtggtgattggccggggccctgagaccaagatcacagacaagaagtgcagccggcagcaggtgcagctgaaggccgagtgcaacaagggctacgtgaaggtgaagcaggtgggcgtgaaccccaccagcattgacagcgtggtgattggcaaggaccaggaggtgaagctgcagcccggccaggtgctgcacatggagagcctgggccactggagccagggcctgaagatctccatgcaggaccccaagatgcaggtgtacaaggatgagcaggtggtggtgatcaaggacaagtaccccaaggcccgctaccactggctggtgctgccctggaccagcatcagcagcctgaaggctgtggcccgggagcacctggagctgctgaagcacatgcacacagtgggggagaaggtgattgtggactttgctggcagcagcaagctgcgcttccggctgggctaccacgccatccccagcatgagccacgtgcacctgcacgtgatcagccaggactttgacagcccctgcctgaagaacaagaagcactggaacagcttcaacacagagtacttcctggagagccaggccgtcatcgagatggtgcaggaggccggccgggtgacagtgagagatggcatgcctgagctgctgaagctgcccctgcgctgccacgagtgccagcagctgctgcccagcatcccccagctgaaggagcacctgaggaagcactggacccagtag

SEQ ID NO: 143933 - DNA, 579 bp, synthetic construct
  misc_feature 1..579: note = Description of Artificial Sequence: Synthetic coding sequence
  source 1..579: mol_type = other DNA
atgatgagggtgtgctggctggtgcggcaggacagccgccaccagaggatccggctgccccacctggaggccgtggtgattggccggggccctgagaccaagatcacagacaagaagtgcagccggcagcaggtgcagctgaaggccgagtgcaacaagggctacgtgaaggtgaagcaggtgggcgtgaaccccaccagcattgacagcgtggtgattggcaaggaccaggaggtgaagctgcagcccggccaggtgctgcacatggtgaatgagctgtacccctacatcgtggagtttgaggaggaggccaagaaccctggcctggagacccacaggaagaggaagaggagcggcaacagcgacagcattgaaagagatgctgcccaggaggccgaggccggcaccggcctggagcccggcagcaacagcggccagtgcagcgtgcccctgaagaagggcaaggatgcccccatcaagaaggagagcctgggccactggagccagggcctgaagatctccatgcaggaccccaagatgcagccctgcaccagcagctgtgaccagcccggcttctag

SEQ ID NO: 143934 - DNA, 1029 bp, synthetic construct; identical to SEQ ID NO: 143929
  misc_feature 1..1029: note = Description of Artificial Sequence: Synthetic coding sequence
  source 1..1029: mol_type = other DNA

SEQ ID NO: 143935 - DNA, 909 bp, synthetic construct
  misc_feature 1..909: note = Description of Artificial Sequence: Synthetic coding sequence
  source 1..909: mol_type = other DNA
atgagcaatgtgaacctgtctgtgtctgacttctggagggtgatgatgagggtgtgctggctggtgcggcaggacagccgccaccagaggatccggctgccccacctggaggccgtggtgattggccggggccctgagaccaagatcacagacaagaagtgcagccggcagcaggagtttgaggaggaggccaagaaccctggcctggagacccacaggaagaggaagaggagcggcaacagcgacagcattgaaagagatgctgcccaggaggccgaggccggcaccggcctggagcccggcagcaacagcggccagtgcagcgtgcccctgaagaagggcaaggatgcccccatcaagaaggagagcctgggccactggagccagggcctgaagatctccatgcaggaccccaagatgcaggtgtacaaggatgagcaggtggtggtgatcaaggacaagtaccccaaggcccgctaccactggctggtgctgccctggaccagcatcagcagcctgaaggctgtggcccgggagcacctggagctgctgaagcacatgcacacagtgggggagaaggtgattgtggactttgctggcagcagcaagctgcgcttccggctgggctaccacgccatccccagcatgagccacgtgcacctgcacgtgatcagccaggactttgacagcccctgcctgaagaacaagaagcactggaacagcttcaacacagagtacttcctggagagccaggccgtcatcgagatggtgcaggaggccggccgggtgacagtgagagatggcatgcctgagctgctgaagctgcccctgcgctgccacgagtgccagcagctgctgcccagcatcccccagctgaaggagcacctgaggaagcactggacccagtag

SEQ ID NO: 143936 - DNA, 1029 bp, synthetic construct; identical to SEQ ID NO: 143929
  misc_feature 1..1029: note = Description of Artificial Sequence: Synthetic coding sequence
  source 1..1029: mol_type = other DNA

SEQ ID NO: 143937 - DNA, 687 bp, synthetic construct
  misc_feature 1..687: note = Description of Artificial Sequence: Synthetic coding sequence
  source 1..687: mol_type = other DNA
atgtacatcatcgcccagtgtgtgggcgccatcgtggccacagccatcctgagcggcatcaccagcagcctgactggaaacagcctgggcagaaatgacctggctgatggagtgaacagcggccagggcctgggcatcgagatcatcggcaccctgcagctggtgctgtgtgtgctggccaccacagacagaagaagaagagacctgggcggcagcgcccccctggccatcggcctgtctgtggccctgggccacctgctggccatcgactacacaggctgcggcatcaacccagcccggagctttggcagcgctgtgatcacccacaacttcagcaaccactggatcttctgggtgggccccttcatcggcggggccctggccgtgctgatctatgacttcatcctggcccccaggagcagtgacctgacagacagagtgaaggtgtggaccagcggccaggtggaggagtatgacctggatgctgatgacatcaacagccgctccttcctgggcaccaagatctaccagttcacccacagcctggaggtggtggaggaggtgaaggagcgggaccccccagccagccggcccagcgagcatgatggccgctgtgccaggaagagccccctggcccccaagctgctgacagacagccctgcccaggtgcccggcatcctgccctag

SEQ ID NO: 143938 - DNA, 810 bp, synthetic construct
  misc_feature 1..810: note = Description of Artificial Sequence: Synthetic coding sequence
  source 1..810: mol_type = other DNA
atggccagcgagttcaagaagaagctgttctggagggctgtggtggccgagttcctggccaccaccctgtttgtgttcatcagcatcggcagcgccctgggcttcaagtaccctgtgggcaacaaccagacagctgtgcaggacaacgtgaaggtgtccctggccttcggcctgagcatcgccaccctggcccagagcgtgggccacatcagcggggcccacctgaacccagctgtgaccctgggcctgctgctgagctgccagatcagcatcttccgggccctgatgtacatcatcgcccagtgtgtgggcgccatcgtggccacagccatcctgagcggcatcaccagcagcctgaccggcaacagcctgggcagaaatgacctggctgatggagtgaacagcggccagggcctgggcatcgagatcatcggcaccctgcagctggtgctgtgtgtgctggccaccacagacagaagaagaagagacctgggcggcagcgcccccctggccatcggcctgtctgtggccctgggccacctgctggccatcgactacacaggctgcggcatcaacccagcccggagctttggatctgctgtgatcacccacaacttcagcaaccactggatcttctgggtgggccccttcatcggcggggccctggccgtgctgatctatgacttcatcctggcccccaggagcagtgacctgacagacagagtgaaggtgtggaccagcggccaggtggaggagtatgacctggatgctgatgacatcaacagccgggtggagatgaagcccaagtag

SEQ ID NO: 143939 - DNA, 657 bp, synthetic construct
  misc_feature 1..657: note = Description of Artificial Sequence: Synthetic coding sequence
  source 1..657: mol_type = other DNA
atgttctggaccttcggctatgaagctgtgtccccagctggccccagccacctgtttgccagcctgctgctgggcgtgctgctgaccatcaccttcatgcctggggcccggcccctgcccctggtgctggtgccccagaacaccctggcctggatgcagctggatgccaaggccccagcccacccccggcccctgcagctgctgggccgggtgggccctggcagccggcagctggctgatggagtgaacagcggccagggcctgggcatcgagatcatcggcaccctgcagctggtgctgtgtgtgctggccaccacagacagaagaagaagagacctgggcggcagcgcccccctggccatcggcctgtctgtggccctgggccacctgctggccatcgactacacaggctgcggcatcaacccagcccggagctttggcagcgctgtgatcacccacaacttcagcaaccactggatcttctgggtgggccccttcatcggcggggccctggccgtgctgatctatgacttcatcctggcccccaggagcagtgacctgacagacagagtgaaggtgtggaccagcggccaggtggaggagtatgacctggatgctgatgacatcaacagccgggtggagatgaagcccaagtag

SEQ ID NO: 143940 - DNA, 465 bp, synthetic construct
  misc_feature 1..465: note = Description of Artificial Sequence: Synthetic coding sequence
  source 1..465: mol_type = other DNA
atgcagagcggcatgggctggaatgtgctggacttctggctggctgatggagtgaacagcggccagggcctgggcatcgagatcatcggcaccctgcagctggtgctgtgtgtgctggccaccacagacagaagaagaagagacctgggcggcagcgcccccctggccatcggcctgtctgtggccctgggccacctgctggccatcgactacacaggctgcggcatcaacccagcccggagctttggcagcgctgtgatcacccacaacttcagcaaccactggatcttctgggtgggccccttcatcggcggggccctggccgtgctgatctatgacttcatcctggcccccaggagcagtgacctgacagacagagtgaaggtgtggaccagcggccaggtggaggagtatgacctggatgctgatgacatcaacagccgggtggagatgaagcccaagtag

SEQ ID NO: 143941 - DNA, 765 bp, synthetic construct
  misc_feature 1..765: note = Description of Artificial Sequence: Synthetic coding sequence
  source 1..765: mol_type = other DNA
atggccagcgagttcaagaagaagctgttctggagggctgtggtggccgagttcctggccaccaccctgtttgtgttcatcagcatcggcagcgccctgggcttcaagtaccctgtgggcaacaaccagacagctgtgcaggacaacgtgaaggtgtccctggccttcggcctgagcatcgccaccctggcccagagcgtgggccacatcagcggggcccacctgaacccagctgtgaccctgggcctgctgctgagctgccagatcagcatcgtggccacagccatcctgagcggcatcaccagcagcctgactggaaacagcctgggcagaaatgacctggctgatggagtgaacagcggccagggcctgggcatcgagatcatcggcaccctgcagctggtgctgtgtgtgctggccaccacagacagaagaagaagagacctgggcggcagcgcccccctggccatcggcctgtctgtggccctgggccacctgctggccatcgactacacaggctgcggcatcaacccagcccggagctttggcagcgctgtgatcacccacaacttcagcaaccactggatcttctgggtgggccccttcatcggcggggccctggccgtgctgatctatgacttcatcctggcccccaggagcagtgacctgacagacagagtgaaggtgtggaccagcggccaggtggaggagtatgacctggatgctgatgacatcaacagccgggtggagatgaagcccaagtag

SEQ ID NO: 143942 - DNA, 990 bp, synthetic construct
  misc_feature 1..990: note = Description of Artificial Sequence: Synthetic coding sequence
  source 1..990: mol_type = other DNA
atgtgccaggtgggctgcttcctgaagaccccccgcttccccatctgggtggtgtgcagcgagagccacttcagcatcctcttcagcctgcagcccggcctgctgcgggactggaggacagagcggctgtttgacctgtactactatgatggcctggccaaccagcaggagcagatccggctgaccatcgacaccacccagaccatcagcgaggacacagacaatgacctggtgccccccctggagctgtgcatccgcaccaacatcggcagcgccctgggcttcaagtaccctgtgggcaacaaccagacagctgtgcaggacaacgtgaaggtgtccctggccttcggcctgagcatcgccaccctggcccagagcgtgggccacatcagcggggcccacctgaacccagctgtgaccctgggcctgctgctgagctgccagatcagcatcttccgggccctgatgtacatcatcgcccagtgtgtgggcgccatcgtggccacagccatcctgagcggcatcaccagcagcctgaccggcaacagcctgggcagaaatgacctggctgatggagtgaacagcggccagggcctgggcatcgagatcatcggcaccctgcagctggtgctgtgtgtgctggccaccacagacagaagaagaagagacctgggcggcagcgcccccctggccatcggcctgtctgtggccctgggccacctgctggccatcgactacacaggctgcggcatcaacccagcccggagctttggatctgctgtgatcacccacaacttcagcaaccactggatcttctgggtgggccccttcatcggcggggccctggccgtgctgatctatgacttcatcctggcccccaggagcagtgacctgacagacagagtgaaggtgtggaccagcggccaggtggaggagtatgacctggatgctgatgacatcaacagccgggtggagatgaagcccaagtag

SEQ ID NO: 143943 - DNA, 561 bp, synthetic construct
  misc_feature 1..561: note = Description of Artificial Sequence: Synthetic coding sequence
  source 1..561: mol_type = other DNA
atgcctggggcccggcccctgcccctggtgctggtgccccagaacaccctggcctggatgcagctggatgccaaggccccagcccacccccggcccctgcagctgctgggccgggtgggccctggcagccggcagctggctgatggagtgaacagcggccagggcctgggcatcgagatcatcggcaccctgcagctggtgctgtgtgtgctggccaccacagacagaagaagaagagacctgggcggcagcgcccccctggccatcggcctgtctgtggccctgggccacctgctggccatcgactacacaggctgcggcatcaacccagcccggagctttggcagcgctgtgatcacccacaacttcagcaaccactggatcttctgggtgggccccttcatcggcggggccctggccgtgctgatctatgacttcatcctggcccccaggagcagtgacctgacagacagagtgaaggtgtggaccagcggccaggtggaggagtatgacctggatgctgatgacatcaacagccgggtggagatgaagcccaagtag

SEQ ID NO: 143944 - DNA, 816 bp, synthetic construct
  misc_feature 1..816: note = Description of Artificial Sequence: Synthetic coding sequence
  source 1..816: mol_type = other DNA
atgagccccctgctgggcctgcggtctgagctgcaggacacctgcaccagcctgggcctgatgctgtctgtggtgctgctgatgggcctggcccgggtggtggcccggcagcagctgcacaggcctgtggcccacgcctttgtgctggagttcctggccaccttccagctgtgctgctgcacccatgagctgcagctgctgtctgagcagcacccagcccaccccacctggaccctgaccctggtgtacttcttcagcctggtgcacggcctgaccctggtgggcaccagcagcaacccctgtggggtgatgatgcagatgatgctgggcggcatgagccctgagaccggggctgtgcggctgctggcccagctggtgtctgccctgtgcagccgctactgcaccagcgccctgtggagcctgggcctgacccagtaccacgtgtctgagaggagctttgcctgcaagaaccccatccgggtggacctgctgaaggccgtcatcacagaagctgtgtgcagcttcctgttccacagcgccctgctgcacttccaggaggtgaggaccaagctgcgcatccacctgctggccgccctgatcaccttcctggtgtatgctgggggcagcctgactggagctgtgttcaacccagccctggccctgagcctgcacttcatgtgctttgatgaggccttcccccagttcttcatcgtgtactggctggcccccagcctgggcatcctgctgatgatcctgatgttctccttcttcctgccctggctgcacaacaaccacaccatcaacaagaaggagtag

SEQ ID NO: 143945 - DNA, 888 bp, synthetic construct
  misc_feature 1..888: note = Description of Artificial Sequence: Synthetic coding sequence
  source 1..888: mol_type = other DNA
atggccggcctgaatgtgtccctgtccttcttctttgccacctttgccctgtgtgaggccgcccggcgggccagcaaggccctgctgcctgtgggcgcctatgaggtgtttgcccgggaggccatgaggaccctggtggagctgggcccctgggccggggactttggaccagacctgctgctgaccctgctcttcctgctcttcctggcccatggagtgaccctggatggagccagcgccaaccccaccgtgtccctgcaggagttcctgatggccgagcagagcctgcccggcaccctgctgaagctggccgcccagggcctgggcatgcaggccgcctgcaccctgatgaggctgtgctgggcctgggagctgagtgacctgcacctgctgcagagcctgatggcccagagctgcagcagcgccctgcggacctctgtgccccatggagccctggtggaggccgcctgtgccttctgcttccacctgaccctgctgcacctgcggcacagccccccagcctacagcggccctgctgtggccctgctggtgacagtgacagcctacacagctggccccttcaccagcgccttcttcaacccagccctggccgcctctgtgacctttgcctgcagcggccacaccctgctggagtatgtgcaggtgtactggctgggccccctgaccggcatggtgctggccgtgctgctgcaccagggccgcctgccccacctgttccagaggaacctcttctacggccagaagaacaagtaccgggccccccggggcaagccagccccagccagcggggacacccagaccccagccaagggcagctctgtgcgggagcccggccgctctggagtggagggcccccacagcagctag

SEQ ID NO: 143946 - DNA, 798 bp, synthetic construct
  misc_feature 1..798: note = Description of Artificial Sequence: Synthetic coding sequence
  source 1..798: mol_type = other DNA
aaccagcctgccccagccctgagcccccaggtgtcctgccgccacagcagcagcggcggccctggccgctggcaggagttcctgatggccgagcagagcctgcccggcaccctgctgaagctggccgcccagggcctgggcatgcaggccgcctgcaccctgatgaggctgtgctgggcctgggagctgagtgacctgcacctgctgcagagcctgatggcccagagctgcagcagcgccctgcggacctctgtgccccatggagccctggtggaggccgcctgtgccttctgcttccacctgaccctgctgcacctgcggcacagccccccagcctacagcggccctgctgtggccctgctggtgacagtgacagcctacacagctggccccttcaccagcgccttcttcaacccagccctggccgcctctgtgacctttgcctgcagcggccacaccctgctggagtatgtgcaggtgtactggctgggccccctgacagaggagcagcacggggaggtgatggagccccccctgggccccaggtctggggacagcggcccctggctgcagaggccccgctggagcccccacctgctgctgcacctgctgagtgacacccggctgcacctgacagaggtgcctgagggccagctgggcagctatggcatcctggaggccttcttctccttctgctggctgtacaccggggaggtgtctggggccatgccccagccccccctgggcggcaaggaccgctcctggggcagcctgcggcacctggccctgcgctggtag

SEQ ID NO: 143947 - DNA, 924 bp, synthetic construct
  misc_feature 1..924: note = Description of Artificial Sequence: Synthetic coding sequence
  source 1..924: mol_type = other DNA
atggccggcctgaatgtgtccctgtccttcttctttgccacctttgccctgtgtgaggccgcccggcgggccagcaaggccctgctgcctgtgggcgcctatgaggtgtttgcccgggaggccgtgggcgctgtgcagctgggcccctgctgcctggagatgaggaccctggtggagctgggcccctgggccggggactttggaccagacctgctgctgaccctgctcttcctgctcttcctggcccatggagtgaccctggatggagccagcgccaaccccaccgtgtccctgcaggagttcctgatggccgagcagagcctgcccggcaccctgctgaagctggccgcccagggcctgggcatgcaggccgcctgcaccctgatgaggctgtgctgggcctgggagctgagtgacctgcacctgctgcagagcctgatggcccagagctgcagcagcgccctgcggacctctgtgccccatggagccctggtggaggccgcctgtgccttctgcttccacctgaccctgctgcacctgcggcacagccccccagcctacagcggccctgctgtggccctgctggtgacagtgacagcctacacagctggccccttcaccagcgccttcttcaacccagccctggccgcctctgtgacctttgcctgcagcggccacaccctgctggagtatgtgcaggtgtactggctgggccccctgaccggcatggtgctggccgtgctgctgcaccagggccgcctgccccacctgttccagaggaacctcttctacggccagaagaacaagtaccgggccccccggggcaagccagccccagccagcggggacacccagaccccagccaagggcagctctgtgcgggagcccggccgctctggagtggagggcccccacagcagctag

SEQ ID NO: 143948 - DNA, 816 bp, synthetic construct
  misc_feature 1..816: note = Description of Artificial Sequence: Synthetic coding sequence
  source 1..816: mol_type = other DNA
atgtgggagctgcggagcatcgccttcagcagagctgtgtttgctgagttcctggccaccctgctgtttgtgttcttcggcctgggcagcgccctgaactggccccaggccctgcccagcgtgctgcagatcgccatggccttcggcctgggcatcggcaccctggtgcaggccctgggccacatcagcggggcccacatcaacccagctgtgacagtggcctgcctggtgggctgccacgtgtctgtgctgcgggccgccttctacgtggccgcccagctgctgggcgctgtggccggggccgccctgctgcacgagatcaccccagctgacatccggggggacctggccgtgaatgccctgagcaacagcaccacagctggccaggccgtgacagtggagctgttcctgaccctgcagctggtgctgtgcatctttgccagcacagatgagaggagaggagaaaatcctggcaccccagccctgagcatcggcttctctgtggccctgggccacctgctgggcatccactacacaggctgcagcatgaacccagcccggagcctggccccagctgtggtgacaggcaagtttgatgaccactgggtgttctggattggccccctggtgggcgccatcctgggcagcctgctgtacaactacgtgctcttccccccagccaagagcctgtctgagcggctggccgtgctgaagggcctggagccagacacagactgggaggagcgggaggtgagaagacggcagagcgtggagctgcacagcccccagagcctgccccggggcaccaaggcctag

SEQ ID NO: 143949 - DNA, 879 bp, synthetic construct
  misc_feature 1..879: note = Description of Artificial Sequence: Synthetic coding sequence
  source 1..879: mol_type = other DNA
atgggccggcagaaggagctggtgagccgctgtggggagatgctgcacatccgctaccgcctgctgcggcaggccctggccgagtgcctgggcaccctcatcctggtgatgtttggctgcggctctgtggcccaggtggtgctgagccggggcacccatggaggcttcctgaccatcaacctggcctttggatttgctgtgaccctgggcatcctgattgctggccaggtgtctggggcccacctgaacccagctgtgacctttgccatgtgcttcctggcccgggagccctggatcaagctgcccatctacaccctggcccagaccctgggcgccttcctgggcgccggcatcgtgtttggcctgtactatgatgccatctggcactttgctgacaaccagctgtttgtgtctggccccaatggaacagctggcatctttgccacctaccccagcggccacctggacatgatcaatggcttctttgaccagttcatcggcacagccagcctcatcgtgtgtgtgctggccatcgtggacccctacaacaaccctgtgccccggggcctggaggccttcaccgtgggcctggtggtgctggtgattggcacctccatgggcttcaacagcggctatgctgtgaacccagcccgggactttggccccaggctcttcaccgccctggccggctggggcagcgctgtgttcaccaccggccagcactggtggtgggtgcccatcgtgagccccctgctgggcagcattgctggggtgtttgtgtaccagctgatgattggctgccacctggagcagcccccacccagcaatgaggaggagaatgtgaagctggcccacgtgaagcacaaggagcagatctag

SEQ ID NO: 143950 - DNA, 840 bp, synthetic construct
  misc_feature 1..840: note = Description of Artificial Sequence: Synthetic coding sequence
  source 1..840: mol_type = other DNA
atgggccggcagaaggagctggtgagccgctgtggggagatgctgcacatccgctaccgcctgctgcggcaggccctggccgagtgcctgggcaccctcatcctggtgatgtttggctgcggctctgtggcccaggtggtgctgagccggggcacccatggaggcttcctgaccatcaacctggcctttggatttgctgtgaccctgggcatcctgattgctggccaggtgtctggggcccacctgaacccagctgtgacctttgccatgtgcttcctggcccgggagccctggatcaagctgcccatctacaccctggcccagaccctgggcgccttcctgggcgccggcatcgtgtttggcctgtactatgatgccatctggcactttgctgacaaccagctgtttgtgtctggccccaatggaacagctggcatctttgccacctaccccagcggccacctggacatgatcaatggcttctttgaccaggacaggcctgccctggtggtgggcgcccaccgggtgcccaccccaggcctgcactgcggctgcctgcgggtgcctgcagatgaccggctgcccccaggggccgcccccaccctgcagagaggaagagaatgtgaggccggcccctgtgaggcccagggcgctgacctgagcggccagggcagccccctgcgctgccccggcctggagcaccccctgactgtgcagggccccctgcccaggagccccctgcatgacccccccttccaggccaaggagctgcccatctacccccaccccaccacagcccccagcggcttccccctggacctggcccagatcgccccctag

SEQ ID NO: 143951 - DNA, 972 bp, synthetic construct
  misc_feature 1..972: note = Description of Artificial Sequence: Synthetic coding sequence
  source 1..972: mol_type = other DNA
atgtctgaccggcccacagcccggcgctggggcaaatgtggccccctgtgcacccgggagaacatcatggtggccttcaagggcgtgtggacccaggccttctggaaggctgtgacagctgagttcctggccatgctgatctttgtgctgctgagcctgggcagcaccatcaactggggcggcacagagaagcccctgcctgtggacatggtgctgatcagcctgtgcttcggcctgagcatcgccaccatggtgcagtgcttcggccacatcagcggcggccacatcaacccagctgtgacagtggccatggtgtgcaccaggaagatcagcatcgccaagtctgtgttctacatcgccgcccagtgcctgggcgccatcatcggggccggcatcctgtacctggtgaccccacccagcgtggtgggcggcctgggcgtgaccatggtgcacggcaacctgacagctggccacggcctgctggtggagctgatcatcaccttccagctggtgttcaccatctttgccagctgtgacagcaagaggacagatgtgacaggcagcatcgccctggccatcggcttctctgtggccatcggccacctgtttgccatcaactacaccggggcctccatgaacccagcccggagctttggacctgctgtgatcatgggcaactgggagaaccactggatctactgggtgggccccatcattggagctgtgctggccggcggcctgtatgaatatgtgttctgcccagatgtggagttcaagaggcgcttcaaggaggccttcagcaaggccgcccagcagaccaagggcagctacatggaggtggaggacaacagaagccaggtggagacagatgacctgatcctgaagccaggagtggtgcacgtgattgatgtggacagaggagaggagaagaagggcaaggaccagagcggggaggtgctgagctctgtgtag

SEQ ID NO: 143952 - DNA, 660 bp, synthetic construct
  misc_feature 1..660: note = Description of Artificial Sequence: Synthetic coding sequence
  source 1..660: mol_type = other DNA
tgcaccctggccggggagggcatgtctgaccggcccacagcccggcgctggggcaaatgtggccccctgtgcacccgggagaacatcatggtggccttcaagggcgtgtggacccaggccttctggaaggctgtgacagctgagttcctggccatgctgatctttgtgctgctgagcctgggcagcaccatcaactggggcggcacagagaagcccctgcctgtggacatggtgctgatcagcctgtgcttcggcctgagcatcgccaccatggtgcagtgcttcggccacatcagcggcggccacatcaacccagctgtgacagtggccatggtgtgcaccaggaagatcagcatcgccaagagcgtcttctacatcgccgcccagtgtgtgggccccatcattggagctgtgctggccggcggcctgtatgaatatgtgttctgcccagatgtggagttcaagaggcgcttcaaggaggccttcagcaaggccgcccagcagaccaagggcagctacatggaggtggaggacaacagaagccaggtggagacagatgacctgatcctgaagccaggagtggtgcacgtgattgatgtggacagaggagaggagaagaagggcaaggaccagagcggggaggtgctgagctctgtgtag

SEQ ID NO: 143953 - DNA, 912 bp, synthetic construct
  misc_feature 1..912: note = Description of Artificial Sequence: Synthetic coding sequence
  source 1..912: mol_type = other DNA
atgtctgaccggcccacagcccggcgctggggcaaatgtggccccctgtgcacccgggagaacatcatggtggccttcaagggcgtgtggacccaggccttctggaaggctgtgacagctgagttcctggccatgctgatctttgtgctgctgagcctgggcagcaccatcaactggggcggcacagagaagcccctgcctgtggacatggtgctgatcagcctgtgcttcggcctgagcatcgccaccatggtgtgcaccaggaagatcagcatcgccaagtctgtgttctacatcgccgcccagtgcctgggcgccatcatcggggccggcatcctgtacctggtgaccccacccagcgtggtgggcggcctgggcgtgaccatggtgcacggcaacctgacagctggccacggcctgctggtggagctgatcatcaccttccagctggtgttcaccatctttgccagctgtgacagcaagaggacagatgtgacaggcagcatcgccctggccatcggcttctctgtggccatcggccacctgtttgccatcaactacaccggggcctccatgaacccagcccggagctttggacctgctgtgatcatgggcaactgggagaaccactggatctactgggtgggccccatcattggagctgtgctggccggcggcctgtatgaatatgtgttctgcccagatgtggagttcaagaggcgcttcaaggaggccttcagcaaggccgcccagcagaccaagggcagctacatggaggtggaggacaacagaagccaggtggagacagatgacctgatcctgaagccaggagtggtgcacgtgattgatgtggacagaggagaggagaagaagggcaaggaccagagcggggaggtgctgagctctgtgtag

SEQ ID NO: 143954 - DNA, 849 bp, synthetic construct
  misc_feature 1..849: note = Description of Artificial Sequence: Synthetic coding sequence
  source 1..849: mol_type = other DNA
atggatgctgtggagcccggcggccggggctgggcctccatgctggcctgccgcctgtggaaggccatcagccgggccctgtttgctgagttcctggccaccggcctgtatgtgttcttcggcgtgggctctgtgatgcgctggcccacagccctgcccagcgtgctgcagatcgccatcaccttcaacctggtgacagccatggctgtgcaggtgacctggaaggccagcggggcccacgccaacccagctgtgaccctggccttcctggtgggcagccacatcagcctgcccagggctgtggcctacgtggccgcccagctggtgggcgccaccgtgggcgccgccctgctgtatggagtgatgcctggggacatccgggagaccctgggcatcaacgtggtgaggaacagcgtgtccacaggccaggccgtggccgtggagctgctgctgaccctgcagctggtgctgtgtgtgtttgccagcacagacagccggcagaccagcggcagccctgccaccatgattggcatctctgtggccctgggccacctgattggcatccacttcaccggctgcagcatgaacccagcccggagctttggacctgccatcatcatcggcaagttcaccgtgcactgggtgttctgggtgggccccctgatgggcgccctgctggccagcctcatctacaactttgtgctcttcccagacaccaagaccctggcccagaggctggccatcctgaccggcaccgtggaggtgggcactggagctggagctggagctgagcccctgaagaaggagagccagcccggcagcggggctgtggagatggagagcgtgtag

SEQ ID NO: 143955 - DNA, 1029 bp, synthetic construct
  misc_feature 1..1029: note = Description of Artificial Sequence: Synthetic coding sequence
  source 1..1029: mol_type = other DNA
atggtgcaggccagcggccaccggcgcagcacccggggcagcaagatggtgtcctggagcgtcatcgccaagatccaggagatcctgcagaggaagatggtgcgggagttcctggccgagttcatgagcacctacgtgatgatggtgtttggcctgggctctgtggcccacatggtgctgaacaagaagtatggcagctacctgggcgtgaacctgggcttcggcttcggcgtgaccatgggcgtgcacgtggccggccgcatcagcggggcccacatgaatgctgctgtgacctttgccaactgtgccctgggccgggtgccctggaggaagtttcctgtgtatgtgctgggccagttcctgggcagcttcctggccgccgccaccatctacagcctcttctacacagccatcctgcacttcagcggcggccagctgatggtgactggacctgtggccacagctggcatctttgccacctacctgcctgaccacatgaccctgtggaggggcttcctgaatgaggcctggctgaccggcatgctgcagctgtgcctgtttgccatcacagaccaggagaacaacccagccctgcctggaacagaggccctggtgattggcatcctggtggtgatcattggagtgtccctgggcatgaacacaggctacgccatcaaccccagccgggacctgcccccacgcatcttcaccttcatcgccggctggggcaagcaggtgttcagcaatggagagaactggtggtgggtgcctgtggtggcccccctgctgggcgcctacctgggcggcatcatctacctggtgttcatcggcagcaccatcccccgggagcccctgaagctggaggacagcgtggcctatgaggaccacggcatcaccgtgctgcccaagatgggcagccatgagcccaccatcagccccctgacccctgtgtctgtgtccccagccaacagaagctctgtgcacccagccccacccctgcacgagagcatggccctggagcacttctag

SEQ ID NO: 143956 - DNA, 651 bp, synthetic construct
  misc_feature 1..651: note = Description of Artificial Sequence: Synthetic coding sequence
  source 1..651: mol_type = other DNA
atggtgctgaacaagaagtatggcagctacctgggcgtgaacctgggctttggatttggagtgaccatgggcgtgcacgtggccggccgcatcagcggggcccacatgaatgctgctgtgacctttgccaactgtgccctgggccgggtgccctggaggaagtttcctgtgtatgtgctgggccagttcctgggcagcttcctggccgccgccaccatctacagcctcttctacacagccatcctgcacttcagcggcggccagctgatggtgacaggccctgtggccacagctggcatctttgccacctacctgcctgaccacatgaccctgtggaggggcttcctgaatgaggcctggctgaccggcatgctgcagctgtgcctgtttgccatcacagaccaggagaacaacccagccctgcccggcacagaggccctggtgattggcatcctggtggtgatcatcggcgtgtccctgggcatgaacacaggctacgccatcaaccccagccgggacctgcccccacgcatcttcaccttcatcgccggctggggcaagcaggtgttccgctggcaccacctgcccggcctgcactggctgcaccaccccactggagcccctgagatcggcggcttctgtggggtgtag

SEQ ID NO: 143957 - DNA, 582 bp, synthetic construct
  misc_feature 1..582: note = Description of Artificial Sequence: Synthetic coding sequence
  source 1..582: mol_type = other DNA
atgggctgggccaccttcacagaccagggcgaggagggcctggagcccagcggcccctggaagaccagccacacccgggcccacatgaatgctgctgtgacctttgccaactgtgccctgggccgggtgccctggaggaagtttcctgtgtatgtgctgggccagttcctgggcagcttcctggccgccgccaccatctacagcctcttctacacagccatcctgcacttcagcggcggccagctgatggtgactggacctgtggccacagctggcatctttgccacctacctgcctgaccacatgaccctgtggaggggcttcctgaatgaggcctggctgaccggcatgctgcagctgtgcctgtttgccatcacagaccaggagaacaacccagccctgcctggaacagaggccctggtgattggcatcctggtggtgatcattggagtgtccctgggcatgaacacaggctacgccatcaaccccagccgggacctgcccccacgcatcttcaccttcatcgccggctggggcaagcaggtgttccgctactgcccctgccccggccccttcctgtag

SEQ ID NO: 143958 - DNA, 771 bp, synthetic construct
  misc_feature 1..771: note = Description of Artificial Sequence: Synthetic coding sequence
  source 1..771: mol_type = other DNA
atgggcagcggccactgcctgcggagcacccggggcagcaagatggtgtcctggagcgtgattgccaagatccaggagatcctgcagaggaagatggtgcgggagttcctggccgagttcatgagcacctacgtgatgatggtgtttggcctgggctctgtggcccacatggtgctgaacaagaagtatggcagctacctgggcgtgaacctgggctttggatttggagtgaccatgggcgtgcacgtggccggccgcatcagcggggcccacatgaatgctgctgtgacctttgccaactgtgccctgggccgggtgccctggaggaagtttcctgtgtatgtgctgggccagttcctgggcagcttcctggccgccgccaccatctacagcctcttctacacagccatcctgcacttcagcggcggccagctgatggtgacaggccctgtggccacagctggcatctttgccacctacctgcctgaccacatgaccctgtggaggggcttcctgaatgaggcctggctgaccggcatgctgcagctgtgcctgtttgccatcacagaccaggagaacaacccagccctgcccggcacagaggccctggtgattggcatcctggtggtgatcatcggcgtgtccctgggcatgaacacaggctacgccatcaaccccagccgggacctgcccccacgcatcttcaccttcatcgccggctggggcaagcaggtgttccgctactgcccctgccccggccccttcctgtag

SEQ ID NO: 143959 - DNA, 1026 bp, synthetic construct
  misc_feature 1..1026: note = Description of Artificial Sequence: Synthetic coding sequence
  source 1..1026: mol_type = other DNA
atgggcagcggccactgcctgcggagcacccggggcagcaagatggtgtcctggagcgtgattgccaagatccaggagatcctgcagaggaagatggtgcgggagttcctggccgagttcatgagcacctacgtgatgatggtgtttggcctgggctctgtggcccacatggtgctgaacaagaagtatggcagctacctgggcgtgaacctgggctttggatttggagtgaccatgggcgtgcacgtggccggccgcatcagcggggcccacatgaatgctgctgtgacctttgccaactgtgccctgggccgggtgccctggaggaagtttcctgtgtatgtgctgggccagttcctgggcagcttcctggccgccgccaccatctacagcctcttctacacagccatcctgcacttcagcggcggccagctgatggtgacaggccctgtggccacagctggcatctttgccacctacctgcctgaccacatgaccctgtggaggggcttcctgaatgaggcctggctgaccggcatgctgcagctgtgcctgtttgccatcacagaccaggagaacaacccagccctgcccggcacagaggccctggtgattggcatcctggtggtgatcatcggcgtgtccctgggcatgaacacaggctacgccatcaaccccagccgggacctgcccccacgcatcttcaccttcatcgccggctggggcaagcaggtgttcagcaatggagagaactggtggtgggtgcctgtggtggcccccctgctgggcgcctacctgggcggcatcatctacctggtgttcatcggcagcaccatcccccgggagcccctgaagctggaggacagcgtggcctatgaagatcatggcatcaccgtgctgcccaagatgggcagccatgagcccaccatcagccccctgacccctgtgtctgtgtccccagccaacagaagctctgtgcacccagccccacccctgcacgagagcatggccctggagcacttctag

SEQ ID NO: 143960 - DNA, 513 bp, synthetic construct
  misc_feature 1..513: note = Description of Artificial Sequence: Synthetic coding sequence
  source 1..513: mol_type = other DNA
atgaatgctgctgtgacctttgccaactgtgccctgggccgggtgccctggaggaagtttcctgtgtatgtgctgggccagttcctgggcagcttcctggccgccgccaccatctacagcctcttctacacagccatcctgcacttcagcggcggccagctgatggtgactggacctgtggccacagctggcatctttgccacctacctgcctgaccacatgaccctgtggaggggcttcctgaatgaggcctggctgaccggcatgctgcagctgtgcctgtttgccatcacagaccaggagaacaacccagccctgcctggaacagaggccctggtgattggcatcctggtggtgatcattggagtgtccctgggcatgaacacaggctacgccatcaaccccagccgggacctgcccccacgcatcttcaccttcatcgccggctggggcaagcaggtgttcagcaatggagagaactggtggtgggtgcctgtggtggcccccctgtag

SEQ ID NO: 143961 - DNA, 426 bp, synthetic construct
  misc_feature 1..426: note = Description of Artificial Sequence: Synthetic coding sequence
  source 1..426: mol_type = other DNA
ctcttctacacagccatcctgcacttcagcggcggccagctgatggtgactggacctgtggccacagctggcatctttgccacctacctgcctgaccacatgaccctgtggaggggcttcctgaatgaggcctggctgaccggcatgctgcagctgtgcctgtttgccatcacagaccaggagaacaacccagccctgcctggaacagaggccctggtgattggcatcctggtggtgatcattggagtgtccctgggcatgaacacaggctacgccatcaaccccagccgggacctgcccccacgcatcttcaccttcatcgccggctggggcaagcaggtgttccgctggcaccacctgcccggcctgcactggctgcaccaccccaccggggcccctgagattggaggcttctgtggggtgtag

SEQ ID NO: 143962 - DNA, 498 bp, synthetic construct
  misc_feature 1..498: note = Description of Artificial Sequence: Synthetic coding sequence
  source 1..498: mol_type = other DNA
atgaatgctgctgtgacctttgccaactgtgccctgggccgggtgccctggaggaagtttcctgtgtatgtgctgggccagttcctgggcagcttcctggccgccgccaccatctacagcctcttctacacagccatcctgcacttcagcggcggccagctgatggtgactggacctgtggccacagctggcatctttgccacctacctgcctgaccacatgaccctgtggaggggcttcctgaatgaggcctggctgaccggcatgctgcagctgtgcctgtttgccatcacagaccaggagaacaacccagccctgcctggaacagaggccctggtgattggcatcctggtggtgatcattggagtgtccctgggcatgaacacaggctacgccatcaaccccagccgggacctgcccccacgcatcttcaccttcatcgccggctggggcaagcaggtgttccgctactgcccctgccccggccccttcctgtag

SEQ ID NO: 143963 - DNA, 774 bp, synthetic construct
  misc_feature 1..774: note = Description of Artificial Sequence: Synthetic coding sequence
  source 1..774: mol_type = other DNA
atggtgcaggccagcggccaccggcgcagcacccggggcagcaagatggtgtcctggagcgtcatcgccaagatccaggagatcctgcagaggaagatggtgcgggagttcctggccgagttcatgagcacctacgtgatgatggtgtttggcctgggctctgtggcccacatggtgctgaacaagaagtatggcagctacctgggcgtgaacctgggcttcggcttcggcgtgaccatgggcgtgcacgtggccggccgcatcagcggggcccacatgaatgctgctgtgacctttgccaactgtgccctgggccgggtgccctggaggaagtttcctgtgtatgtgctgggccagttcctgggcagcttcctggccgccgccaccatctacagcctcttctacacagccatcctgcacttcagcggcggccagctgatggtgactggacctgtggccacagctggcatctttgccacctacctgcctgaccacatgaccctgtggaggggcttcctgaatgaggcctggctgaccggcatgctgcagctgtgcctgtttgccatcacagaccaggagaacaacccagccctgcctggaacagaggccctggtgattggcatcctggtggtgatcattggagtgtccctgggcatgaacacaggctacgccatcaaccccagccgggacctgcccccacgcatcttcaccttcatcgccggctggggcaagcaggtgttccgctactgcccctgccccggccccttcctgtag

SEQ ID NO: 143964 - DNA, 426 bp, synthetic construct
  misc_feature 1..426: note = Description of Artificial Sequence: Synthetic coding sequence
  source 1..426: mol_type = other DNA
atgaatgctgctgtgacctttgccaactgtgccctgggccgggtgccctggaggaagtttcctgtgtatgtgctgggccagttcctgggcagcttcctggccgccgccaccatctacagcctcttctacagcgtggccgacagagatgccccagctgtgtccctgcggcaccacggccctggagagcagcccagcacagccaggaacagaggagctggggacagacacccccggggccaccacagaggagtgccctggcatgagcaccgcatctgccaccagcctgtgcccggccctgccccaccccacctgcacctgcactgctggctgggccagacaggcctgcaggtgctgcccctgccccggcccatccccctgtccttctctgtgggccccctgtgtgtggagggctggggcgtgatgtag

SEQ ID NO: 143965 - DNA, 1602 bp, synthetic construct
  misc_feature 1..1602: note = Description of Artificial Sequence: Synthetic coding sequence
  source 1..1602: mol_type = other DNA
atgggcagccgctgcctgaaccccccacctccagcccacagcgacaccaccgggaaggacagctttggaaacatcagaggagctgagaccggccagggcgccagcgcctgcagcgtgaccagcgcccgggtgacctgtggggccggcagcgagccccacagccacaggaaccctggcatcagcgcccaggtgggcctggcccccagctatggagctgcccggggcagaagaagacccctggccctgcagcagagcccccaggagaggagacatgtgggctggaacagcacccggggcctgctgcctgccagcctgcccggcacagccagcagccagagcgccagcgccacagccagcgctgccctgcccctgaaggtgacaggccccctggccaggaaccccaccccaccctggacagctgctgctgccctggccacccggggccagaggcctgagaagggcctcttccctggccctgcccccttcagcctgggcaagaggaagaggggccggggccgcacctgggagaggagaagaagagtgtccattgagaccagcacctgcttccggcccggctgtgagcggctgggcgctgctgctggggccaacctgagccagctggccagcagccagaggcccctgcgggagcgctgggtgctgtacaccatcatcatggctgctgctggggccccagatggcatggaggagcccggcatggacacagaagctgagaccgtggccacagaggccccagcccggcctgtgaactgcctggaggccgaggccgccgccggggctgctgctgaagattctggagctgcccggggcagcctgcagcctgccccagcccagcccccaggggaccctgctgcccaggcctctgtgtccaatggagaagatgctgggggcggggccggccgggagctggtggacctgaagatcatctggaacaagaccaagcatgatgtgaagttccccctggacagcacaggcagcgagctgaagcagaagatccacagcatcaccggcctgcccccagccatgcagaaggtgatgtacaagggcctggtgcctgaggacaagaccctgcgggagatcaaggtgaccagcggggccaagatcatggtggtgggcagcaccatcaatgatgtgctggccgtgaacacccccaaggatgctgcccagcaggatgccaaggccgaggagaacaagaaggagcccctgtgccggcagaagcagcacaggaaggtgctggacaagggcaagccagaagatgtgatgcccagcgtgaagggggcccaggagcggctgcccaccgtgcccctgagcggcatgtacaacaagagcggcggcaaggtgcggctgaccttcaagctggagcaggaccagctgtggattggcaccaaggagaggacagagaagctgcccatgggcagcatcaagaatgtggtgtctgagcccatcgagggccacgaggactaccacatgatggccttccagctgggccccacagaggccagctactactgggtgtactgggtgcccacccagtatgtggatgccatcaaggacacagtgctgggcaagtggcagtacttctag

SEQ ID NO: 143966 - DNA, 9198 bp, synthetic construct
  misc_feature 1..9198: note = Description of Artificial Sequence: Synthetic coding sequence
  source 1..9198: mol_type = other DNA
atggaggagaagcagcagatcatcctggccaaccaggacggcggcaccgtggccggggccgcccccaccttctttgtgatcctgaagcagcctggaaatggcaagacagaccagggcatcctggtgaccaaccaggatgcctgtgccctggccagctctgtgagcagccctgtgaagagcaagggcaagatctgcctgcctgctgactgcaccgtgggcggcatcaccgtgaccctggacaacaacagcatgtggaatgagttctaccacaggagcacagagatgatcctgaccaagcagggccgcaggatgttcccctactgccgctactggatcaccggcctggacagcaacctgaagtacatcctggtgatggacatcagccctgtggacaaccaccgctacaagtggaatggccgctggtgggagcccagcggcaaggccgagccccacgtgctgggccgggtcttcatccaccctgagagccccagcacaggccactactggatgcaccagcctgtgtccttctacaagctgaagctgaccaacaacaccctggaccaggagggccacatcatcctgcacagcatgcaccgctacctgccccggctgcacctggtgcctgctgagaaggctgtggaggtgatccagctgaatggacctggggtgcacaccttcaccttcccccagacagagttctttgctgtgacagcctaccagaacatccagatcacccagctgaagattgactacaacccctttgccaagggcttcagagatgatggcctgaacaacaagccccagagagatggcaagcagaagaacagcagtgaccaggagggcaacaacatcagcagcagcagcggccaccgggtgcggctgacagagggccagggcagcgagatccagcccggggacctggaccccctgagccggggccacgagaccagcggcaagggcctggagaagaccagcctgaacatcaagagggacttcctgggcttcatggacacagacagcgccctgtctgaggtgccccagctgaagcaggagatcagcgagtgcctgattgccagcagctttgaagatgacagccgggtggccagccccctggaccagaatggcagcttcaacgtggtgatcaaggaggagcccctggatgattatgactatgagctgggagaatgtcctgagggcgtgacagtgaagcaggaggagacagatgaggagacagatgtgtacagcaacagtgatgatgaccccatcctggagaagcagctgaagaggcacaacaaggtggacaaccctgaggccgaccacctgagcagcaagtggctgcccagcagccccagcggcgtggccaaggccaagatgttcaagctggacaccgggaagatgcctgtggtgtacctggagccctgtgctgtgaccaggagcacagtgaagatcagcgagctgcctgacaacatgctgagcaccagcaggaaggacaagagctccatgctggccgagctggagtacctgcccacctacatcgagaacagcaatgaaacagccttctgcctgggcaaggagagtgaaaatggcctgaggaagcacagcccagacctgcgggtggtgcagaagtaccccctgctgaaggagccccagtggaagtacccagacatcagtgacagcatcagcacagagcgcatcctggatgacagcaaggacagcgtgggggacagcctgagcggcaaggaggacctgggcaggaagaggaccaccatgctgaagatcgccacagctgccaaggtggtgaatgccaaccagaatgccagccccaacgtgcctgggaagaggggccggcccaggaagctgaagctgtgcaaggccggccggccccccaagaacacaggcaagagcctcatcagcaccaagaacacccctgtgtccccaggcagcaccttcccagatgtgaagccagacctggaggatgtggatggagtgctgtttgtgtcctttgagagcaaggaggccctggacatccatgctgtggatggcaccacagaggagagcagcagcctgcaggccagcaccaccaatgattctggctaccgggcccgcatcagccagctggagaaggagctgattgaggacctgaagaccctgcggcacaagcaggtgatccaccctggcctgcaggaggtgggcctgaagctgaacagcgtggaccccaccatgagcattgacctgaagtacctgggcgtgcagctgcccctggccccagccaccagcttccccttctggaacctgaccggcaccaacccagccagcccagatgctggcttcccctttgtgtccaggacaggcaagaccaatgacttcaccaagatcaagggctggaggggcaagttccacagcgccagcgccagcagaaatgaaggaggcaacagcgagagcagcctgaagaacagaagtgccttctgcagcgacaagctggatgagtacctggagaatgaaggcaagctgatggagacctccatgggcttcagcagcaatgcccccaccagccctgtggtgtaccagctgcccaccaagagcaccagctatgtgaggaccctggacagcgtgctgaagaagcagagcaccatcagccccagcaccagctacagcctgaagccccacagcgtgccccctgtgtccaggaaggccaagagccagaaccggcaggccaccttcagcggccgcaccaagagcagctacaagagcatcctgccctaccctgtgagccccaagcagaagtacagccacgtgatcctgggggacaaggtgaccaagaacagcagcggcatcatcagcgagaaccaggccaacaactttgtggtgcccaccctggatgagaacatcttccccaagcagatcagcctgcggcaggcccagcagcagcagcagcagcagcagggcagcaggcctcctggcctgagcaagagccaggtgaagctgatggacctggaggactgtgccctgtgggagggcaagcccaggacctacatcacagaggagcgggcagatgtgtccctgaccaccctgctgacagcccaggccagcctgaagaccaagcccatccacaccatcatcaggaagagggccccaccctgcaacaatgacttctgccgcctgggctgtgtgtgcagcagcctggccctggagaagaggcagcctgcccactgccggcggccagactgcatgtttggctgcacctgcctgaagaggaaggtggtgctggtgaagggcggcagcaagaccaagcacttccagaggaaggccgcccaccgggaccccgtcttctatgacaccctgggggaggaggcccgggaggaggaggagggcatccgggaggaggaggagcagctgaaggagaagaagaagaggaagaagctggagtacaccatctgtgaaacagagcctgagcagcctgtgcgccactaccccctgtgggtgaaggtggagggggaggtggaccctgagcctgtgtacatccccacccccagcgtcatcgagcccatgaagcccctgctgctgccccagcctgaggtgctgagccccaccgtgaagggcaagctgctgaccggcatcaagagccccaggagctacacccccaagcccaaccctgtgatccgggaggaggacaaggaccctgtgtacctgtactttgagagcatgatgacctgtgcccgggtgcgggtgtatgaaaggaagaaggaggaccagaggcagcccagcagcagcagcagccccagccccagcttccagcagcagaccagctgccacagcagccctgagaaccacaacaatgccaaggagccagattctgagcagcagcccctgaagcagctgacctgtgacctggaggatgacagcgacaagctgcaggagaagtcctggaagagcagctgcaatgaaggagagagcagcagcaccagctacatgcaccagaggagccctgggggccccaccaagctgattgagatcatcagtgactgcaactgggaggaggacaggaacaagatcctgagcatcctgagccagcacatcaacagcaacatgccccagagcctgaaggtgggcagcttcatcatcgagctggccagccagaggaagagcagaggagagaagaacccccctgtgtacagcagccgggtgaagatctccatgcccagctgccaggaccaggatgacatggccgagaagagcggcagcgagaccccagatggccccctgagccctgggaagatggaggacatcagccctgtgcagacagatgccctggacagcgtgcgggagcggctgcatggaggcaagggcctgcccttctacgccggcctgagccctgctgggaagctggtggcctacaagaggaagcccagcagcagcaccagcggcctcatccaggtggccagcaatgccaaggtggccgccagcaggaagcccaggaccctgctgcccagcaccagcaacagcaagatggccagcagcagcggcacagccaccaacagacctgggaagaacctgaaggcctttgtgcctgccaagaggcccatcgccgcccggcccagccctgggggcgtcttcacccagtttgtgatgagcaaggtgggcgccctgcagcagaagatccctggggtgtccaccccccagaccctggccggcacccagaagttcagcatccggcccagccctgtgatggtggtgacccctgtggtgagcagcgagcctgtgcaggtgtgcagccctgtgacagctgctgtgaccaccaccaccccccaggtgttcctggagaacaccacagctgtgacccccatgacagccatcagtgatgtggagaccaaggagaccacctacagcagcggggccaccaccactggagtggtggaggtgtctgagaccaacaccagcacctctgtgaccagcacccagagcacagccaccgtgaacctgaccaagaccaccggcatcaccacccctgtggcctctgtggccttccccaagagcctggtggccagccccagcaccatcaccctgcctgtggccagcacagccagcaccagcctggtggtggtgacagctgctgccagcagctccatggtgaccacccccaccagcagcctgggctctgtgcccatcatcctgagcggcatcaatggcagcccccctgtgtcccagaggccagaaaatgctgcccagatccctgtggccaccccccaggtgagccccaacacagtgaagagagctggcccccggctgctgctgatccctgtgcagcagggcagccccaccctgcggcctgtgagcaacacccagctgcagggccacaggatggtgctgcagcctgtgcgcagccccagcggcatgaacctcttccgccaccccaacggccagatcgtgcagctgctgcccctgcaccagctgcggggcagcaacacccagcccaacctgcagcctgtgatgttcaggaaccctggctctgtgatgggcatccggctgcctgcccccagcaagcccagcgagaccccacccagcagcaccagcagcagcgccttctctgtgatgaaccctgtgatccaggccgtgggcagcagcagcgctgtgaatgtcatcacccaggcccccagcctgctgagcagcggggccagctttgtgtcccaggccggcaccctgaccctgcgcatcagccccccagagccccagagctttgccagcaagacaggcagcgagaccaagatcacctacagcagcggcggccagcctgtgggcacagccagcctcatccccctgcagagcggcagctttgccctgctgcagctgcccggccagaagcctgtgcccagcagcatcctgcagcacgtggccagcctgcagatgaagcgggagagccagaacccagaccagaaggatgagaccaacagcatcaagcgggagcaggagaccaagaaggtgctgcagagcgagggggaggccgtggaccctgaggccaacgtcatcaagcagaacagcggggccgccaccagcgaggagaccctgaatgacagcctggaggacagaggagaccacctggatgaagaatgtctgcctgaggagggctgtgccaccgtgaagcccagcgagcacagctgcatcaccggcagccacacagaccaggactacaaggatgtgaatgaggagtatggagccaggaacaggaagagcagcaaggagaaggtggccgtgctggaggtgaggaccatcagcgagaaggccagcaacaagacagtgcagaacctgagcaaggtgcagcaccagaagctgggagatgtgaaggtggagcagcagaagggctttgacaaccctgaggagaacagcagcgagttccctgtgaccttcaaggaggagagcaagtttgagctgagcggcagcaaggtgatggagcagcagagcaacctgcagcctgaggccaaggagaaggaatgtggggacagcctggagaaggaccgggagcgctggaggaagcacctgaagggccccctgaccaggaaatgtgtgggcgccagccaggagtgcaagaaggaggctgatgagcagctgatcaaggagaccaagacctgccaggagaacagtgatgtgttccagcaggagcagggcatcagtgacctgctgggcaagagcggcatcacagaagatgcccgggtgctgaagacagaatgtgacagctggagccgcatcagcaaccccagcgccttcagcatcgtgccccggcgggccgccaagagcagcagaggaaatggccacttccagggccacctgctgctgcctggagagcagatccagcccaagcaggagaagaagggcggccgcagcagcgctgacttcaccgtgctggacctggaggaggatgatgaagatgacaatgagaagacagatgacagcattgatgaaattgtggatgtggtgtctgactaccagagcgaggaggtggatgatgtggagaagaacaactgtgtggagtacattgaagatgatgaggagcacgtggacatcgagaccgtggaggagctgtctgaggagatcaacgtggcccacctgaagaccacagctgcccacacccagagcttcaagcagcccagctgcacccacatctctgcagatgagaaggctgctgagaggagcaggaaggccccacccatccccctgaagctgaagccagactactggagcgacaagctgcagaaggaggccgaggcctttgcctactacagaaggacccacacagccaatgaaagaagaagaagaggagagatgagggacctgtttgagaagctgaagatcaccctgggcctgctgcacagcagcaaggtgtccaagagcctcatcctgacccgggccttcagcgagatccagggcctgacagaccaggccgacaagctgattggccagaagaacctgctgaccaggaagaggaacatcctgatcaggaaggtgagcagcctgagcggcaagacagaggaggtggtgctgaagaagctggagtacatctatgccaagcagcaggccctggaggcccagaagaggaagaagaagatgggcagtgatgaatttgacatcagcccccgcatcagcaagcagcaggagggcagcagcgccagctctgtggacctgggccagatgttcatcaacaacagaagaggcaagcccctcatcctgagcaggaagaaggaccaggccacagagaacaccagccccctgaacaccccccacaccagcgccaacctggtgatgaccccccagggccagctgctgaccctgaagggccccctcttcagcggccctgtggtggccgtgtccccagacctgctggagagtgacctgaagccccaggtggccggcagcgctgtggccctgcctgaaaatgatgacctcttcatgatgcccagaattgtgaatgtgaccagcctggccacagaaggaggcctggtggacatgggcggcagcaagtacccccatgaggtgcctgacagcaagcccagcgaccacctgaaggacacagtgagaaatgaagacaacagcctggaggacaagggccgcatcagcagccggggcaacagagatggccgggtgaccctgggccccacccaggtgttcctggccaacaaggacagcggctacccccagatcgtggatgtgagcaacatgcagaaggcccaggagttcctgcccaagaagatcagcggggacatgaggggcatccagtacaagtggaaggagagcgagagcagaggagagcgggtgaagagcaaggacagcagcttccacaagctgaagatgaaggacctgaaggacagcagcattgagatggagctgaggaaggtgaccagcgccatcgaggaggccgccctggacagcagcgagctgctgaccaacatggaggatgaagatgacacagatgagaccctgaccagcctgctgaatgagatcgccttcctgaaccagcagctgaatgatgattctgtgggcctggccgagctgcccagctccatggacacagagttccctggagatgcccggcgggccttcatcagcaaggtgcccccaggcagccgggccaccttccaggtggagcacctgggcaccggcctgaaggagctgcctgatgtgcagggcgagagtgacagcatcagccccctgctgctgcacctggaggatgatgacttctctgaaaatgagaagcagctggccgagcccgccagcgagccagatgtgctgaagatcgtcatcgacagcgagatcaaggacagcctgctgagcaacaagaaggccattgatggcggcaagaacaccagcggcctgcctgctgagcctgagagcgtgagcagcccccccaccctgcacatgaagacaggcctggagaacagcaacagcacagacaccctgtggaggcccatgcccaagctggcccccctgggcctgaaggtggccaaccccagcagtgatgctgatggccagagcctgaaggtgatgccctgcctggcccccatcgccgccaaggtgggctctgtgggccacaagatgaacctgactggaaatgaccaggagggccgggagagcaaggtgatgcccaccctggcccctgtggtggccaagctgggcaacagcggggccagccccagcagcgctgggaagtag

SEQ ID NO: 143967 - DNA, 888 bp, synthetic construct
  misc_feature 1..888: note = Description of Artificial Sequence: Synthetic coding sequence
  source 1..888: mol_type = other DNA
atgcagcctgagggcgctgagaagggcaagagcttcaagcagaggctggtgctgaagagcagcctggccaaggagaccctgtctgagttcctgggcaccttcatcctgattgtgctgggctgcggctgtgtggcccaggccatcctgagccggggccgctttggaggagtcatcaccatcaacgtgggcttctccatggctgtggccatggccatctacgtggccggcggcgtgtctgggggccacatcaacccagctgtgtccctggccatgtgcctgtttggccgcatgaagtggttcaagctgcccttctacgtgggcgcccagttcctgggcgcctttgtgggcgccgccaccgtgtttggcatctactatgatggcctgatgagctttgctgggggcaagctgctgattgtgggagaaaatgccacagcccacatctttgccacctacccagccccctacctgagcctggccaatgcctttgctgaccaggtggtggccaccatgatcctgctgatcatcgtgtttgccatctttgacagcaggaacctgggcgccccccggggcctggagcccatcgccatcggcctgctgatcatcgtgattgccagcagcctgggcctgaacagcggctgtgccatgaacccagcccgggacctgagccccaggctcttcaccgccctggccggctggggctttgaggtgttccgggccggcaacaacttctggtggatccctgtggtgggccccctggtgggcgctgtgattggaggcctcatctacgtgctggtgattgagatccaccaccctgagccagattctgtgttcaagacagagcagagcgaggacaagccagagaagtatgagctgagcgtcatcatgtag

SEQ ID NO: 143968 - DNA, 1992 bp, synthetic construct
  misc_feature 1..1992: note = Description of Artificial Sequence: Synthetic coding sequence
  source 1..1992: mol_type = other DNA
atgggccgctaccgcatccgggtggccaccggggcctggctgttcagcggcagctacaacagagtgcagctgtggctggtgggcaccagaggagaggccgagctggagctgcagctgcggcctgcccggggggaggaggaggagtttgaccatgatgtggccgaggacctgggcctgctgcagtttgtgcggctgaggaagcaccactggctggtggatgatgcctggttctgtgaccgcatcaccgtgcagggccctggggcctgtgccgaggtggccttcccctgctaccgctgggtgcagggcgaggacatcctgagcctgcctgagggcacagcccggctgcccggggacaatgccctggacatgttccagaagcaccgggagaaggagctgaaggaccggcagcagatctactgctgggccacctggaaggagggcctgcccctgaccatcgctgctgacaggaaggatgacctgccccccaacatgaggttccacgaggagaagaggctggactttgagtggaccctgaaggccggggccctggagatggccctgaagagggtgtacaccctgctgagctcctggaactgcctggaggactttgaccagatcttctggggccagaagagcgccctggccgagaaggtgcggcagtgctggcaggatgatgagctgttctcctaccagttcctgaatggagccaaccccatgctgctgcggcgcagcaccagcctgcccagccggctggtgctgcccagcggcatggaggagctgcaggcccagctggagaaggagctgcagaatggcagcctgtttgaggccgacttcatcctgctggatggcatcccagccaacgtcatccggggggagaagcagtacctggccgcccccctggtgatgctgaagatggagcccaacgggaagctgcagcccatggtgatccagatccagccccccaaccccagcagccccacccccaccctcttcctgcccagcgacccccccctggcctggctgctggccaagtcctgggtgaggaacagcgacttccagctgcacgagatccagtaccacctgctgaacacccacctggtggccgaggtgattgctgtggccaccatgcgctgcctgcccggcctgcaccccatcttcaagttcctgatcccccacatccgctacaccatggagatcaacacccgggcccggacccagctgatcagtgatggcggcatctttgacaaggctgtgtccactggaggcggcggccacgtgcagctgctgcggcgggctgctgcccagctgacctactgcagcctgtgccccccagatgacctggccgaccggggcctgctgggcctgcccggggccctgtatgcccatgatgccctgcggctgtgggagatcatcgcccgctacgtggagggcatcgtgcacctgttctaccagagagatgacatcgtgaagggggaccctgagctgcaggcctggtgccgggagatcacagaggtgggcctgtgccaggcccaggaccggggcttccctgtgtccttccagagccagagccagctgtgccacttcctgaccatgtgtgtgttcacctgcacagcccagcacgccgccatcaaccagggccagctggactggtacgcctgggtgcccaatgccccctgcaccatgaggatgcccccacccaccaccaaggaggatgtgaccatggccaccgtgatgggcagcctgcctgatgtgcggcaggcctgcctgcagatggccatctcctggcacctgagccggcggcagcctgacatggtgcccctgggccaccacaaggagaagtacttcagcggccccaagcccaaggctgtgctgaaccagttcagaacagacctggagaagctggagaaggagatcacagccagaaatgagcagctggactggccctatgagtacctgaagcccagctgcatcgagaacagcgtgaccatctag

SEQ ID NO: 143969 - DNA, 2106 bp, synthetic construct
  misc_feature 1..2106: note = Description of Artificial Sequence: Synthetic coding sequence
  source 1..2106: mol_type = other DNA
atggccacctacaaggtgcgggtggccaccggcacagacctgctgagcggcacccgggacagcatcagcctgaccatcgtgggcacccagggcgagagccacaagcagctgctgaaccacttcggccgggactttgccactggagctgtgggccagtacacagtgcagtgcccccaggacctgggggagctgatcatcatccggctgcacaaggagagatatgccttcttccccaaggacccctggtactgcaactacgtgcagatctgtgccccaaatggccgcatctaccacttccctgcctaccagtggatggatggctatgagaccctggccctgcgggaggccaccgggaagaccacagcagatgacagcctgcctgtgctgctggagcacaggaaggaggagatccgggccaagcaggacttctaccactggagggtcttcctgcccggcctgcccagctatgtgcacatccccagctaccggccccctgtgagaagacacaggaaccccaacagacctgagtggaatggctacatccctggcttccccatcctgatcaacttcaaggccaccaagttcctgaacctgaacctgcgctacagcttcctgaagacagccagcttctttgtgcggctgggccccatggccctggccttcaaggtgcggggcctgctggactgcaagcacagctggaagaggctgaaggacatcaggaagatcttccctgggaagaagtctgtggtgtctgaatatgtggccgagcactgggccgaggacaccttcttcggctaccagtacctgaatggagtgaaccctggcctcatccgccgctgcacccgcatcccagacaagtttcctgtgacagatgacatggtggcccccttcctgggggagggcacctgcctgcaggccgagctggagaagggcaacatctacctggccgactaccgcatcatggagggcatccccaccgtggagctgagcggcaggaagcagcaccactgtgcccccctgtgcctgctgcactttggacctgagggcaagatgatgcccatcgccatccagctgagccagaccccaggccctgactgccccatcttcctgcccagcgacagcgagtgggactggctgctggccaagacctgggtgcgctatgcagagttctacagccatgaggccatcgcccacctgctggagacccacctgattgctgaggccttctgcctggccctgctgaggaacctgcccatgtgccaccccctgtacaagctgctgatcccccacacccgctacacagtgcagatcaacagcatcggccgggctgtgctgctgaatgaaggaggcctgagcgccaagggcatgagcctgggcgtggagggctttgctggggtgatggtgcgggccctgtctgagctgacctatgacagcctgtacctgcccaatgactttgtggagcggggcgtgcaggacctgcccggctactactacagagatgacagcctggccgtgtggaatgccctggagaagtatgtgacagagatcatcacctactactaccccagtgatgctgctgtggagggggaccctgagctgcagagctgggtgcaggagatcttcaaggaatgtctgctgggccgggagagcagcggcttcccccgctgcctgaggacagtgcctgagctgatccgctacgtgaccatcgtcatctacacctgcagcgccaagcatgctgctgtgaacacaggccagatggagttcaccgcctggatgcccaacttccctgcctccatgaggaacccccccatccagaccaagggcctgaccaccctggagaccttcatggacaccctgcctgatgtgaagaccacctgcatcaccctgctggtgctgtggaccctgagccgggagccagatgaccggcggcccctgggccacttcccagacatccactttgtggaggaggcccccaggaggagcattgaggccttccggcagaggctgaaccagatcagccatgacatccggcagaggaacaagtgcctgcccatcccctactactacctggaccctgtgctgattgagaacagcatcagcatctag

SEQ ID NO: 143970 - DNA, 1989 bp, synthetic construct
  misc_feature 1..1989: note = Description of Artificial Sequence: Synthetic coding sequence
  source 1..1989: mol_type = other DNA
atgggcctgtaccgcatccgggtgtccactggagccagcctgtatgccggcagcaacaaccaggtgcagctgtggctggtgggccagcacggggaggccgccctgggcaagaggctgtggccagcccggggcaaggagacagagctgaaggtggaggtgcctgagtacctgggccccctgctgtttgtgaagctgaggaagaggcacctgctgaaggatgatgcctggttctgcaactggatctctgtgcagggccctggagctggagatgaggtgcgcttcccctgctaccgctgggtggagggcaatggagtgctgagcctgcctgagggcaccggccgcacagtgggggaggacccccagggcctcttccagaagcaccgggaggaggagctggaggagaggaggaagctgtaccgctggggcaactggaaggatggcctcatcctgaacatggccggggccaagctgtatgacctgcctgtggatgagcgcttcctggaggacaagagggtggactttgaggtgtccctggccaagggcctggccgacctggccatcaaggacagcctgaatgtgctgacctgctggaaggacctggatgacttcaaccgcatcttctggtgtggccagagcaagctggccgagcgggtgcgggacagctggaaggaggatgccctgtttggctaccagttcctgaatggagccaaccctgtggtgctgcggcgcagcgcccacctgcctgcccggctggtgttccccccaggcatggaggagctgcaggcccagctggagaaggagctggagggcggcaccctgtttgaggccgacttcagcctgctggatggcatcaaggccaacgtcatcctgtgcagccagcagcacctggccgcccccctggtgatgctgaagctgcagccagatggcaagctgctgcccatggtgatccagctgcagctgcccaggacaggcagccccccaccacccctcttcctgcccacagacccccccatggcctggctgctggccaagtgctgggtgcgcagcagtgacttccagctgcacgagctgcagagccacctgctgcggggccacctgatggccgaggtgattgtggtggccaccatgcgctgcctgcccagcatccaccccatcttcaagctgatcatcccccacctgcgctacaccctggagatcaacgtgcgggccaggacaggcctggtgtctgacatgggcatctttgaccagatcatgagcactggaggcggcggccacgtgcagctgctgaagcaggccggggccttcctgacctacagcagcttctgccccccagatgacctggccgaccggggcctgctgggcgtgaagagcagcttctacgcccaggatgccctgcggctgtgggagatcatctaccgctacgtggagggcatcgtgtccctgcactacaagacagatgtggccgtgaaggatgatcctgagctgcagacctggtgccgggagatcacagaaattggcctgcagggcgcccaggaccggggcttccctgtgtccctgcaggcccgggaccaggtgtgccactttgtgaccatgtgcatcttcacctgcaccggccagcacgcctctgtgcacctgggccagctggactggtacagctgggtgcccaatgccccctgcaccatgaggctgcccccacccaccaccaaggatgccaccctggagaccgtgatggccaccctgcccaacttccaccaggccagcctgcagatgagcatcacctggcagctgggccggcggcagcctgtgatggtggccgtgggccagcacgaggaggagtacttcagcggccctgagcccaaggctgtgctgaagaagttccgggaggagctggccgccctggacaaggagattgagatcagaaatgccaagctggacatgccctatgagtacctgcggcccagcgtggtggagaacagcgtggccatctag

SEQ ID NO: 143971 - DNA, 2055 bp, synthetic construct
  misc_feature 1..2055: note = Description of Artificial Sequence: Synthetic coding sequence
  source 1..2055: mol_type = other DNA
atgctgaagagaaatgaaagccagtggctggcccagaggcggcgctctgagaccagcctgagcaagatgggcctgtaccgcatccgggtgtccactggagccagcctgtatgccggcagcaacaaccaggtgcagctgtggctggtgggccagcacggggaggccgccctgggcaagaggctgtggccagcccggggcaaggagacagagctgaaggtggaggtgcctgagtacctgggccccctgctgtttgtgaagctgaggaagaggcacctgctgaaggatgatgcctggttctgcaactggatctctgtgcagggccctggagctggagatgaggtgcgcttcccctgctaccgctgggtggagggcaatggagtgctgagcctgcctgagggcaccggccgcacagtgggggaggacccccagggcctcttccagaagcaccgggaggaggagctggaggagaggaggaagctgtaccgctggggcaactggaaggatggcctcatcctgaacatggccggggccaagctgtatgacctgcctgtggatgagcgcttcctggaggacaagagggtggactttgaggtgtccctggccaagggcctggccgacctggccatcaaggacagcctgaatgtgctgacctgctggaaggacctggatgacttcaaccgcatcttctggtgtggccagagcaagctggccgagcgggtgcgggacagctggaaggaggatgccctgtttggctaccagttcctgaatggagccaaccctgtggtgctgcggcgcagcgcccacctgcctgcccggctggtgttccccccaggcatggaggagctgcaggcccagctggagaaggagctggagggcggcaccctgtttgaggccgacttcagcctgctggatggcatcaaggccaacgtcatcctgtgcagccagcagcacctggccgcccccctggtgatgctgaagctgcagccagatggcaagctgctgcccatggtgatccagctgcagctgcccaggacaggcagccccccaccacccctcttcctgcccacagacccccccatggcctggctgctggccaagtgctgggtgcgcagcagtgacttccagctgcacgagctgcagagccacctgctgcggggccacctgatggccgaggtgattgtggtggccaccatgcgctgcctgcccagcatccaccccatcttcaagctgatcatcccccacctgcgctacaccctggagatcaacgtgcgggccaggacaggcctggtgtctgacatgggcatctttgaccagatcatgagcactggaggcggcggccacgtgcagctgctgaagcaggccggggccttcctgacctacagcagcttctgccccccagatgacctggccgaccggggcctgctgggcgtgaagagcagcttctacgcccaggatgccctgcggctgtgggagatcatctaccgctacgtggagggcatcgtgtccctgcactacaagacagatgtggccgtgaaggatgatcctgagctgcagacctggtgccgggagatcacagaaattggcctgcagggcgcccaggaccggggcttccctgtgtccctgcaggcccgggaccaggtgtgccactttgtgaccatgtgcatcttcacctgcaccggccagcacgcctctgtgcacctgggccagctggactggtacagctgggtgcccaatgccccctgcaccatgaggctgcccccacccaccaccaaggatgccaccctggagaccgtgatggccaccctgcccaacttccaccaggccagcctgcagatgagcatcacctggcagctgggccggcggcagcctgtgatggtggccgtgggccagcacgaggaggagtacttcagcggccctgagcccaaggctgtgctgaagaagttccgggaggagctggccgccctggacaaggagattgagatcagaaatgccaagctggacatgccctatgagtacctgcggcccagcgtggtggagaacagcgtggccatctag

SEQ ID NO: 143972 - DNA, 1989 bp, synthetic construct; identical to SEQ ID NO: 143970
  misc_feature 1..1989: note = Description of Artificial Sequence: Synthetic coding sequence
  source 1..1989: mol_type = other DNA

SEQ ID NO: 143973 - DNA, 486 bp, synthetic construct
  misc_feature 1..486: note = Description of Artificial Sequence: Synthetic coding sequence
  source 1..486: mol_type = other DNA
atggaccaggagaccgtgggcaatgtggtgctgctggccatcgtgaccctcatctctgtggtgcagaatggcttctttgcccacaaggtggagcacgagagcaggacccagaatggccgctccttccagaggacaggcaccctggcctttgagcgggtgtacacagccaaccagaactgtgtggatgcctaccccaccttcctggccgtgctgtggagcgctggcctgctgtgcagccaggtgcctgctgcctttgctggcctgatgtacctgtttgtgcggcagaagtactttgtgggctacctgggggagaggacccagagcaccccaggctacatctttgggaagaggatcatcctcttcctgttcctgatgtctgtggccggcatcttcaactactacctgatcttcttctttggaagtgactttgagaactacatcaagaccatcagcaccaccatcagccccctgctgctgatcccctag

SEQ ID NO: 143974 - DNA, 2532 bp, synthetic construct
  misc_feature 1..2532: note = Description of Artificial Sequence: Synthetic coding sequence
  source 1..2532: mol_type = other DNA
atgcccaggggggccttccggccctgcctgcctgccctgtactttgccttcctgacctgccccaccccagagcagaggatgagcggcacccaggccccagacatccacctgggggagcccgcccggggcaccggctgtgtgcggggcaagcagaccagcatccgggtgcaggactgtggcagaagagaggaggcccgggccgccagccgggagctgcggcgggagaaggcccaggagcacccccgggagagctgggcccacccccagccctacccagccccccagcccctggccctgcggcctgagacccagccctgcccagcctgccgcagcagccccccaggccgcctgctgctgcggcctgccctgcccggccaccccttcctgctgcccatcatggctgtgtaccgcctgtgtgtgaccaccggcccctacctgcgggccggcaccctggacaacatctctgtgaccctggtgggcacctgtggggagagccccaagcagaggctggacaggatgggccgggactttgcccctggctctgtgcagaagtacaaggtgcgctgcacagctgagctgggggagctgctgctgctgcgggtgcacaaggagagatatgccttcttcaggaaggacagctggtactgcagccgcatctgtgtgacagagccagatggctctgtgagccacttcccctgctaccagtggattgagggctactgcaccgtggagctgcggcctggaacagcccggaccatctgccaggacagcctgcccctgctgctggaccacaggacccgggagctgcgggcccggcaggagtgctaccgctggaagatctatgcccctggcttcccctgcatggtggatgtgaacagcttccaggagatggagagtgacaagaagtttgccctgaccaagaccaccacctgtgtggaccagggcgacagcagcggcaaccgctacctgcccggcttccccatgaagattgacatccccagcctgatgtacatggagcccaacgtgcgctacagcgccaccaagaccatcagcctgctcttcaatgccatcccagccagcctgggcatgaagctgcggggcctgctggacaggaagggctcctggaagaagctggatgacatgcagaacatcttctggtgccacaagaccttcaccaccaagtatgtgacagagcactggtgtgaggaccacttcttcggctaccagtacctgaatggagtgaaccctgtgatgctgcactgcatcagcagcctgcccagcaagctgcctgtgaccaatgacatggtggcccccctgctgggccaggacacctgcctgcagacagagctggagcggggcaacatcttcctggccgactactggatcctggccgaggcccccacccactgcctgaatggccggcagcagtatgtggccgcccccctgtgcctgctgtggctgagcccccagggcgccctggtgcccctggccatccagctgagccagaccccaggccctgacagccccatcttcctgcccacagacagcgagtgggactggctgctggccaagacctgggtgaggaacagcgagttcctggtgcatgagaacaacacccacttcctgtgcacccacctgctgtgtgaggcctttgccatggccaccctgcggcagctgcccctgtgccaccccatctacaagctgctgctgccccacacccgctacaccctgcaggtgaacaccatcgcccgggccaccctgctgaaccctgagggcctggtggaccaggtgaccagcatcggccggcagggcctcatctacctgatgagcacaggcctggcccacttcacctacaccaacttctgcctgcctgacagcctgcgggcccggggcgtgctggccatccccaactaccactacagagatgatggcctgaagatctgggccgccatcgagagctttgtgtctgagatcgtgggctactactaccccagtgatgcctctgtgcagcaggacagcgagctgcaggcctggacaggagagatctttgcccaggccttcctgggccgggagagcagcggcttccccagccggctgtgcaccccaggagagatggtgaagttcctgacagccatcatcttcaactgcagcgcccagcacgccgctgtgaacagcggccagcacgactttggagcctggatgcccaatgcccccagctccatgaggcagcccccaccccagaccaagggcaccaccaccctgaagacctacctggacaccctgcctgaggtgaacatcagctgcaacaacctgctgctcttctggctggtgtcccaggagcccaaggaccagaggcccctgggcacctacccagatgagcacttcacagaggaggcccccaggaggagcattgctgccttccagagccggctggcccagatcagccgggacatccaggagaggaaccagggcctggccctgccctacacctacctggacccccccctgattgagaacagcgtgtccatctag

SEQ ID NO: 143975 - DNA, 2604 bp, synthetic construct
  misc_feature 1..2604: note = Description of Artificial Sequence: Synthetic coding sequence
  source 1..2604: mol_type = other DNA
atgggcaggaacagatcctggggcaccctgggcagcggccgcaccagcaccccaggccaccagagcggccccctgacccggcggcgggctgtgtcccagctgtaccgccgctacctgctcttcagcatcagcgccagtgaccccagcctgcggagcggcacccaggccccagacatccacctgggggagcccgcccggggcaccggctgtgtgcggggcaagcagaccagcatccgggtgcaggactgtggcagaagagaggaggcccgggccgccagccgggagctgcggcgggagaaggcccaggagcacccccgggagagctgggcccacccccagccctacccagccccccagcccctggccctgcggcctgagacccagccctgcccagcctgccgcagcagccccccaggccgcctgctgctgcggcctgccctgcccggccaccccttcctgctgcccatcatggctgtgtaccgcctgtgtgtgaccaccggcccctacctgcgggccggcaccctggacaacatctctgtgaccctggtgggcacctgtggggagagccccaagcagaggctggacaggatgggccgggactttgcccctggctctgtgcagaagtacaaggtgcgctgcacagctgagctgggggagctgctgctgctgcgggtgcacaaggagagatatgccttcttcaggaaggacagctggtactgcagccgcatctgtgtgacagagccagatggctctgtgagccacttcccctgctaccagtggattgagggctactgcaccgtggagctgcggcctggaacagcccggaccatctgccaggacagcctgcccctgctgctggaccacaggacccgggagctgcgggcccggcaggagtgctaccgctggaagatctatgcccctggcttcccctgcatggtggatgtgaacagcttccaggagatggagagtgacaagaagtttgccctgaccaagaccaccacctgtgtggaccagggcgacagcagcggcaaccgctacctgcccggcttccccatgaagattgacatccccagcctgatgtacatggagcccaacgtgcgctacagcgccaccaagaccatcagcctgctcttcaatgccatcccagccagcctgggcatgaagctgcggggcctgctggacaggaagggctcctggaagaagctggatgacatgcagaacatcttctggtgccacaagaccttcaccaccaagtatgtgacagagcactggtgtgaggaccacttcttcggctaccagtacctgaatggagtgaaccctgtgatgctgcactgcatcagcagcctgcccagcaagctgcctgtgaccaatgacatggtggcccccctgctgggccaggacacctgcctgcagacagagctggagcggggcaacatcttcctggccgactactggatcctggccgaggcccccacccactgcctgaatggccggcagcagtatgtggccgcccccctgtgcctgctgtggctgagcccccagggcgccctggtgcccctggccatccagctgagccagaccccaggccctgacagccccatcttcctgcccacagacagcgagtgggactggctgctggccaagacctgggtgaggaacagcgagttcctggtgcatgagaacaacacccacttcctgtgcacccacctgctgtgtgaggcctttgccatggccaccctgcggcagctgcccctgtgccaccccatctacaagctgctgctgccccacacccgctacaccctgcaggtgaacaccatcgcccgggccaccctgctgaaccctgagggcctggtggaccaggtgaccagcatcggccggcagggcctcatctacctgatgagcacaggcctggcccacttcacctacaccaacttctgcctgcctgacagcctgcgggcccggggcgtgctggccatccccaactaccactacagagatgatggcctgaagatctgggccgccatcgagagctttgtgtctgagatcgtgggctactactaccccagtgatgcctctgtgcagcaggacagcgagctgcaggcctggacaggagagatctttgcccaggccttcctgggccgggagagcagcggcttccccagccggctgtgcaccccaggagagatggtgaagttcctgacagccatcatcttcaactgcagcgcccagcacgccgctgtgaacagcggccagcacgactttggagcctggatgcccaatgcccccagctccatgaggcagcccccaccccagaccaagggcaccaccaccctgaagacctacctggacaccctgcctgaggtgaacatcagctgcaacaacctgctgctcttctggctggtgtcccaggagcccaaggaccagaggcccctgggcacctacccagatgagcacttcacagaggaggcccccaggaggagcattgctgccttccagagccggctggcccagatcagccgggacatccaggagaggaaccagggcctggccctgccctacacctacctggacccccccctgattgagaacagcgtgtccatctag

SEQ ID NO: 143976 - DNA, 2136 bp, synthetic construct
  misc_feature 1..2136: note = Description of Artificial Sequence: Synthetic coding sequence
  source 1..2136: mol_type = other DNA
atggctgtgtaccgcctgtgtgtgaccaccggcccctacctgcgggccggcaccctggacaacatctctgtgaccctggtgggcacctgtggggagagccccaagcagaggctggacaggatgggccgggactttgcccctggctctgtgcagaagtacaaggtgcgctgcacagctgagctgggggagctgctgctgctgcgggtgcacaaggagagatatgccttcttcaggaaggacagctggtactgcagccgcatctgtgtgacagagccagatggctctgtgagccacttcccctgctaccagtggattgagggctactgcaccgtggagctgcggcctggaacagcccggaccatctgccaggacagcctgcccctgctgctggaccacaggacccgggagctgcgggcccggcaggagtgctaccgctggaagatctatgcccctggcttcccctgcatggtggatgtgaacagcttccaggagatggagagtgacaagaagtttgccctgaccaagaccaccacctgtgtggaccagggcgacagcagcggcaaccgctacctgcccggcttccccatgaagattgacatccccagcctgatgtacatggagcccaacgtgcgctacagcgccaccaagaccatcagcctgctcttcaatgccatcccagccagcctgggcatgaagctgcggggcctgctggacaggaagggctcctggaagaagctggatgacatgcagaacatcttctggtgccacaagaccttcaccaccaagtatgtgacagagcactggtgtgaggaccacttcttcggctaccagtacctgaatggagtgaaccctgtgatgctgcactgcatcagcagcctgcccagcaagctgcctgtgaccaatgacatggtggcccccctgctgggccaggacacctgcctgcagacagagctggagcggggcaacatcttcctggccgactactggatcctggccgaggcccccacccactgcctgaatggccggcagcagtatgtggccgcccccctgtgcctgctgtggctgagcccccagggcgccctggtgcccctggccatccagctgagccagaccccaggccctgacagccccatcttcctgcccacagacagcgagtgggactggctgctggccaagacctgggtgaggaacagcgagttcctggtgcatgagaacaacacccacttcctgtgcacccacctgctgtgtgaggcctttgccatggccaccctgcggcagctgcccctgtgccaccccatctacaagctgctgctgccccacacccgctacaccctgcaggtgaacaccatcgcccgggccaccctgctgaaccctgagggcctggtggaccaggtgaccagcatcggccggcagggcctcatctacctgatgagcacaggcctggcccacttcacctacaccaacttctgcctgcctgacagcctgcgggcccggggcgtgctggccatccccaactaccactacagagatgatggcctgaagatctgggccgccatcgagagctttgtgtctgagatcgtgggctactactaccccagtgatgcctctgtgcagcaggacagcgagctgcaggcctggacaggagagatctttgcccaggccttcctgggccgggagagcagcggcttccccagccggctgtgcaccccaggagagatggtgaagttcctgacagccatcatcttcaactgcagcgcccagcacgccgctgtgaacagcggccagcacgactttggagcctggatgcccaatgcccccagctccatgaggcagcccccaccccagaccaagggcaccaccaccctgaagacctacctggacaccctgcctgaggtgaacatcagctgcaacaacctgctgctcttctggctggtgtcccaggagcccaaggaccagaggcccctgggcacctacccagatgagcacttcacagaggaggcccccaggaggagcattgctgccttccagagccggctggcccagatcagccgggacatccaggagaggaaccagggcctggccctgccctacacctacctggacccccccctgattgagaacagcgtgtccatctag

SEQ ID NO: 143977 - DNA, 759 bp, synthetic construct
  misc_feature 1..759: note = Description of Artificial Sequence: Synthetic coding sequence
  source 1..759: mol_type = other DNA
atggagccccagagcatgaagggccagaagaggccctttggaggcccctggaggctgaaggtgctgggcggccccccctggctgcggaggaccctgcccaagctgggccggcccaaggaggcccctgtggccaggatgagcacccagagcacccaccccctgaagccagaggccccccggctgcccccaggcatccctgagagccccagctgccagaggaggcacaccctgcctgccagcgagttccgctgcctgaccccagaagatgctgtgtctgcctttgaaattgaaagagaggccttcatctctgtgctgggcgtgtgccccctgtacctggatgagatccgccacttcctgaccctgtgcccagagctgagcctgggctggtttgaggagggctgcctggtggccttcatcatcggcagcctgtgggacaaggagcggctgatgcaggagagcctgaccctgcacaggtctgggggccacatcgcccacctgcacgtgctggccgtgcaccgggccttccggcagcagggccggggccccatcctgctgtggagatacctgcaccacctgggcagccagcctgctgtgagaagagctgccctgatgtgtgaagatgccctggtgcccttctatgagcgcttctccttccacgctgtgggcccctgtgccatcaccgtgggcagcctgaccttcatggagctgcactgcagcctgcggggccaccccttcctgcggaggaacagcggctgctag

SEQ ID NO: 143978 - DNA, 624 bp, synthetic construct
  misc_feature 1..624: note = Description of Artificial Sequence: Synthetic coding sequence
  source 1..624: mol_type = other DNA
atgagcacccagagcacccaccccctgaagccagaggccccccggctgcccccaggcatccctgagagccccagctgccagaggaggcacaccctgcctgccagcgagttccgctgcctgaccccagaagatgctgtgtctgcctttgaaattgagcgggaggccttcatctctgtgctgggcgtgtgccccctgtacctggatgagatccgccacttcctgaccctgtgcccagagctgagcctgggctggtttgaggagggctgcctggtggccttcatcatcggcagcctgtgggacaaggagcggctgatgcaggagagcctgaccctgcacaggtctgggggccacatcgcccacctgcacgtgctggccgtgcaccgggccttccggcagcagggccggggccccatcctgctgtggagatacctgcaccacctgggcagccagcctgctgtgcggcgggccgccctgatgtgtgaagatgccctggtgcccttctatgagcgcttctccttccacgctgtgggcccctgtgccatcaccgtgggcagcctgaccttcatggagctgcactgcagcctgcggggccaccccttcctgcggagaaattctggctgctag

SEQ ID NO: 143979 - DNA, 1536 bp, synthetic construct
  misc_feature 1..1536: note = Description of Artificial Sequence: Synthetic coding sequence
  source 1..1536: mol_type = other DNA
atggtgctgctggccgctgctgtgtgcaccaaggccggcaaggccatcgtgtcccggcagtttgtggagatgaccaggaccagaattgagggcctgctggccgccttccccaagctgatgaacacaggcaagcagcacacctttgtggagacagaatctgtgcgctacgtgtaccagcccatggagaagctgtacatggtgctgatcaccaccaagaacagcaacatcctggaggacctggagaccctgcggctcttcagcagggtcatccctgagtactgccgggccctggaggagaatgagatcagcgagcactgctttgacctgatctttgcctttgatgagatcgtggccctgggctacagagaaaatgtgaacctggcccagatccgcaccttcacagagatggacagccatgaggagaaggtgttccgggctgtgcgggagacccaggagcgggaggccaaggccgagatgaggaggaaggccaaggagctgcagcaggccaggagagatgctgagcggcagggcaagaaggcccctggctttggaggcttcggcagcagcgctgtgtctgggggcagcacagctgccatgatcacagagaccatcattgaaacagacaagcccaaggtggccccagccccagcccggcccagcggccccagcaaggccctgaagctgggcgccaagggcaaggaggtggacaactttgtggacaagctgaagtctgagggggagaccatcatgagcagctccatgggcaagaggaccagcgaggccaccaagatgcacgccccacccatcaacatggagagcgtgcacatgaagattgaggagaagatcaccctgacctgtggcagagatggcggcctgcagaacatggagctgcacggcatgatcatgctgcgcatcagtgatgacaagtatggccgcatccggctgcacgtggagaatgaagacaagaagggcgtgcagctgcagacccaccccaacgtggacaagaagctgttcaccgctgagagcctcatcggcctgaagaaccctgagaagagcttccctgtgaacagtgatgtgggcgtgctgaagtggaggctgcagaccacagaggagagcttcatccccctgaccatcaactgctggcccagcgagagcggaaatggctgtgatgtgaacattgaatatgagctgcaggaggacaacctggagctgaatgatgtggtgatcaccatccccctgcccagcggcgtgggcgcccctgtgattggagaaattgatggagagtacagacatgacagcagaagaaacaccctggagtggtgcctgcctgtgattgatgccaagaacaagagcggcagcctggagttcagcattgctggccagcccaatgacttcttccctgtgcaggtgtcctttgtgtccaagaagaactactgcaacatccaggtgaccaaggtgacccaggtggatggcaacagccctgtgcgcttcagcacagagaccaccttcctggtggacaagtatgagatcctgtag

SEQ ID NO: 143980 - DNA, 1659 bp, synthetic construct
  misc_feature 1..1659: note = Description of Artificial Sequence: Synthetic coding sequence
  source 1..1659: mol_type = other DNA
atggccgagtgcaacctggtggccatcctgatcagcagcattgacaaccccctggacaagaacctggacaatggaggcaacagctgcctggacttccggcccctgaacagcttcagccagccccaggtgctgctggccgctgctgtgtgcaccaaggccggcaaggccatcgtgtcccggcagtttgtggagatgaccaggacccgcatcgagggcctgctggccgccttccccaagctgatgaacacaggcaagcagcacacctttgtggagacagagagcgtgcgctacgtgtaccagcccatggagaagctgtacatggtgctgatcaccaccaagaacagcaacatcctggaggacctggagaccctgcggctcttcagcagggtcatccctgagtactgccgggccctggaggagaatgagatcagcgagcactgctttgacctgatctttgcctttgatgaaattgtggccctgggctaccgggagaatgtgaacctggcccagatccgcaccttcacagagatggacagccatgaggagaaggtgttccgggctgtgcgggagacccaggagcgggaggccaaggccgagatgaggaggaaggccaaggagctgcagcaggccaggagagatgctgagcggcagggcaagaaggcccctggctttggaggcttcggcagcagcgctgtgtctgggggcagcacagctgccatgatcacagagaccatcatcgagacagacaagcccaaggtggccccagccccagcccggcccagcggccccagcaaggccctgaagctgggcgccaagggcaaggaggtggacaactttgtggacaagctgaagtctgagggggagaccatcatgagcagctccatgggcaagaggaccagcgaggccaccaagatgcacgccccacccatcaacatggagagcgtgcacatgaagattgaggagaagatcaccctgacctgtggcagagatggcggcctgcagaacatggagctgcacggcatgatcatgctgcgcatcagtgatgacaagtatggccgcatccggctgcacgtggagaatgaagacaagaagggcgtgcagctgcagacccaccccaacgtggacaagaagctgttcaccgctgagagcctgattggcctgaagaaccctgagaagagcttccctgtgaacagtgatgtgggcgtgctgaagtggaggctgcagaccacagaggagagcttcatccccctgaccatcaactgctggcccagcgagagcggaaatggctgtgatgtgaacatcgagtatgagctgcaggaggacaacctggagctgaatgatgtggtgatcaccatccccctgcccagcggcgtgggcgcccctgtgattggagaaattgatggagagtacagacatgacagcagaagaaacaccctggagtggtgcctgcctgtgattgatgccaagaacaagagcggcagcctggagttcagcattgctggccagcccaatgacttcttccctgtgcaggtgtcctttgtgtccaagaagaactactgcaacatccaggtgaccaaggtgacccaggtggatggcaacagccctgtgcgcttcagcacagagaccaccttcctggtggacaagtatgagatcctgtag

SEQ ID NO: 143981 - DNA, 1272 bp, synthetic construct
  misc_feature 1..1272: note = Description of Artificial Sequence: Synthetic coding sequence
  source 1..1272: mol_type = other DNA
atgatccctgagtactgccgggccctggaggagaatgagatcagcgagcactgctttgacctgatctttgcctttgatgagatcgtggccctgggctacagagaaaatgtgaacctggcccagatccgcaccttcacagagatggacagccatgaggagaaggtgttccgggctgtgcgggagacccaggagcgggaggccaaggccgagatgaggaggaaggccaaggagctgcagcaggccaggagagatgctgagcggcagggcaagaaggcccctggctttggaggcttcggcagcagcgctgtgtctgggggcagcacagctgccatgatcacagagaccatcattgaaacagacaagcccaaggtggccccagccccagcccggcccagcggccccagcaaggccctgaagctgggcgccaagggcaaggaggtggacaactttgtggacaagctgaagtctgagggggagaccatcatgagcagctccatgggcaagaggaccagcgaggccaccaagatgcacgccccacccatcaacatggagagcgtgcacatgaagattgaggagaagatcaccctgacctgtggcagagatggcggcctgcagaacatggagctgcacggcatgatcatgctgcgcatcagtgatgacaagtatggccgcatccggctgcacgtggagaatgaagacaagaagggcgtgcagctgcagacccaccccaacgtggacaagaagctgttcaccgctgagagcctcatcggcctgaagaaccctgagaagagcttccctgtgaacagtgatgtgggcgtgctgaagtggaggctgcagaccacagaggagagcttcatccccctgaccatcaactgctggcccagcgagagcggaaatggctgtgatgtgaacattgaatatgagctgcaggaggacaacctggagctgaatgatgtggtgatcaccatccccctgcccagcggcgtgggcgcccctgtgattggagaaattgatggagagtacagacatgacagcagaagaaacaccctggagtggtgcctgcctgtgattgatgccaagaacaagagcggcagcctggagttcagcattgctggccagcccaatgacttcttccctgtgcaggtgtcctttgtgtccaagaagaactactgcaacatccaggtgaccaaggtgacccaggtggatggcaacagccctgtgcgcttcagcacagagaccaccttcctggtggacaagtatgagatcctgtag

SEQ ID NO: 143982 - DNA, 570 bp, synthetic construct
  misc_feature 1..570: note = Description of Artificial Sequence: Synthetic coding sequence
  source 1..570: mol_type = other DNA
atggtgctgctggccgctgctgtgtgcaccaaggccggcaaggccatcgtgtcccggcagtttgtggagatgaccaggaccagaattgagggcctgctggccgccttccccaagctgatgaacacaggcaagcagcacacctttgtggagacagaatctgtgcgctacgtgtaccagcccatggagaagctgtacatggtgctgatcaccaccaagaacagcaacatcctggaggacctggagaccctgcggctcttcagcagggtcatccctgagtactgccgggccctggaggagaatgagatcagcgagcactgctttgacctgatctttgcctttgatgagatcgtggccctgggctacagagaaaatgtgaacctggcccagatccgcaccttcacagagatggacagccatgaggagaaggtgttccgggctgtgcgggagacccaggagcgggaggccaaggccgagatgaggaggaaggccaaggagctgcagcaggcccagagcgtgggcatcaccggcatgagccaccacgcccagctgctgctgtacttcaacccctag

SEQ ID NO: 143983 - DNA, 2223 bp, synthetic construct
  misc_feature 1..2223: note = Description of Artificial Sequence: Synthetic coding sequence
  source 1..2223: mol_type = other DNA
atgacagtgaagctggactttgaagaatgtctgaaggacagcccccgcttccgggccagcattgagctggtggaggccgaggtgtctgagctggagacccggctggagaagctgctgaagctgggcaccggcctgctggagagcggccgccactacctggccgccagccgggcctttgtggtgggcatctgtgacctggcccggctgggccccccagagcccatgatggccgagtgcctggagaagttcaccgtgtccctgaaccacaagctggacagccatgctgagctgctggatgccacccagcacaccctgcagcagcagatccagaccctggtgaaggagggcctgcggggcttccgggaggcccggcgggacttctggagaggagctgagagcctggaggccgccctgacccacaatgctgaggtgcccaggagaagagcccaggaggccgaggaggccggggccgccctgaggacagcccgggccggctaccggggccgggccctggactatgccctgcagatcaacgtgattgaggacaagaggaagtttgacatcatggagtttgtgctgcggctggtggaggcccaggccacccacttccagcagggccacgaggagctgagccggctgagccagtacaggaaggagctgggcgcccagctgcaccagctggtgctgaacagcgcccgggagaagagggacatggagcagagacatgtgctgctgaagcagaaggagctgggcggggaggagcctgagcccagcctgcgggagggccctgggggcctggtgatggagggccacctgttcaagagggccagcaatgccttcaagacctggagccgccgctggttcaccatccagagcaaccagctggtgtaccagaagaagtacaaggaccctgtgacagtggtggtggatgacctgcggctgtgcaccgtgaagctgtgcccagattctgaaagacgcttctgctttgaggtggtgtccaccagcaagagctgcctgctgcaggccgacagcgagcggctgctgcagctgtgggtgtctgctgtgcagagcagcatcgccagcgccttcagccaggcccggctggatgacagcccccggggccctggccagggcagcggccacctggccatcggcagcgctgccaccctgggcagcggcggcatggcccggggccgggagcctggaggagtgggccacgtggtggcccaggtgcagagcgtggatggaaatgcccagtgctgtgactgccgggagcccgcccctgagtgggccagcatcaacctgggcgtgaccctgtgcatccagtgcagcggcatccacaggagcctgggcgtgcacttcagcaaggtgcgcagcctgaccctggacagctgggagcctgagctggtgaagctgatgtgtgagctgggcaatgtcatcatcaaccagatctatgaggcccgggtggaggccatggctgtgaagaagccaggccccagctgcagccggcaggagaaggaggcctggattcatgccaagtatgtggagaagaagttcctgaccaagctgcctgagatccggggcagaagaggaggccggggccggccccggggccagccccctgtgccccccaagcccagcatccggccccggcccggcagcctgcggagcaagccagagcccccatctgaggacctgggcagcctgcaccctggggccctgctcttccgggccagcggccacccccccagcctgcccaccatggctgatgccctggcccacggggctgatgtgaactgggtgaatggaggccaggacaatgccacccccctcatccaggccacagctgccaacagcctgctggcctgtgagttcctgctgcagaatggagccaacgtgaaccaggccgacagcgctggccggggccccctgcaccacgccaccatcctgggccacacaggcctggcctgcctcttcctgaagagaggagctgacctgggcgcccgggacagcgagggccgggaccccctgaccatcgccatggagacagccaatgctgacatcgtgaccctgctgcggctggccaagatgagggaggccgaggccgcccagggccaggccggagatgagacctacctggacatcttccgggacttcagcctgatggccagtgatgatcctgagaagctgagccgccgcagccatgacctgcacaccctgtag

SEQ ID NO: 143984 - DNA, 2337 bp, synthetic construct
  misc_feature 1..2337: note = Description of Artificial Sequence: Synthetic coding sequence
  source 1..2337: mol_type = other DNA
atgaagatgacagtggactttgaagaatgtctgaaggacagcccccgcttccgggccgccctggaggaggtggagggagatgtggccgagctggagctgaagctggacaagctggtgaagctgtgcatcgccatgattgacaccgggaaggccttctgtgtggccaacaagcagttcatgaatggcatccgggacctggcccagtacagcagcaatgatgctgtggtggagaccagcctgaccaagttcagtgacagcctgcaggagatgatcaacttccacaccatcctgtttgaccagacccagaggagcatcaaggcccagctgcagaactttgtgaaggaggacctgaggaagttcaaggatgccaagaagcagtttgagaaggtgtctgaggagaaggaaaatgccctggtgaagaatgcccaggtgcagaggaacaagcagcacgaggtggaggaggccaccaacatcctgacagccaccaggaagtgcttccgccacatcgccctggactatgtgctgcagatcaacgtgctgcagagcaagagaagaagtgagatcctgaagtccatgctgtccttcatgtatgcccacctggccttcttccaccagggctatgacctcttcagcgagctgggcccctacatgaaggacctgggcgcccagctggaccggctggtggtggatgctgccaaggagaagcgggagatggagcagaagcacagcaccatccagcagaaggacttcagcagtgatgacagcaagctggagtacaacgtggatgctgccaatggaattgtgatggagggctacctgttcaagagggccagcaatgccttcaagacctggaacagacgctggttcagcatccagaacaaccagctggtgtaccagaagaagttcaaggacaaccccaccgtggtggtggaggacctgcggctgtgcaccgtgaagcactgtgaggacatcgagcggcgcttctgctttgaggtggtgagccccaccaagagctgcatgctgcaggccgacagcgagaagctgcggcaggcctggatcaaggctgtgcagaccagcatcgccacagcctaccgggagaagggagatgaaagtgagaagctggacaagaagagcagccccagcacaggcagcctggacagcggaaatgaaagcaaggagaagctgctgaagggggagagcgccctgcagagggtgcagtgcatccctggaaatgccagctgctgtgactgtggcctggccgacccccgctgggccagcatcaacctgggcatcaccctgtgcatcgagtgcagcggcatccacaggagcctgggcgtgcacttcagcaaggtgcgcagcctgaccctggacacctgggagcctgagctgctgaagctgatgtgtgagctgggcaatgatgtgatcaacagagtgtatgaggccaacgtggagaagatgggcatcaagaagccccagcccggccagaggcaggagaaggaggcctacatccgggccaagtatgtggagaggaagtttgtggacaagtacagcatcagcctgagccccccagagcagcagaagaagtttgtgtccaagagcagcgaggagaagaggctgagcatcagcaagtttggacctggggaccaggtgcgggccagcgcccagagctctgtgcgcagcaatgattctggcatccagcagagcagtgatgatggccgggagagcctgcccagcacagtgtctgccaacagcctgtatgagcctgagggggagcggcaggacagctccatgttcctggacagcaagcacctgaaccctggcctgcagctgtaccgggccagctatgagaagaacctgcccaagatggccgaggccctggcccacggggctgatgtgaactgggccaacagcgaggagaacaaggccacccccctcatccaggccgtgctgggcggcagcctggtgacctgtgagttcctgctgcagaatggagccaacgtgaaccagagagatgtgcagggccggggccccctgcaccacgccaccgtgctgggccacacaggccaggtgtgcctcttcctgaagagaggagccaaccagcacgccacagatgaggagggcaaggaccccctgagcattgctgtggaggccgccaatgctgacatcgtgaccctgctgcggctggccaggatgaatgaggagatgagggagagcgagggcctgtatggccagcctggagatgagacctaccaggacatcttccgggacttcagccagatggccagcaacaaccctgagaagctgaaccgcttccagcaggacagccagaagttctag

SEQ ID NO: 143985 - DNA, 3618 bp, synthetic construct
  misc_feature 1..3618: note = Description of Artificial Sequence: Synthetic coding sequence
  source 1..3618: mol_type = other DNA
atgaccaagaaggaggagcccccacccagccgggtgcccagggctgtgcgggtggccagcctgctgtctgagggggaggagctgtctggagatgaccagggagatgaggaggaggatgaccacgcctatgaaggagtgcccaacggcggctggcacaccagcagcctgagcctgagcctgcccagcaccatcgccgccccccaccccatggatggccccccaggcggcagcacccctgtgacccctgtgatcaaggccggctggctggacaagaaccccccccagggcagctacatctaccagaagcgctgggtgcggctggacacagaccacctgcgctactttgacagcaacaaggatgcctacagcaagcgcttcatctctgtggcctgcatcagccacgtggccgccatcggggaccagaagtttgaagtcatcaccaacaacagaacatttgccttccgggcagagagtgatgtggagaggaaggagtggatgcaggccctgcagcaggccatggccgagcagagggcccgggcccggctgagcagcgcctacctgctgggcgtgcccggcagcgagcagcctgacagagctggcagcctggagctgcggggcttcaagaacaagctgtatgtggccgtggtgggggacaaggtgcagctgtacaagaacctggaggagtaccacctgggcatcggcatcaccttcatcgacatgtctgtgggcaatgtgaaggaggtggaccggcgcagctttgacctgaccaccccctaccgcatcttctccttctctgctgacagcgagctggagaaggagcagtggctggaggccatgcagggcgccatcgccgaggccctgagcaccagcgaggtggccgagcgcatctgggccgccgcccccaaccgcttctgtgccgactgtggggccccccagcctgactgggccagcatcaacctgtgtgtggtgatctgcaagagatgtgccggggagcaccggggcctgggcgccggcgtgtccaaggtgcgcagcctgaagatggacaggaaggtgtggacagagaccctgattgagctgttcctgcagctgggcaatggagctggcaaccgcttctgggccgccaacgtgcccccatctgaggccctgcagcccagcagcagccccagcacccggcgctgccacctggaggccaagtaccgggagggcaagtaccgccgctaccaccccctgtttggaaaccaggaggagctggacaaggccctgtgtgccgctgtgaccaccacagacctggccgagacccaggccctgctgggctgtggggccggcatcaactgcttcagcggggaccctgaggcccccacccccctggccctggccgagcaggccggccagaccctgcagatggagttcctgaggaacaacagaaccacagaggtgccccggctggacagcatgaagcccctggagaagcactacagcgtggtgctgcccaccgtgagccacagcggcttcctgtacaagacagccagcgctgggaagctgctgcaggaccggcgggcccgggaggagttcagccgccgctggtgtgtgctgggagatggagtgctgagctactttgaaaatgaaagagctgtgacccccaacggggagatccgggccagcgagatcgtgtgcctggccgtgcccccaccagacacccacggctttgagcacacctttgaggtgtacacagaaggagagcggctgtacctgtttggcctggagagcgctgagcaggcccacgagtgggtgaagtgcatcgccaaggcctttgtgccccccctggccgaggacctgctggcccgggactttgagcggctgggccgcctgccctacaaggccggcctgagcctgcagagggcccaggagggctggttcagcctgagcggcagcgagctgcgggctgtgtttcctgagggcccctgtgaggagcccctgcagctgaggaagctgcaggagctgagcatccagggcgacagcgagaaccaggtgctggtgctggtggagaggaggaggaccctgtacatccagggcgagcggcggctggacttcatgggctggctgggcgccatccagaaggccgccgcctccatgggagacaccctgtctgagcagcagctgggggacagcgacatccctgtgattgtgtaccgctgtgtggactacatcacccagtgtggcctgaccagcgagggcatctacagaaaatgtggccagaccagcaagacccagaggctgctggagagcctgcggcaggatgcccggtctgtgcacctgaaggagggggagcagcacgtggatgatgtgagcagcgccctgaagcgcttcctgcgggacctgcctgatggcctcttcacccgggcccagaggctgacctggctggaggccagcgagattgaagatgaggaggagaaggtgagccgctaccgggagctgctggtgcggctgccccctgtgaacagagccaccgtgaaggccctgatcagccacctgtactgtgtgcagtgcttcagtgacaccaaccagatgaatgtgcacaacctggccatcgtgtttggccccaccctcttccagacagatggccaggactacaaggccggccgggtggtggaggacctgatcaaccactacgtggtggtgttttctgtggatgaggaggagctgaggaagcagcgggaggagatcacagccatcgtgaagatgagggtggccggcacagccagcggcacccagcacgccggggacttcatctgcaccgtgtacctggaggagaagaaggccgagacagagcagcacatcaaggtgcctgcctccatgacagctgaggagctgaccctggagatcctggacagaagaaatgtgggcatccgggagaaggactactggacctgctttgaggtgaatgaaagagaggaggccgagcggcccctgcactttgctgagaaggtgctgcccatcctgcacggcctgggcacagacagccacctggtggtgaagaagcaccaggccatggaggccatgctgctgtacctggccagccgggtgggggacaccaagcacggcatgatgaagttccgggaggacaggagcctgctgggcctgggcctgcccagcggcggcttccatgaccgctacttcatcctgaacagcagctgcctgcggctgtacaaggaggtgcgcagccagaggccctggagcggggcccctgagaccagccacaggcctgagaaggagtggcccatcaagagcctgaaggtgtacctgggcgtgaagaagaagctgcggccccccacctgctggggcttcaccgtggtgcatgaaacagagaagcatgagaagcagcagtggtacctgtgctgtgacacccagatggagctgcgggagtggtttgccaccttcctgtttgtgcagcatgatggcctggtgtggcccagcgagcccagccgggtgtccagagctgtgcctgaggtgcggctgggctctgtgtccctcatccccctgcggggctctgaaaatgagatgagaagatctgtggccgccttcaccgctgaccccctgagcctgctgagaaatgtgtag

SEQ ID NO: 143986 - DNA, 1884 bp, synthetic construct
  misc_feature 1..1884: note = Description of Artificial Sequence: Synthetic coding sequence
  source 1..1884: mol_type = other DNA
aaatgctgggccgtgtgggtgggcgctgtgtggacagagggcgcctggcagccccgggtgggcgtcatctgtggcctgaagggccgcatgaccctgagcggcagccggggccaggaggagcccccacccagccgggtgcccagggctgtgcgggtggccagcctgctgtctgagggggaggagctgtctggagatgaccagggagatgaggaggaggatgaccacgcctatgaaggagtgcccaacggcggctggcacaccagcagcctgagcctgagcctgcccagcaccatcgccgccccccaccccatggatggccccccaggcggcagcacccctgtgacccctgtgatcaaggccggctggctggacaagaaccccccccagggcagctacatctaccagaagcgctgggtgcggctggacacagaccacctgcgctactttgacagcaacaaggatgcctacagcaagcgcttcatctctgtggcctgcatcagccacgtggccgccatcggggaccagaagtttgaagtcatcaccaacaacagaacatttgccttccgggcagagagtgatgtggagaggaaggagtggatgcaggccctgcagcaggccatggccgagcagagggcccgggcccggctgagcagcgcctacctgctgggcgtgcccggcagcgagcagcctgacagagctggcagcctggagctgcggggcttcaagaacaagctgtatgtggccgtggtgggggacaaggtgcagctgtacaagaacctggaggagtaccacctgggcatcggcatcaccttcatcgacatgtctgtgggcaatgtgaaggaggtggaccggcgcagctttgacctgaccaccccctaccgcatcttctccttctctgctgacagcgagctggagaaggagcagtggctggaggccatgcagggcgccatcgccgaggccctgagcaccagcgaggtggccgagcgcatctgggccgccgcccccaaccgcttctgtgccgactgtggggccccccagcctgactgggccagcatcaacctgtgtgtggtgatctgcaagagatgtgccggggagcaccggggcctgggcgccggcgtgtccaaggtgcgcagcctgaagatggacaggaaggtgtggacagagaccctgattgagctgttcctgcagctgggcaatggagctggcaaccgcttctgggccgccaacgtgcccccatctgaggccctgcagcccagcagcagccccagcacccggcgctgccacctggaggccaagtaccgggagggcaagtaccgccgctaccaccccctgtttggaaaccaggaggagctggacaaggccctgtgtgccgctgtgaccaccacagacctggccgagacccaggccctgctgggctgtggggccggcatcaactgcttcagcggggaccctgaggcccccacccccctggccctggccgagcaggccggccagaccctgcagatggagttcctgaggaacaacagaaccacagaggtgccccggctggacagcatgaagcccctggagaagcactacagcgtggtgctgcccaccgtgagccacagcggcttcctgtacaagacagccagcgctgggaagctgctgcaggaccggcgggcccgggaggagttcagccgccgctggtgtgtgctgggagatggagtgctgagctactttgaaaatgaaagagctgtgacccccaacggggagatccgggccagcgagatcgtgtgcctggccgtgcccccaccagacacccacggctttgagcacacctttgaggtgtacacagaaggagagcggctgtacctgtgggccggggagtgtggggccggcagctag

SEQ ID NO: 143987 - DNA, 4320 bp, synthetic construct
  misc_feature 1..4320: note = Description of Artificial Sequence: Synthetic coding sequence
  source 1..4320: mol_type = other DNA
atggccgaggccggagatgctgccctgtctgtggccgagtggctgcgggccctgcacctggagcagtacacaggcctgtttgagcagcacggcctggtgtgggccacagagtgccagggcctgagtgacacccggctgatggacatgggcatgctgctgcccggccacagaagacgcatcctggccggcctgctgcgggcccacaccagccctgccccagccccccggcccacccccaggcctgtgcccatgaagaggcacatcttccgcagcccccctgtgcctgccaccccacctgagcccctgcccaccaccacagaagatgagggcctgcctgctgccccacccatccccccccggcgcagctgcctgccccccacctgcttcaccacccccagcacagctgccccagaccctgtgctgccccccctgcctgccaagaggcacctggccgagctgtctgtgccccctgtgccccccaggacaggccccccccggctgctggtgtccctgcccaccaaggaggaggagagcctgctgcccagcctgagcagccccccccagccccagagcgaggagcccctgagcaccctgccccagggccccccccagccccccagccccccaccctgccccccagagatcccccccaagcctgtgcggctcttccctgagtttgatgacagcgactatgatgaggtgcctgaggagggccctggggccccagcccgggtgatgaccaagaaggaggagcccccacccagccgggtgcccagggctgtgcgggtggccagcctgctgtctgagggggaggagctgtctggagatgaccagggagatgaggaggaggatgaccacgcctatgagggcgtgcccaatggaggctggcacaccagcagcctgagcctgagcctgcccagcaccatcgccgccccccaccccatggatggccccccaggcggcagcacccctgtgacccctgtgatcaaggccggctggctggacaagaaccccccccagggcagctacatctaccagaagcgctgggtgcggctggacacagaccacctgcgctactttgacagcaacaaggatgcctacagcaagcgcttcatctctgtggcctgcatcagccacgtggccgccatcggggaccagaagtttgaggtgatcaccaacaacagaacatttgccttccgggcagagagtgatgtggagaggaaggagtggatgcaggccctgcagcaggccatggccgagcagagggcccgggcccggctgagcagcgcctacctgctgggcgtgcccggcagcgagcagcctgaccgggccggcagcctggagctgcggggcttcaagaacaagctgtatgtggccgtggtgggggacaaggtgcagctgtacaagaacctggaggagtaccacctgggcatcggcatcaccttcatcgacatgtctgtgggcaatgtgaaggaggtggacagaagaagctttgacctgaccaccccctaccgcatcttctccttctctgctgacagcgagctggagaaggagcagtggctggaggccatgcagggcgccatcgccgaggccctgagcaccagcgaggtggccgagcgcatctgggccgccgcccccaaccgcttctgtgccgactgtggggccccccagcctgactgggccagcatcaacctgtgtgtggtgatctgcaagagatgtgccggggagcaccggggcctgggcgctggggtgtccaaggtgcgcagcctgaagatggacaggaaggtgtggacagagaccctcatcgagctgttcctgcagctgggcaatggagctggcaaccgcttctgggccgccaacgtgccccccagcgaggccctgcagcccagcagcagccccagcacccggcgctgccacctggaggccaagtaccgggagggcaagtaccgccgctaccaccccctgtttggaaaccaggaggagctggacaaggccctgtgtgccgctgtgaccaccacagacctggccgagacccaggccctgctgggctgtggggccggcatcaactgcttcagcggggaccctgaggcccccacccccctggccctggccgagcaggccggccagaccctgcagatggagttcctgaggaacaacagaaccacagaggtgccccggctggacagcatgaagcccctggagaagcactacagcgtggtgctgcccaccgtgagccacagcggcttcctgtacaagacagccagcgctgggaagctgctgcaggacagaagagcccgggaggagttcagccgccgctggtgtgtgctgggagatggagtgctgagctactttgaaaatgaaagagctgtgaccccaaatggagagatccgggccagcgagatcgtgtgcctggccgtgcccccaccagacacccacggctttgagcacacctttgaggtgtacacagaaggagagcggctgtacctgtttggcctggagagcgctgagcaggcccacgagtgggtgaagtgcatcgccaaggcctttgtgccccccctggccgaggacctgctggcccgggactttgagcggctgggccgcctgccctacaaggccggcctgagcctgcagagggcccaggagggctggttcagcctgagcggcagcgagctgcgggctgtgtttcctgagggcccctgtgaggagcccctgcagctgaggaagctgcaggagctgagcatccagggcgacagcgagaaccaggtgctggtgctggtggagaggaggaggaccctgtacatccagggcgagcggcggctggacttcatgggctggctgggcgccatccagaaggctgctgcctccatgggagacaccctgtctgagcagcagctgggggacagcgacatccctgtgattgtgtaccgctgtgtggactacatcacccagtgtggcctgaccagcgagggcatctacagaaaatgtggccagaccagcaagacccagaggctgctggagagcctgcggcaggatgcccggtctgtgcacctgaaggagggggagcagcacgtggatgatgtgtcctctgccctgaagcgcttcctgcgggacctgcctgatggcctcttcacccgggcccagaggctgacctggctggaggccagcgagattgaagatgaggaggagaaggtgagccgctaccgggagctgctggtgcggctgccccctgtgaacagagccaccgtgaaggccctgatcagccacctgtactgtgtgcagtgcttcagtgacaccaaccagatgaatgtgcacaacctggccatcgtgtttggccccaccctcttccagacagatggccaggactacaaggccggccgggtggtggaggacctgatcaaccactacgtggtggtgttttctgtggatgaggaggagctgaggaagcagcgggaggagatcacagccatcgtgaagatgagggtggccggcacagccagcggcacccagcacgccggggacttcatctgcaccgtgtacctggaggagaagaaggccgagacagagcagcacatcaaggtgcctgcctccatgacagctgaggagctgaccctggagatcctggacagaagaaatgtgggcatccgggagaaggactactggacctgctttgaggtgaatgaaagagaggaggccgagcggcccctgcactttgctgagaaggtgctgcccatcctgcacggcctgggcacagacagccacctggtggtgaagaagcaccaggccatggaggccatgctgctgtacctggccagccgggtgggggacaccaagcacggcatgatgaagttcagagaagatagaagcctgctgggcctgggcctgcccagcggcggcttccatgaccgctacttcatcctgaacagcagctgcctgcggctgtacaaggaggtgcgcagccacaggcctgagaaggagtggcccatcaagagcctgaaggtgtacctgggcgtgaagaagaagctgcggccccccacctgctggggcttcaccgtggtgcatgaaacagagaagcatgagaagcagcagtggtacctgtgctgtgacacccagatggagctgcgggagtggtttgccaccttcctgtttgtgcagcatgatggcctggtgtggcccagcgagcccagccgggtgtccagagctgtgcctgaggtgcggctgggctctgtgtccctcatccccctgcggggctctgaaaatgagatgagaagatctgtggccgccttcaccgctgaccccctgagcctgctgagaaatgtgtag

SEQ ID NO: 143988 - DNA, 3633 bp, synthetic construct
  misc_feature 1..3633: note = Description of Artificial Sequence: Synthetic coding sequence
  source 1..3633: mol_type = other DNA
atgaccctgagcggcagccggggccaggaggagcccccacccagccgggtgcccagggctgtgcgggtggccagcctgctgtctgagggggaggagctgtctggagatgaccagggagatgaggaggaggatgaccacgcctatgagggcgtgcccaatggaggctggcacaccagcagcctgagcctgagcctgcccagcaccatcgccgccccccaccccatggatggccccccaggcggcagcacccctgtgacccctgtgatcaaggccggctggctggacaagaaccccccccagggcagctacatctaccagaagcgctgggtgcggctggacacagaccacctgcgctactttgacagcaacaaggatgcctacagcaagcgcttcatctctgtggcctgcatcagccacgtggccgccatcggggaccagaagtttgaggtgatcaccaacaacagaacatttgccttccgggcagagagtgatgtggagaggaaggagtggatgcaggccctgcagcaggccatggccgagcagagggcccgggcccggctgagcagcgcctacctgctgggcgtgcccggcagcgagcagcctgaccgggccggcagcctggagctgcggggcttcaagaacaagctgtatgtggccgtggtgggggacaaggtgcagctgtacaagaacctggaggagtaccacctgggcatcggcatcaccttcatcgacatgtctgtgggcaatgtgaaggaggtggacagaagaagctttgacctgaccaccccctaccgcatcttctccttctctgctgacagcgagctggagaaggagcagtggctggaggccatgcagggcgccatcgccgaggccctgagcaccagcgaggtggccgagcgcatctgggccgccgcccccaaccgcttctgtgccgactgtggggccccccagcctgactgggccagcatcaacctgtgtgtggtgatctgcaagagatgtgccggggagcaccggggcctgggcgctggggtgtccaaggtgcgcagcctgaagatggacaggaaggtgtggacagagaccctcatcgagctgttcctgcagctgggcaatggagctggcaaccgcttctgggccgccaacgtgccccccagcgaggccctgcagcccagcagcagccccagcacccggcgctgccacctggaggccaagtaccgggagggcaagtaccgccgctaccaccccctgtttggaaaccaggaggagctggacaaggccctgtgtgccgctgtgaccaccacagacctggccgagacccaggccctgctgggctgtggggccggcatcaactgcttcagcggggaccctgaggcccccacccccctggccctggccgagcaggccggccagaccctgcagatggagttcctgaggaacaacagaaccacagaggtgccccggctggacagcatgaagcccctggagaagcactacagcgtggtgctgcccaccgtgagccacagcggcttcctgtacaagacagccagcgctgggaagctgctgcaggacagaagagcccgggaggagttcagccgccgctggtgtgtgctgggagatggagtgctgagctactttgaaaatgaaagagctgtgaccccaaatggagagatccgggccagcgagatcgtgtgcctggccgtgcccccaccagacacccacggctttgagcacacctttgaggtgtacacagaaggagagcggctgtacctgtttggcctggagagcgctgagcaggcccacgagtgggtgaagtgcatcgccaaggcctttgtgccccccctggccgaggacctgctggcccgggactttgagcggctgggccgcctgccctacaaggccggcctgagcctgcagagggcccaggagggctggttcagcctgagcggcagcgagctgcgggctgtgtttcctgagggcccctgtgaggagcccctgcagctgaggaagctgcaggagctgagcatccagggcgacagcgagaaccaggtgctggtgctggtggagaggaggaggaccctgtacatccagggcgagcggcggctggacttcatgggctggctgggcgccatccagaaggctgctgcctccatgggagacaccctgtctgagcagcagctgggggacagcgacatccctgtgattgtgtaccgctgtgtggactacatcacccagtgtggcctgaccagcgagggcatctacagaaaatgtggccagaccagcaagacccagaggctgctggagagcctgcggcaggatgcccggtctgtgcacctgaaggagggggagcagcacgtggatgatgtgtcctctgccctgaagcgcttcctgcgggacctgcctgatggcctcttcacccgggcccagaggctgacctggctggaggccagcgagattgaagatgaggaggagaaggtgagccgctaccgggagctgctggtgcggctgccccctgtgaacagagccaccgtgaaggccctgatcagccacctgtactgtgtgcagtgcttcagtgacaccaaccagatgaatgtgcacaacctggccatcgtgtttggccccaccctcttccagacagatggccaggactacaaggccggccgggtggtggaggacctgatcaaccactacgtggtggtgttttctgtggatgaggaggagctgaggaagcagcgggaggagatcacagccatcgtgaagatgagggtggccggcacagccagcggcacccagcacgccggggacttcatctgcaccgtgtacctggaggagaagaaggccgagacagagcagcacatcaaggtgcctgcctccatgacagctgaggagctgaccctggagatcctggacagaagaaatgtgggcatccgggagaaggactactggacctgctttgaggtgaatgaaagagaggaggccgagcggcccctgcactttgctgagaaggtgctgcccatcctgcacggcctgggcacagacagccacctggtggtgaagaagcaccaggccatggaggccatgctgctgtacctggccagccgggtgggggacaccaagcacggcatgatgaagttcagagaagatagaagcctgctgggcctgggcctgcccagcggcggcttccatgaccgctacttcatcctgaacagcagctgcctgcggctgtacaaggaggtgcgcagccagaggccctggagcggggcccctgagaccagccacaggcctgagaaggagtggcccatcaagagcctgaaggtgtacctgggcgtgaagaagaagctgcggccccccacctgctggggcttcaccgtggtgcatgaaacagagaagcatgagaagcagcagtggtacctgtgctgtgacacccagatggagctgcgggagtggtttgccaccttcctgtttgtgcagcatgatggcctggtgtggcccagcgagcccagccgggtgtccagagctgtgcctgaggtgcggctgggctctgtgtccctcatccccctgcggggctctgaaaatgagatgagaagatctgtggccgccttcaccgctgaccccctgagcctgctgagaaatgtgtag

SEQ ID NO: 143989 - DNA, 4353 bp, synthetic construct
  misc_feature 1..4353: note = Description of Artificial Sequence: Synthetic coding sequence
  source 1..4353: mol_type = other DNA
atggccgaggccggagatgctgccctgtctgtggccgagtggctgcgggccctgcacctggagcagtacacaggcctgtttgagcagcacggcctggtgtgggccacagagtgccagggcctgagtgacacccggctgatggacatgggcatgctgctgcccggccacagaagacgcatcctggccggcctgctgcgggcccacaccagccctgccccagccccccggcccacccccaggcctgtgcccatgaagaggcacatcttccgcagcccccctgtgcctgccaccccacctgagcccctgcccaccaccacagaagatgagggcctgcctgctgccccacccatccccccccggcgcagctgcctgccccccacctgcttcaccacccccagcacagctgccccagaccctgtgctgccccccctgcctgccaagaggcacctggccgagctgtctgtgccccctgtgccccccaggacaggccccccccggctgctggtgtccctgcccaccaaggaggaggagagcctgctgcccagcctgagcagccccccccagccccagagcgaggagcccctgagcaccctgccccagggccccccccagccccccagccccccaccctgccccccagagatcccccccaagcctgtgcggctcttccctgagtttgatgacagcgactatgatgaggtgcctgaggagggccctggggccccagcccgggtgatgaccaagaaggaggagcccccacccagccgggtgcccagggctgtgcgggtggccagcctgctgtctgagggggaggagctgtctggagatgaccagggagatgaggaggaggatgaccacgcctatgagggcgtgcccaatggaggctggcacaccagcagcctgagcctgagcctgcccagcaccatcgccgccccccaccccatggatggccccccaggcggcagcacccctgtgacccctgtgatcaaggccggctggctggacaagaaccccccccagggcagctacatctaccagaagcgctgggtgcggctggacacagaccacctgcgctactttgacagcaacaaggatgcctacagcaagcgcttcatctctgtggcctgcatcagccacgtggccgccatcggggaccagaagtttgaggtgatcaccaacaacagaacatttgccttccgggcagagagtgatgtggagaggaaggagtggatgcaggccctgcagcaggccatggccgagcagagggcccgggcccggctgagcagcgcctacctgctgggcgtgcccggcagcgagcagcctgaccgggccggcagcctggagctgcggggcttcaagaacaagctgtatgtggccgtggtgggggacaaggtgcagctgtacaagaacctggaggagtaccacctgggcatcggcatcaccttcatcgacatgtctgtgggcaatgtgaaggaggtggacagaagaagctttgacctgaccaccccctaccgcatcttctccttctctgctgacagcgagctggagaaggagcagtggctggaggccatgcagggcgccatcgccgaggccctgagcaccagcgaggtggccgagcgcatctgggccgccgcccccaaccgcttctgtgccgactgtggggccccccagcctgactgggccagcatcaacctgtgtgtggtgatctgcaagagatgtgccggggagcaccggggcctgggcgctggggtgtccaaggtgcgcagcctgaagatggacaggaaggtgtggacagagaccctcatcgagctgttcctgcagctgggcaatggagctggcaaccgcttctgggccgccaacgtgccccccagcgaggccctgcagcccagcagcagccccagcacccggcgctgccacctggaggccaagtaccgggagggcaagtaccgccgctaccaccccctgtttggaaaccaggaggagctggacaaggccctgtgtgccgctgtgaccaccacagacctggccgagacccaggccctgctgggctgtggggccggcatcaactgcttcagcggggaccctgaggcccccacccccctggccctggccgagcaggccggccagaccctgcagatggagttcctgaggaacaacagaaccacagaggtgccccggctggacagcatgaagcccctggagaagcactacagcgtggtgctgcccaccgtgagccacagcggcttcctgtacaagacagccagcgctgggaagctgctgcaggacagaagagcccgggaggagttcagccgccgctggtgtgtgctgggagatggagtgctgagctactttgaaaatgaaagagctgtgaccccaaatggagagatccgggccagcgagatcgtgtgcctggccgtgcccccaccagacacccacggctttgagcacacctttgaggtgtacacagaaggagagcggctgtacctgtttggcctggagagcgctgagcaggcccacgagtgggtgaagtgcatcgccaaggcctttgtgccccccctggccgaggacctgctggcccgggactttgagcggctgggccgcctgccctacaaggccggcctgagcctgcagagggcccaggagggctggttcagcctgagcggcagcgagctgcgggctgtgtttcctgagggcccctgtgaggagcccctgcagctgaggaagctgcaggagctgagcatccagggcgacagcgagaaccaggtgctggtgctggtggagaggaggaggaccctgtacatccagggcgagcggcggctggacttcatgggctggctgggcgccatccagaaggctgctgcctccatgggagacaccctgtctgagcagcagctgggggacagcgacatccctgtgattgtgtaccgctgtgtggactacatcacccagtgtggcctgaccagcgagggcatctacagaaaatgtggccagaccagcaagacccagaggctgctggagagcctgcggcaggatgcccggtctgtgcacctgaaggagggggagcagcacgtggatgatgtgtcctctgccctgaagcgcttcctgcgggacctgcctgatggcctcttcacccgggcccagaggctgacctggctggaggccagcgagattgaagatgaggaggagaaggtgagccgctaccgggagctgctggtgcggctgccccctgtgaacagagccaccgtgaaggccctgatcagccacctgtactgtgtgcagtgcttcagtgacaccaaccagatgaatgtgcacaacctggccatcgtgtttggccccaccctcttccagacagatggccaggactacaaggccggccgggtggtggaggacctgatcaaccactacgtggtggtgttttctgtggatgaggaggagctgaggaagcagcgggaggagatcacagccatcgtgaagatgagggtggccggcacagccagcggcacccagcacgccggggacttcatctgcaccgtgtacctggaggagaagaaggccgagacagagcagcacatcaaggtgcctgcctccatgacagctgaggagctgaccctggagatcctggacagaagaaatgtgggcatccgggagaaggactactggacctgctttgaggtgaatgaaagagaggaggccgagcggcccctgcactttgctgagaaggtgctgcccatcctgcacggcctgggcacagacagccacctggtggtgaagaagcaccaggccatggaggccatgctgctgtacctggccagccgggtgggggacaccaagcacggcatgatgaagttcagagaagatagaagcctgctgggcctgggcctgcccagcggcggcttccatgaccgctacttcatcctgaacagcagctgcctgcggctgtacaaggaggtgcgcagccagaggccctggagcggggcccctgagaccagccacaggcctgagaaggagtggcccatcaagagcctgaaggtgtacctgggcgtgaagaagaagctgcggccccccacctgctggggcttcaccgtggtgcatgaaacagagaagcatgagaagcagcagtggtacctgtgctgtgacacccagatggagctgcgggagtggtttgccaccttcctgtttgtgcagcatgatggcctggtgtggcccagcgagcccagccgggtgtccagagctgtgcctgaggtgcggctgggctctgtgtccctcatccccctgcggggctctgaaaatgagatgagaagatctgtggccgccttcaccgctgaccccctgagcctgctgagaaatgtgtag

SEQ ID NO: 143990 - DNA, 3402 bp, synthetic construct
  misc_feature 1..3402: note = Description of Artificial Sequence: Synthetic coding sequence
  source 1..3402: mol_type = other DNA
atgaccaagaaggaggagcccccacccagccgggtgcccagggctgtgcgggtggccagcctgctgtctgagggggaggagctgtctggagatgaccagggagatgaggaggaggatgaccacgcctatgaaggagtgcccaacggcggctggcacaccagcagcctgagcctgagcctgcccagcaccatcgccgccccccaccccatggatggccccccaggcggcagcacccctgtgacccctgtgatcaaggccggctggctggacaagaaccccccccagggcagctacatctaccagaagcgctgggtgcggctggacacagaccacctgcgctactttgacagcaacaaggatgcctacagcaagcgcttcatctctgtggcctgcatcagccacgtggccgccatcggggaccagaagtttgaagtcatcaccaacaacagaacatttgccttccgggcagagagtgatgtggagaggaaggagtggatgcaggccctgcagcaggccatggccgagcagagggcccgggcccggctgagcagcgcctacctgctgggcgtgcccggcagcgagcagcctgacagagctggcagcctggagctgcggggcttcaagaacaagctgtatgtggccgtggtgggggacaaggtgcagctgtacaagaacctggaggagtaccacctgggcatcggcatcaccttcatcgacatgtctgtgggcaatgtgaaggaggtggaccggcgcagctttgacctgaccaccccctaccgcatcttctccttctctgctgacagcgagctggagaaggagcagtggctggaggccatgcagggcgccatcgccgaggccctgagcaccagcgaggtggccgagcgcatctgggccgccgcccccaaccgcttctgtgccgactgtggggccccccagcctgactgggccagcatcaacctgtgtgtggtgatctgcaagagatgtgccggggagcaccggggcctgggcgccggcgtgtccaaggtgcgcagcctgaagatggacaggaaggtgtggacagagaccctgattgaggccctgtgtgccgctgtgaccaccacagacctggccgagacccaggccctgctgggctgtggggccggcatcaactgcttcagcggggaccctgaggcccccacccccctggccctggccgagcaggccggccagaccctgcagatggagttcctgaggaacaacagaaccacagaggtgccccggctggacagcatgaagcccctggagaagcactacagcgtggtgctgcccaccgtgagccacagcggcttcctgtacaagacagccagcgctgggaagctgctgcaggacagaagagcccgggaggagttcagccgccgctggtgtgtgctgggagatggagtgctgagctactttgaaaatgaaagagctgtgaccccaaatggagagatccgggccagcgagatcgtgtgcctggccgtgcccccaccagacacccacggctttgagcacacctttgaggtgtacacagaaggagagcggctgtacctgtttggcctggagagcgctgagcaggcccacgagtgggtgaagtgcatcgccaaggcctttgtgccccccctggccgaggacctgctggcccgggactttgagcggctgggccgcctgccctacaaggccggcctgagcctgcagagggcccaggagggctggttcagcctgagcggcagcgagctgcgggctgtgtttcctgagggcccctgtgaggagcccctgcagctgaggaagctgcaggagctgagcatccagggcgacagcgagaaccaggtgctggtgctggtggagaggaggaggaccctgtacatccagggcgagcggcggctggacttcatgggctggctgggcgccatccagaaggctgctgcctccatgggagacaccctgtctgagcagcagctgggggacagcgacatccctgtgattgtgtaccgctgtgtggactacatcacccagtgtggcctgaccagcgagggcatctacagaaaatgtggccagaccagcaagacccagaggctgctggagagcctgcggcaggatgcccggtctgtgcacctgaaggagggggagcagcacgtggatgatgtgtcctctgccctgaagcgcttcctgcgggacctgcctgatggcctcttcacccgggcccagaggctgacctggctggaggccagcgagattgaagatgaggaggagaaggtgagccgctaccgggagctgctggtgcggctgccccctgtgaacagagccaccgtgaaggccctgatcagccacctgtactgtgtgcagtgcttcagtgacaccaaccagatgaatgtgcacaacctggccatcgtgtttggccccaccctcttccagacagatggccaggactacaaggccggccgggtggtggaggacctgatcaaccactacgtggtggtgttttctgtggatgaggaggagctgaggaagcagcgggaggagatcacagccatcgtgaagatgagggtggccggcacagccagcggcacccagcacgccggggacttcatctgcaccgtgtacctggaggagaagaaggccgagacagagcagcacatcaaggtgcctgcctccatgacagctgaggagctgaccctggagatcctggacagaagaaatgtgggcatccgggagaaggactactggacctgctttgaggtgaatgaaagagaggaggccgagcggcccctgcactttgctgagaaggtgctgcccatcctgcacggcctgggcacagacagccacctggtggtgaagaagcaccaggccatggaggccatgctgctgtacctggccagccgggtgggggacaccaagcacggcatgatgaagttcagagaagatagaagcctgctgggcctgggcctgcccagcggcggcttccatgaccgctacttcatcctgaacagcagctgcctgcggctgtacaaggaggtgcgcagccacaggcctgagaaggagtggcccatcaagagcctgaaggtgtacctgggcgtgaagaagaagctgcggccccccacctgctggggcttcaccgtggtgcatgaaacagagaagcatgagaagcagcagtggtacctgtgctgtgacacccagatggagctgcgggagtggtttgccaccttcctgtttgtgcagcatgatggcctggtgtggcccagcgagcccagccgggtgtccagagctgtgcctgaggtgcggctgggctctgtgtccctcatccccctgcggggctctgaaaatgagatgagaagatctgtggccgccttcaccgctgaccccctgagcctgctgagaaatgtgtag

SEQ ID NO: 143991 - DNA, 4320 bp, synthetic construct; identical to SEQ ID NO: 143987
  misc_feature 1..4320: note = Description of Artificial Sequence: Synthetic coding sequence
  source 1..4320: mol_type = other DNA

SEQ ID NO: 143992 - DNA, 5115 bp, synthetic construct
  misc_feature 1..5115: note = Description of Artificial Sequence: Synthetic coding sequence
  source 1..5115: mol_type = other DNA
atgagctctgtgtctgaggtgaatgtggacatcaaggacttcctgatgagcatcaacctggagcagtacctgctgcacttccacgagagcggcttcaccaccgtgaaggactgtgccgccatcaatgacagcctgctgcagaagattggcatcagccccaccggccacagaagacgcatcctgaagcagctgcagatcatcctgagcaagatgcaggacatccccatctatgccaacgtgcacaagaccaagaagaatgatgaccccagcaaggactaccacgtgcccagcagtgaccagaacatctgcatcgagctgagcaacagcggctctgtgcagaccagcagccccccccagctggagaccgtgaggaagaacctggaggacagtgatgcctctgtggagaggagccagtacccccagagtgatgacaagctgagcccccccaagagggacttccccacagctgaggagccccacctgaacctgggcagcctgaatgacagcctgtttggaagtgacaacatcaagattgagagcctcatcaccaagaagacagtggaccacacagtggaggagcagcagacagagaaggtgaagctgatcacagagaacctgagcaagctgcccaatgctgacagtgaatgtctgagctttgtgggctgcagcaccagcggcaccaacagcggaaatggcaccaacggcctgctggagggcagcccccccagccccttcttcaagttccagggcgagatgattgtgaatgacctgtatgtgcccagcagccccatcctggcccctgtgcgcagccgcagcaagctggtgtcccggcccagccgctccttcctgctgcggcacaggcctgtgcctgagatccctggcagcaccaagggcgtgtctggcagctacttccgggagaggagaaatgtggccaccagcacagagaagtctgtggcctggcagaacagcaatgaggagaacagcagcagcatcttcccctacggggagaccttcctgttccagaggctggagaacagcaagaagaggagcatcaagaatgagttcctgacccagggcgaggccctgaagggggaggccgccacagccaccaacagcttcatcatcaagagcagcatctatgacaacaggaaggagaagatcagcgaggacaaggtggaggacatctggatcccccgggaggacaagaacaacttcctgattgacacagccagcgagagcgagtacagcacagtggaggagtgcttccagagcctgcggaggaagaacagcaaggccagcaagagcaggacccagaaggccctgatcctggacagcgtgaacagacacagctaccccctgagcagcaccagcggaaatgctgacagcagcgctgtgagcagccaggccatcagcccctatgcctgcttctatggagccagcgccaagaaggtgaagagcggctggctggacaagctgagcccccagggcaagaggatgttccagaagcgctgggtgaagtttgatggcctgagcatctcctactacaacaatgagaaggagatgtacagcaagggcatcatccccctgagcgccatcagcacagtgcgggtgcagggcgacaacaagtttgaggtggtgaccacccagaggacctttgtgttccgggtggagaaggaggaggagagaaatgactggatcagcatcctgctgaatgccctgaagagccagagcctgaccagccagagccaggccgtggtgaccccagagaagtgtggctacctggagctgcggggctacaaggccaagatcttcaccgtgctgagcggcaacagcgtgtggctgtgcaagaatgagcaggacttcaagagcggcctgggcatcaccatcatccccatgaatgtggccaacgtgaagcaggtggacagaacagtgaagcagagctttgagatcatcaccccctaccgctccttctccttcaccgctgagacagagaaggagaagcaggactggattgaagctgtgcagcagagcattgctgagaccctgagtgactatgaggtggccgagaagatctggttcaatgaaagcaacagaagctgtgccgactgcaaggccccagaccctgactgggccagcatcaacctgtgtgtggtgatctgcaagaagtgtgccggccagcacaggagcctgggccccaaggacagcaaggtgcgcagcctgaagatggatgccagcatctggagcaatgaactcatcgagctgttcatcgtcatcggcaacaagagggccaatgacttctgggccggcaacctgcagaaggatgaggagctgcacatggacagccctgtggagaagaggaagaacttcatcacccagaagtacaaggagggcaagttcaggaagaccctgctggccagcctgaccaaggaggagctgaacaaggccctgtgtgccgctgtggtgaagccagatgtgctggagaccatggccctgctcttcagcggggctgatgtgatgtgtgccaccggggaccctgtgcacagcaccccctacctgctggccaagaaggccggccagagcctgcagatggagttcctgtaccacaacaagttcagtgacttcccccagcacgacatccacagcgagggcgtgctgagccaggagagcagccagagcaccttcctgtgtgacttcctgtaccaggcccccagcgctgccagcaagctgagcagcgagaagaagctgctggaggagaccaacaagaagtggtgtgtgctggagggcggcttcctgagctactatgaaaatgacaagagcaccaccccaaatggcaccatcaacatcaatgaagtcatctgcctggccatccacaaggaggacttctacctgaacacaggccccatcttcatctttgagatctacctgcccagcgagagggtcttcctgtttggagctgagaccagccaggcccagaggaagtggacagaggccatcgccaagcactttgtgcccctgtttgctgagaacctgacagaagctgactatgacctgattggccagctgttctacaaggactgccacgccctggaccagtggaggaagggctggtttgccatggacaagagcagcctgcacttctgcctgcagatgcaggaggtgcagggcgacaggatgcacctgcggcggctgcaggagctgaccatcagcaccatggtgcagaatggagagaagctggatgtgctgctgctggtggagaagggccgcaccctgtacatccacggccacaccaagctggacttcaccgtgtggcacacagccatcgagaaggctgctggaacagatggaaatgccctgcaggaccagcagctgagcaagaatgatgtgcccatcatcgtgaacagctgcatcgcctttgtgacccagtatggcctgggctgcaagtacatctaccagaagaatggagaccccctgcacatcagcgagctgctggagagcttcaagaaggatgcccggagcttcaagctgcgggccggcaagcaccagctggaggatgtgacagctgtgctgaagagcttcctgagtgacattgatgatgccctgctgaccaaggagctgtacccctactggatcagcgccctggacacccaggatgacaaggagcgcatcaagaagtatggagccttcatccgcagcctgcccggggtgaacagagccaccctggccgccatcatcgagcacctgtacagagtgcagaagtgcagcgagatcaaccacatgaatgcccacaacctggccctggtgttcagcagctgcctcttccagaccaagggccagaccagcgaggaggtgaatgtgattgaagatctcatcaacaactacgtggagatctttgaggtgaaggaggaccaggtgaagcagatggacatcgagaacagcttcatcaccaagtggaaggacacccaggtgtcccaggccggggacctgctgattgaggtgtatgtggagaggaaggagccagactgcagcatcatcatccgcatcagccctgtgatggaggccgaggagctgaccaatgacatcctggccatcaagaacatcatccccaccaagggggacatctgggccacctttgaggtgattgaaaatgaggagctggagcggcccctgcactacaaggaaaatgtgctggagcaggtgctgcgctggagcagcctggccgagcccggcagcgcctacctggtggtgaagcgcttcctgacagctgacaccatcaagcactgcagcgacaggagcaccctgggcagcatcaaggagggcatcctgaagatcaaggaggagcccagcaagatcctgagcggcaacaagttccaggaccgctactttgtgctgagagatggcttcctgttcctgtacaaggatgtgaagagcagcaagcatgacaagatgttcagcctgagctccatgaagttctacagaggagtgaagaagaagatgaagccacccacctcctggggcctgacagcctacagcgagaagcaccactggcacctgtgctgtgacagcagcaggacccagacagagtggatgaccagcatcttcatcgcccagcatgaatatgacatctggcccccagctgggaaggagaggaagaggagcatcaccaagaaccccaagattggaggcctgcccctcatccccatccagcacgagggcaatgccaccctggccaggaagaacatcgagagcgcccgggcagagctggagcggctgcggctgtctgagaagtgtgacaaggagagcgtggacagcagcctgaaggagcgggcctccatggtggcccactgcctggagcacaaggatgacaagctgaggaaccggcccaggaagcacaggagcttcaactgcctggaggacacagagcctgaggcccccctgggccagcccaagggccacaagggcctgaagaccctgaggaagacagaagatagaaacagcaaggccaccctggacagcgaccacaagctgcccagcagggtcatcgaggagctgaatgtggtgctgcagaggagcaggaccctgcccaaggagctgcaggatgagcagatcctgaagtag

SEQ ID NO: 143993 - DNA, 144 bp, synthetic construct
  misc_feature 1..144: note = Description of Artificial Sequence: Synthetic coding sequence
  source 1..144: mol_type = other DNA
atgagctctgtgtctgaggtgaatgtggacatcaaggacttcctgatgagcatcaacctggagcagtacctgctgcacttccacgagagcggcttcaccaccgtgaaggactgtgccgccatcaatgacagcctgctgcagtag

SEQ ID NO: 143994 - DNA, 3399 bp, synthetic construct
  misc_feature 1..3399: note = Description of Artificial Sequence: Synthetic coding sequence
  source 1..3399: mol_type = other DNA
atgaggagcagcgccagccggctgagcagcttcagcagccgggacagcctgtggaacaggatgccagaccagatctctgtgtctgagttcatcgccgagaccacagaggactacaacagccccaccaccagcagcttcaccacccggctgcacaactgcaggaacacagtgaccctgctggaggaggccctggaccaggacagaacagccctgcagaaggtgaagaagtctgtgaaggccatctacaacagcggccaggaccacgtgcagaatgaagaaaattatgcccaggtgctggacaagtttggcagcaacttcctgagccgggacaacccagacctgggcacagcctttgtgaagttcagcaccctgaccaaggagctgagcaccctgctgaagaacctgctgcagggcctgagccacaacgtcatcttcaccctggacagcctgctgaagggggacctgaagggcgtgaagggggacctgaagaagccctttgacaaggcctggaaggactatgagaccaagttcaccaagattgagaaggagaagcgggagcacgccaagcagcacggcatgatcagaacagagatcactggagctgagattgctgaggagatggagaaggagaggaggctcttccagctgcagatgtgtgagtacctgatcaaggtgaatgagatcaagaccaagaagggcgtggacctgctgcagaacctgatcaagtactaccacgcccagtgcaacttcttccaggacggcctgaagacagctgacaagctgaagcagtacatcgagaagctggccgctgacctgtacaacatcaagcagacccaggatgaggagaagaagcagctgacagccctgcgggacctgatcaagagcagcctgcagctggaccagaaggaggcccggcaggacagccagagccggcagggcggctacagcatgcaccagctgcagggcaacaaggagtatggcagcgagaagaagggctacctgctgaagaagagtgatggcatcaggaaggtgtggcagaggaggaaatgttctgtgaagaatggcatcctgaccatcagccacgccaccagcaaccggcagcctgccaagctgaacctgctgacctgccaggtgaagcccaatgctgaggacaagaagagctttgacctgatcagccacaacagaacctaccacttccaggccgaggatgagcaggactatgtggcctggatctctgtgctgaccaacagcaaggaggaggccctgaccatggccttccggggggagcagagcgctggggagaacagcctggaggacctgaccaaggccatcattgaagatgtgcagaggctgcctggaaatgacatctgctgtgactgtggcagcagcgagcccacctggctgagcaccaacctgggcatcctgacctgcattgaatgttctggcatccaccgggagatgggcgtgcacatcagccgcatccagagcctggagctggacaagctgggcaccagcgagctgctgctggccaagaatgtgggcaacaacagcttcaatgacatcatggaggccaacctgcccagccccagccccaagcccacccccagcagtgacatgacagtgaggaaggagtacatcacagccaagtatgtggaccaccgcttcagcaggaagacctgcagcaccagcagcgccaagctgaatgagctgctggaggccatcaagagccgggacctgctggccctgatccaggtgtatgcagagggcgtggagctgatggagcccctgctggagcccggccaggagctgggggagacagccctgcacctggccgtgaggacagctgaccagaccagcctgcacctggtggacttcctggtgcagaactgtggcaacctggacaagcagacagccctgggcaacacagtgctgcactactgcagcatgtacagcaagccagagtgcctgaagctgctgctgcggagcaagcccaccgtggacatcgtgaaccaggccggggagacagccctggacatcgccaagaggctgaaggccacccagtgtgaggacctgctgagccaggccaagagcggcaagttcaacccccacgtgcacgtggagtatgagtggaacctgcggcaggaggagattgatgaaagtgatgatgacctggatgacaagcccagccccatcaagaaggagaggagcccccggccccagagcttctgccacagcagcagcatcagcccccaggacaagctggccctgcccggcttcagcaccccccgggacaagcagaggctgtcctatggagccttcaccaaccagatctttgtgtccaccagcacagacagccccaccagccccaccacagaggccccacccctgcccccaagaaatgctgggaagggccccaccggcccccccagcaccctgcccctgagcacccagaccagcagcggcagcagcaccctgagcaagaagaggcctcctcctcctcctcctggccacaagaggaccctgagtgacccccccagccccctgccccacggcccccccaacaagggagctgtgccctggggcaatgatggcggccccagcagcagcagcaagaccaccaacaagtttgagggcctgagccagcagagcagcaccagcagcgccaagacagccctgggcccccgggtgctgcccaagctgccccagaaggtggccctgaggaagacagaccacctgagcctggacaaggccaccatccccccagagatcttccagaagagcagccagctggccgagctgccccagaagcccccacctggggacctgccccccaagcccacagagctggcccccaagccccagattggagacctgccccccaagccaggagagctgccccccaagccccagctgggggacctgccccccaagccccagctgagtgacctgccccccaagccccagatgaaggacctgccccccaagccccagctgggggacctgctggccaagagccagacaggagatgtgagccccaaggcccagcagcccagcgaggtgaccctgaagagccaccccctggacctgagccccaacgtgcagagcagagatgccatccagaagcaggccagcgaggacagcaatgacctgacccccaccctgcctgagacccctgtgcccctgcccaggaagatcaacacaggcaagaacaaggtgagaagagtgaagaccatctatgactgccaggccgacaatgatgatgagctgaccttcatcgagggggaggtgatcatcgtgactggagaggaggaccaggagtggtggattggccacatcgagggccagcctgagaggaaaggagtcttccctgtgtcctttgtgcacatcctgagtgactag

SEQ ID NO: 143995 - DNA, 3390 bp, synthetic construct
  misc_feature 1..3390: note = Description of Artificial Sequence: Synthetic coding sequence
  source 1..3390: mol_type = other DNA
atgaggagcagcgccagccggctgagcagcttcagcagccgggacagcctgtggaacaggatgccagaccagatctctgtgtctgagttcatcgccgagaccacagaggactacaacagccccaccaccagcagcttcaccacccggctgcacaactgcaggaacacagtgaccctgctggaggaggccctggaccaggacagaacagccctgcagaaggtgaagaagtctgtgaaggccatctacaacagcggccaggaccacgtgcagaatgaagaaaattatgcccaggtgctggacaagtttggcagcaacttcctgagccgggacaacccagacctgggcacagcctttgtgaagttcagcaccctgaccaaggagctgagcaccctgctgaagaacctgctgcagggcctgagccacaacgtcatcttcaccctggacagcctgctgaagggggacctgaagggcgtgaagggggacctgaagaagccctttgacaaggcctggaaggactatgagaccaagttcaccaagattgagaaggagaagcgggagcacgccaagcagcacggcatgatcagaacagagatcactggagctgagattgctgaggagatggagaaggagaggaggctcttccagctgcagatgtgtgagtacctgatcaaggtgaatgagatcaagaccaagaagggcgtggacctgctgcagaacctgatcaagtactaccacgcccagtgcaacttcttccaggacggcctgaagacagctgacaagctgaagcagtacatcgagaagctggccgctgacctgtacaacatcaagcagacccaggatgaggagaagaagcagctgacagccctgcgggacctgatcaagagcagcctgcagctggaccagaaggaggacagccagagccggcagggcggctacagcatgcaccagctgcagggcaacaaggagtatggcagcgagaagaagggctacctgctgaagaagagtgatggcatcaggaaggtgtggcagaggaggaagtgcagcgtgaagaatggcatcctgaccatcagccacgccaccagcaaccggcagcctgccaagctgaacctgctgacctgccaggtgaagcccaatgctgaggacaagaagagctttgacctgatcagccacaacagaacctaccacttccaggctgaagatgagcaggactatgtggcctggatctctgtgctgaccaacagcaaggaggaggccctgaccatggccttccggggggagcagagcgctggggagaacagcctggaggacctgaccaaggccatcattgaagatgtgcagaggctgcctggaaatgacatctgctgtgactgtggcagcagcgagcccacctggctgagcaccaacctgggcatcctgacctgcatcgagtgcagcggcatccaccgggagatgggcgtgcacatcagccgcatccagagcctggagctggacaagctgggcaccagcgagctgctgctggccaagaatgtgggcaacaacagcttcaatgacatcatggaggccaacctgcccagccccagccccaagcccacccccagcagtgacatgacagtgaggaaggagtacatcacagccaagtatgtggaccaccgcttcagcaggaagacctgcagcaccagcagcgccaagctgaatgagctgctggaggccatcaagagccgggacctgctggccctgatccaggtgtatgcagagggcgtggagctgatggagcccctgctggagcccggccaggagctgggggagacagccctgcacctggccgtgaggacagctgaccagaccagcctgcacctggtggacttcctggtgcagaactgtggcaacctggacaagcagacagccctgggcaacacagtgctgcactactgcagcatgtacagcaagccagaatgtctgaagctgctgctgcggagcaagcccaccgtggacatcgtgaaccaggccggggagacagccctggacatcgccaagaggctgaaggccacccagtgtgaggacctgctgagccaggccaagagcggcaagttcaacccccacgtgcacgtggagtatgagtggaacctgcggcaggaggagattgatgaaagtgatgatgacctggatgacaagcccagccccatcaagaaggagaggagcccccggccccagagcttctgccacagcagcagcatcagcccccaggacaagctggccctgcccggcttcagcaccccccgggacaagcagaggctgtcctatggagccttcaccaaccagatctttgtgtccaccagcacagacagccccaccagccccaccacagaggccccacccctgcccccaagaaatgctgggaagggccccactggaccacccagcaccctgcccctgagcacccagaccagcagcggcagcagcaccctgagcaagaagaggcctcctcctcctcctcctggccacaagaggaccctgagtgacccccccagccccctgccccacggcccccccaacaagggagctgtgccctggggcaatgatggcggccccagcagcagcagcaagaccaccaacaagtttgagggcctgagccagcagagcagcaccagcagcgccaagacagccctgggcccccgggtgctgcccaagctgccccagaaggtggccctgaggaagacagaccacctgagcctggacaaggccaccatccccccagagatcttccagaagagcagccagctggccgagctgccccagaagcccccacctggggacctgccccccaagcccacagagctggcccccaagccccagatcggggacctgccccccaagccaggagagctgccccccaagccccagctgggggacctgccccccaagccccagctgagtgacctgccccccaagccccagatgaaggacctgccccccaagccccagctgggggacctgctggccaagagccagacaggagatgtgagccccaaggcccagcagcccagcgaggtgaccctgaagagccaccccctggacctgagccccaacgtgcagagcagagatgccatccagaagcaggccagcgaggacagcaatgacctgacccccaccctgcctgagacccctgtgcccctgcccaggaagatcaacacaggcaagaacaaggtgcggcgggtgaagaccatctatgactgccaggccgacaatgatgatgagctgaccttcattgaaggagaggtgatcatcgtgactggagaggaggaccaggagtggtggattggccacatcgagggccagcctgagaggaagggcgtcttccctgtgtcctttgtgcacatcctgagtgactag

SEQ ID NO: 143996 - DNA, 3390 bp, synthetic construct; identical to SEQ ID NO: 143995
  misc_feature 1..3390: note = Description of Artificial Sequence: Synthetic coding sequence
  source 1..3390: mol_type = other DNA

SEQ ID NO: 143997 - DNA, 1065 bp, synthetic construct
  misc_feature 1..1065: note = Description of Artificial Sequence: Synthetic coding sequence
  source 1..1065: mol_type = other DNA
atgagcctgcggggcagcctgagccggctgctgcagaccagggtgcacagcatcctgaagaagtctgtgcacagcgtggccgtgattggagcccccttcagccagggccagaagaggaagggcgtggagcacggccctgctgccatccgggaggccggcctgatgaagaggctgagcagcctgggctgccacctgaaggactttggagacctgtccttcacccctgtgcccaaggatgacctgtacaacaacctgattgtgaaccccaggtctgtgggcctggccaaccaggagctggccgaggtggtgtccagagctgtgtctgatggctacagctgtgtgaccctgggcggggaccacagcctggccatcggcaccatcagcggccacgcccggcactgcccagacctgtgtgtggtgtgggtggatgcccacgccgacatcaacacccccctgaccaccagcagcggcaacctgcacggccagcctgtgtccttcctgctgcgggagctgcaggacaaggtgccccagctgcccggcttctcctggatcaagccctgcatcagcagcgccagcatcgtgtacatcggcctgagagatgtggaccccccagagcacttcatcctgaagaactatgacatccagtacttctccatgagggacatcgaccggctgggcatccagaaggtgatggagaggacctttgacctgctgattggcaagaggcagaggcccatccacctgagctttgatattgatgcctttgaccccaccctggccccagccaccggcacccctgtggtgggcggcctgacctaccgggagggcatgtacatcgccgaggagatccacaacacaggcctgctgagcgccctggacctggtggaggtgaacccccagctggccaccagcgaggaggaggccaagaccacagccaacctggccgtggatgtgattgccagcagctttggccagacccgggagggcggccacatcgtgtatgaccagctgcccacccccagcagcccagatgaaagtgagaaccaggcccgggtgcgcatctag

SEQ ID NO: 143998 - DNA, 207 bp, synthetic construct
  misc_feature 1..207: note = Description of Artificial Sequence: Synthetic coding sequence
  source 1..207: mol_type = other DNA
atgaagctgaatgagaagttcagcgagggctggaggaagcccaatgcctcctggaagagcagctgcagcaagaacagcagtgaccgggacaagctgagcctgccccacaagaagctggagcggggctcctggagggtgtggcagcccaggagcaccctgtgcaggaccctggacaagacagaggaggagcgggccaagcgggagtag

SEQ ID NO: 143999 - DNA, 429 bp, synthetic construct
  misc_feature 1..429: note = Description of Artificial Sequence: Synthetic coding sequence
  source 1..429: mol_type = other DNA
atgaagctgaatgagaagttcagcgagggctggaggaagcccaatgcctcctggaagagcagctgcagcaagaacagcagtgaccgggacaagctgagcctgccccacaagaagctggagcggggctcctggagggtgtggcagcccaggagcaccctgtgcaggaccctggacaagacagaggaggagcgggccaagcgggaggagctggagcgcatcctggaggagaacaacaggaagattgctgaggcccaggccaagctggccgaggagcagctgagaattgtggaggagcagaggaagatccacgaggagaggatgaagctggagcaggagcggcagaggcagcagaaggaggagcagaagatcatcctgggcaagggcaagagccggcccaagctgtccttcagcctgaagacccaggactag

SEQ ID NO: 144000 - DNA, 822 bp, synthetic construct
  misc_feature 1..822: note = Description of Artificial Sequence: Synthetic coding sequence
  source 1..822: mol_type = other DNA
atgggccgcagccgcagccgcagcagcagccgcagcaagcacaccaagagcagcaagcacaacaagaagaggagccgcagccgcagccgcagccgggacaaggagcgggtgaggaagaggagcaagagccgggagagcaagaggaacagaagaagagagagccgcagccgcagccgcagcaccaacacagctgtgtccagaagagagcgggaccgggagcgggccagcagccccccagacagaattgacatctttggaagaacagtgtccaagaggagcagcctggatgagaagcagaagcgggaggaggaggagaagaaggccgagtttgagcggcagaggaagatccggcagcaggagattgaggagaagctgattgaggaggagacagcccggcgggtggaggagctggtggccaagagggtggaggaggagctggagaagaggaaggatgaaattgagcgggaggtgctgcggcgggtggaggaggccaagaggatcatggagaagcagctgctggaggagctggagcggcagaggcaggccgagctggccgcccagaaggcccgggaggaggaggagcgggccaagcgggaggagctggagcgcatcctggaggagaacaacaggaagattgctgaggcccaggccaagctggccgaggagcagctgcgcatcgtggaggagcagaggaagatccacgaggagaggatgaagctggagcaggagcggcagaggcagcagaaggaggagcagaagatcatcctgggcaagggcaagagccggcccaagctgtccttcagcctgaagacccaggactag

SEQ ID NO: 144001 - DNA, 672 bp, synthetic construct
  misc_feature 1..672: note = Description of Artificial Sequence: Synthetic coding sequence
  source 1..672: mol_type = other DNA
atgggccgcagccgcagccgcagcagcagccgcagcaagcacaccaagagcagcaagcacaacaagaagagggccagcagccccccagacagaattgacatctttggaagaacagtgtccaagaggagcagcctggatgagaagcagaagcgggaggaggaggagaagaaggccgagtttgagcggcagaggaagatccggcagcaggagattgaggagaagctgattgaggaggagacagcccggcgggtggaggagctggtggccaagagggtggaggaggagctggagaagaggaaggatgaaattgagcgggaggtgctgcggcgggtggaggaggccaagaggatcatggagaagcagctgctggaggagctggagcggcagaggcaggccgagctggccgcccagaaggcccgggaggtgaccctgggccgcctggagagccgggacagcccctggcagaacttccagtgctgggtgctgcccccagcccagttcaggaagcgctggaacacagactacctgatccccttcagcagcaagctgaacattgctgccaaggtgaacttcctggcctacagcgaggtgctgacagacaacctgaaggtgggcagcttctacaagacctacagccgcatcctgtttgacctgatggagctggccatctag

SEQ ID NO: 144002 - DNA, 495 bp, synthetic construct
  misc_feature 1..495: note = Description of Artificial Sequence: Synthetic coding sequence
  source 1..495: mol_type = other DNA
atgccagacaccatgctgcctgcctgcttcctgggcctgctggccttcagcagcgcctgctacttccagaactgcccccggggcggcaagagggccatgtctgacctggagctgcggcagtgcctgccctgtggccctgggggcaagggccgctgcttcggccccagcatctgctgtgctgatgagctgggctgctttgtgggcacagctgaggccctgcgctgccaggaggagaactacctgcccagcccctgccagagcggccagaaggcctgtggcagcggcggccgctgtgccgcctttggagtgtgctgcaatgatgagagctgtgtgacagagccagaatgtcgggagggcttccaccggcgggcccgggccagtgacaggagcaatgccacccagctggatggccctgctggggccctgctgctgcggctggtgcagctggccggggcccctgagccctttgagcccgcccagccagatgcctactag

SEQ ID NO: 144003 - DNA, 1257 bp, synthetic construct
  misc_feature 1..1257: note = Description of Artificial Sequence: Synthetic coding sequence
  source 1..1257: mol_type = other DNA
atgaggctgtctgctggcccagatgctggccccagcggcaacagcagcccctggtggcccctggccactggagctggcaacaccagccgggaggccgaggccctgggggagggcaatggacctccaagagatgtgagaaatgaggagctggccaagctggagattgctgtgctggccgtgacctttgctgtggccgtgctgggcaacagctctgtgctgctggccctgcacaggacccccaggaagaccagcaggatgcacctgttcatccgccacctgagcctggccgacctggccgtggccttcttccaggtgctgccccagatgtgctgggacatcacctaccgcttccggggccctgactggctgtgccgggtggtgaagcacctgcaggtgtttggcatgtttgccagcgcctacatgctggtggtgatgacagctgaccgctacatcgctgtgtgccaccccctgaagaccctgcagcagcctgcccggcgcagccggctgatgattgctgctgcctgggtgctgagctttgtgctgagcaccccccagtactttgtgttctccatgattgaggtgaacaacgtgaccaaggcccgggactgctgggccaccttcatccagccctggggcagccgggcctacgtgacctggatgactggaggcatctttgtggcccctgtggtgatcctgggcacctgctacggcttcatctgctacaacatctggtgcaatgtgcggggcaagacagccagccggcagagcaaaggagctgagcaggccggcgtggccttccagaagggcttcctgctggccccctgtgtgtcctctgtgaagagcatcagccgggccaagatcagaacagtgaagatgaccttcgtcatcgtgacagcctacatcgtgtgctgggcccccttcttcatcatccagatgtggagcgtgtgggaccccatgtctgtgtggacagaaagtgagaaccccaccatcaccatcacagccctgctgggcagcctgaacagctgctgcaacccctggatctacatgttcttcagcggccacctgctgcaggactgtgtgcagagcttcccctgctgccagaacatgaaggagaagttcaacaaggaggacacagacagcatgagccggcggcagaccttctacagcaacaacagaagccccaccaacagcacaggcatgtggaaggacagccccaagagcagcaagagcatcaagttcatccctgtgtccacctag

SEQ ID NO: 144004 - DNA, 1275 bp, synthetic construct
  misc_feature 1..1275: note = Description of Artificial Sequence: Synthetic coding sequence
  source 1..1275: mol_type = other DNA
atggattctggccccctgtgggatgccaaccccaccccccggggcaccctgagcgccccaaatgccaccaccccctggctgggcagagatgaggagctggccaaggtggagattggagtgctggccaccgtgctggtgctggccactggaggcaacctggccgtgctgctgaccctgggccagctgggcaggaagaggagcaggatgcacctgtttgtgctgcacctggccctgacagacctggccgtggccctcttccaggtgctgccccagctgctgtgggacatcacctaccgcttccagggccctgacctgctgtgcagagctgtgaagtacctgcaggtgctgtccatgtttgccagcacctacatgctgctggccatgaccctggaccgctacctggccgtgtgccaccccctgcggagcctgcagcagcccggccagagcacctacctgctgattgctgccccctggctgctggccgccatcttcagcctgccccaggtgttcatcttcagcctgcgggaggtgatccagggcagcggcgtgctggactgctgggccgactttggcttcccctggggcccccgggcctacctgacctggaccaccctggccatctttgtgctgcctgtgaccatgctgacagcctgctacagcctcatctgccacgagatctgcaagaacctgaaggtgaagacccaggcctggagggtgggcggcggcggctggaggacctgggaccggcccagccccagcaccctggccgccaccacccggggcctgcccagccgggtgagcagcatcaacaccatcagccgggccaagatcagaacagtgaagatgaccttcgtcatcgtgctggcctacatcgcctgctgggcccccttcttctctgtgcagatgtggagcgtgtgggacaagaatgccccagatgaggacagcaccaacgtggccttcaccatctccatgctgctgggcaacctgaacagctgctgcaacccctggatctacatgggcttcaacagccacctgctgccccggcccctgcggcacctggcctgctgcggcggcccccagcccaggatgagaagaaggctgagtgatggcagcctgagcagccgccacaccaccctgctgaccaggagcagctgcccagccaccctgagcctgagcctgagcctgaccctgagcggccggcccaggcctgaggagagcccccgggacctggagctggctgatggagagggcacagctgagaccatcatcttctag

SEQ ID NO: 144005 - DNA, 1116 bp, synthetic construct
  misc_feature 1..1116: note = Description of Artificial Sequence: Synthetic coding sequence
  source 1..1116: mol_type = other DNA
atgctgatggccagcaccaccagcgctgtgcccggccaccccagcctgcccagcctgcccagcaacagcagccaggagcggcccctggacacccgggaccccctgctggcccgggcagagctggccctgctgagcatcgtgtttgtggccgtggccctgagcaatggcctggtgctggccgccctggcccggcggggcagaagaggccactgggcccccatccacgtgttcatcggccacctgtgcctggccgacctggccgtggccctcttccaggtgctgccccagctggcctggaaggccacagaccgcttccggggcccagatgccctgtgcagagctgtgaagtacctgcagatggtgggcatgtatgccagcagctacatgatcctggccatgaccctggacagacaccgggccatctgccggcccatgctggcctaccgccacggcagcggggcccactggaacagacctgtgctggtggcctgggccttcagcctgctgctgagcctgccccagctgttcatctttgcccagagaaatgtggagggcggcagcggcgtgacagactgctgggcctgctttgctgagccctggggccgccgcacctacgtgacctggatcgccctgatggtgtttgtggcccccaccctgggcattgctgcctgccaggtgctgatcttccgggagatccacgccagcctggtgcccggccccagcgagaggcctgggggcagaagaagaggaagaagaacaggcagccctggagagggcgcccacgtgtctgctgctgtggccaagacagtgaggatgaccctggtgattgtggtggtgtatgtgctgtgctgggcccccttcttcctggtgcagctgtgggccgcctgggaccctgaggcccccctggagggcgccccctttgtgctgctgatgctgctggccagcctgaacagctgcaccaacccctggatctatgccagcttcagcagctctgtgagcagcgagctgcggagcctgctgtgctgtgcccggggccgcaccccacccagcctgggcccccaggatgagagctgcaccacagccagcagcagcctggccaaggacaccagcagctag

SEQ ID NO: 144006 - DNA, 1116 bp, synthetic construct; identical to SEQ ID NO: 144005
  misc_feature 1..1116: note = Description of Artificial Sequence: Synthetic coding sequence
  source 1..1116: mol_type = other DNA

SEQ ID NO: 144007 - DNA, 930 bp, synthetic construct
  misc_feature 1..930: note = Description of Artificial Sequence: Synthetic coding sequence
  source 1..930: mol_type = other DNA
atgctgatggccagcaccaccagcgctgtgcccggccaccccagcctgcccagcctgcccagcaacagcagccaggagcggcccctggacacccgggaccccctgctggcccgggcagagctggccctgctgagcatcgtgtttgtggccgtggccctgagcaatggcctggtgctggccgccctggcccggcggggcagaagaggccactgggcccccatccacgtgttcatcggccacctgtgcctggccgacctggccgtggccctcttccaggtgctgccccagctggcctggaaggccacagaccgcttccggggcccagatgccctgtgcagagctgtgaagtacctgcagatggtgggcatgtatgccagcagctacatgatcctggccatgaccctggacagacaccgggccatctgccggcccatgctggcctaccgccacggcagcggggcccactggaacagacctgtgctggtggcctgggccttcagcctgctgctgagcctgccccagctgttcatctttgcccagagaaatgtggagggcggcagcggcgtgacagactgctgggcctgctttgctgagccctggggccgccgcacctacgtgacctggatcgccctgatggtgtttgtggcccccaccctgggcattgctgcctgccaggtgctgatcttccgggagatccacgccagcctggtgcccggccccagcgagaggcctgggggcagaagaagaggaagaagaacaggcagccctggagagggcgcccacgtgtctgctgctgtggccaagacagtgaggatgaccctggtgattgtggtggtgtatgtgctgtgctgggcccccttcttcctggtgcagctgtgggccgcctgggaccctgaggcccccctggagggcggctgcagccggggctag

SEQ ID NO: 144008 - DNA, 1005 bp, synthetic construct
  misc_feature 1..1005: note = Description of Artificial Sequence: Synthetic coding sequence
  source 1..1005: mol_type = other DNA
atgggcagaagaagcagtgacacagaggaggagagccgcagcaagaggaagaagaagcacagaagaagaagcagcagcagcagcagcagtgacagcaggacctacagcaggaagaagggcggcaggaagagccgcagcaagagccgctcctggagccgggacctgcagcccaggagccacagctatgacagaagaagaagacacaggagcagcagcagcagcagctatggcagcaggaggaagaggagccgcagccgcagccggggccggggcaagagctacagagtgcagaggagccgcagcaagagcaggacccggcgcagccgcagccggccccggctgcggagccacagccgcagcagcgagaggagcagccacaggaggaccaggagccgcagccgggaccgggagaggaggaagggccgggacaaggagaagcgggagaaggagaaggacaagggcaaggacaaggagctgcacaacatcaagagaggagagagcggcaacatcaaggccggcctggagcacctgcccccagctgagcaggccaaggcccggctgcagctggtgctggaggccgccgccaaggcagatgaggccctgaaggccaaggagagaaatgaggaggaggccaagaggaggaaggaggaggaccaggccaccctggtggagcaggtgaagagggtgaaggagattgaggccattgaaagtgacagctttgtgcagcagaccttccgcagcagcaaggaggtgaagaagtctgtggagcccagcgaggtgaagcaggccaccagcaccagcggccctgccagcgctgtggccgacccccccagcacagagaaggagattgaccccaccagcatccccacagccatcaagtaccaggatgacaacagcctggcccaccccaacctcttcatcgagaaggcagatgctgaggagaagtggttcaagaggctgattgccctgcggcaggagcggctgatgggcagccctgtggcctag

SEQ ID NO: 144009 - DNA, 831 bp, synthetic construct
  misc_feature 1..831: note = Description of Artificial Sequence: Synthetic coding sequence
  source 1..831: mol_type = other DNA
atgggcagaagaagcagtgacacagaggaggagagccgcagcaagaggaagaagaagcacagaagaagaagcagcagcagcagcagcagtgacagcaggacctacagcaggaagaagggcggcaggaagagccgcagcaagagccgctcctggagccgggacctgcagcccaggagccacagctatgacagaagaagaagacacaggagcagcagcagcagcagctatggcagcaggaggaagaggagccgcagccgcagccggggccggggcaagagctacagagtgcagaggagccgcagcaagagcaggacccggcgggagagcggcaacatcaaggccggcctggagcacctgcccccagctgagcaggccaaggcccggctgcagctggtgctggaggccgccgccaaggcagatgaggccctgaaggccaaggagagaaatgaggaggaggccaagaggaggaaggaggaggaccaggccaccctggtggagcaggtgaagagggtgaaggagattgaggccattgaaagtgacagctttgtgcagcagaccttccgcagcagcaaggaggtgaagaagtctgtggagcccagcgaggtgaagcaggccaccagcaccagcggccctgccagcgctgtggccgacccccccagcacagagaaggagattgaccccaccagcatccccacagccatcaagtaccaggatgacaacagcctggcccaccccaacctcttcatcgagaaggcagatgctgaggagaagtggttcaagaggctgattgccctgcggcaggagcggctgatgggcagccctgtggcctag

SEQ ID NO: 144010 - DNA, 831 bp, synthetic construct; identical to SEQ ID NO: 144009
  misc_feature 1..831: note = Description of Artificial Sequence: Synthetic coding sequence
  source 1..831: mol_type = other DNA

SEQ ID NO: 144011 - DNA, 612 bp, synthetic construct
  misc_feature 1..612: note = Description of Artificial Sequence: Synthetic coding sequence
  source 1..612: mol_type = other DNA
atgggcagaagaagcagtgacacagaggaggagagccgcagcaagaggaagaagaagcacagaagaagaagcagcagcagcagcagcagtgacagcaggacctacagcaggaagaagggcggcaggaagagccgcagcaagagccgctcctggagccgggacctgcagcccaggagccacagctatgacagaagaagaagacacaggagcagcagcagcagcagctatggcagcaggaggaagaggagccgcagccgcagccggggccggggcaagagctacagagtgcagaggagccgcagcaagagcaggacccggcgcagccgcagccggccccggctgcggagccacagccgcagcagcgagaggagcagccacaggaggaccaggagccgcagccgggaccgggagaggaggaagggccgggacaaggagaagcgggagaaggagaaggacaagggcaaggacaaggagctgcacaacatcaagagaggagagagcggcaacatcaaggccggcctggagcacctgcccccagctgagcaggccaaggcccggctgcagctggtgctggaggccgccgccaaggcagatgaggccctgaaggcctag

SEQ ID NO: 144012 - DNA, 585 bp, synthetic construct
  misc_feature 1..585: note = Description of Artificial Sequence: Synthetic coding sequence
  source 1..585: mol_type = other DNA
atgggcagaagaagcagtgacacagaggaggagagccgcagcaagaggaagaagaagcacagaagaagaagcagcagcagcagcagcagtgacagcaggacctacagcaggaagaagggcggcaggaagagccgcagcaagagccgctcctggagccgggacctgcagcccaggagccacagctatgacagaagaagaagacacaggagcagcagcagcagcagctatggcagcaggaggaagaggagccgcagccgcagccggggccggggcaagagctacagagtgcagaggagccgcagcaagagcaggacccggcgcagccgcagccggccccggctgcggagccacagccgcagcagcgagaggagcagccacaggaggaccaggagccgcagccgggaccgggagaggaggaagggccgggacaaggagaagcgggagaaggagaaggacaagggcaaggacaaggagctgcacaacatcaagagaggagagagcggcaacatcaaggccggcctggagcacctgcccccagctgagcaggccaaggcccggctgcagctggtgctggaggccgcctag

SEQ ID NO: 144013 - DNA, 1005 bp, synthetic construct; identical to SEQ ID NO: 144008
  misc_feature 1..1005: note = Description of Artificial Sequence: Synthetic coding sequence
  source 1..1005: mol_type = other DNA

SEQ ID NO: 144014 - DNA, 498 bp, synthetic construct
  misc_feature 1..498: note = Description of Artificial Sequence: Synthetic coding sequence
  source 1..498: mol_type = other DNA
atgggcagaagaagcagtgacacagaggaggagagccgcagcaagaggaagaagaagcacagaagaagaagcagcagcagcagcagcagtgacagcaggacctacagcaggaagaagggcggcaggaagagccgcagcaagagccgctcctggagccgggacctgcagcccaggagccacagctatgacagaagaagaagacacaggagcagcagcagcagcagctatggcagcaggaggaagaggagccgcagccgcagccggggccggggcaagagctacagagtgcagaggagccgcagcaagagcaggacccggcgcagccgcagccggccccggctgcggagccacagccgcagcagcgagaggagcagccacaggaggaccaggagccgcagccgggaccgggagaggaggaagggccgggacaaggagaagcgggagaaggagaaggacaagggcaaggacaaggagctgcacaacatcaagaggggctag

SEQ ID NO: 144015 - DNA, 948 bp, synthetic construct
  misc_feature 1..948: note = Description of Artificial Sequence: Synthetic coding sequence
  source 1..948: mol_type = other DNA
atgaggaacaggatggcccctgagaacccccagcctgaccccttcatcaacagaaactacagcaacatgaaggtgattcctccccaggaccctgccagccccagcttcaccctgctgagcaagctggagtgcagcggcaccgtgtctgcctactgcagcctgaacctgcccggcagcacagacccccccaccagcgccagccgggtggccgccaccacagccatcagaagaagacacaaggagaggaccagcttcacccaccagcagtatgaggagctggaggccctcttcagccagaccatgtttcctgacaggaacctgcaggagaagctggccctgcggctggacctgcctgagagcacagtgaaggtgtggttcaggaacagacgcttcaagctgaagaagcagcagcagcagcagagcgccaagcagaggaaccagatcctgcccagcaagaagaatgtgcccaccagccccaggaccagccccagcccctatgccttcagccctgtgatcagtgacttctacagcagcctgcccagccagcccctggaccccagcaactgggcctggaacagcaccttcacagagagcagcaccagtgacttccagatgcaggacacccagtgggagcggctggtggcctctgtgcctgccctgtacagtgatgcctatgacatcttccagatcatcgagctgtacaacctgcctgatgaaaatgagatcagcagcagcagcttccactgcctgtaccagtacctgagccccaccaagtaccaggtgggcggccagggcagcagcctgagcatctttgctggccctgctgtgggcctgagccctgcccagacctggcccaacatgaccagccaggcctttgaggcctacagcctgacagacagcctggagttccagaagaccagcaacatggtggacctgggcttcctgtag

SEQ ID NO: 144016 - DNA, 4701 bp, synthetic construct
  misc_feature 1..4701: note = Description of Artificial Sequence: Synthetic coding sequence
  source 1..4701: mol_type = other DNA
atgacagctgacaaggacaaggacaaggacaaggagaaggaccgggaccgggaccgggaccgggagcgggagaagagggacaaggcccgggagagcgagaacagccggccccggcgcagctgcaccctggagggcggggccaagaactatgcagagagtgaccacagtgaagatgaagataatgacaacaacagcgccacagctgaggagagcaccaagaagaacaagaagaagccacccaagaagaagagccgctatgaaagaacagacacaggagagatcaccagctacatcacagaagatgatgtggtgtacagacctggggactgtgtgtacatcgagagccggcggcccaacaccccctacttcatctgcagcatccaggacttcaagctggtgcacaacagccaggcctgctgccgcagccccaccccagccctgtgtgaccccccagcctgcagcctgcctgtggccagccagcccccccagcacctgtctgaggccggccggggccctgtgggcagcaagagggaccacctgctgatgaatgtgaagtggtactaccggcagagcgaggtgcctgacagcgtgtaccagcacctggtgcaggacagacacaatgaaaatgattctggccgggagctggtgatcacagaccccgtcatcaagaaccgggagctgttcatcagtgactatgtggacacctaccacgccgccgccctgcggggcaagtgcaacatcagccacttcagtgacatctttgctgcccgggagttcaaggcccgggtggacagcttcttctacatcctgggctacaaccctgagacccggcggctgaacagcacccagggcgagatccgggtgggccccagccaccaggccaagctgcctgacctgcagcccttccccagcccagatggagacacagtgacccagcacgaggagctggtgtggatgcctggggtgaatgactgtgacctgctgatgtacctgcgggccgcccgctccatggccgcctttgctggcatgtgtgatggcggcagcacagaagatggctgtgtggccgccagcagagatgacaccaccctgaatgccctgaacaccctgcacgagagcggctatgatgctgggaaggccctgcagaggctggtgaagaagcctgtgcccaagctgattgagaagtgctggacagaagatgaggtgaagagatttgtgaagggcctgcggcagtatggcaagaacttcttccgcatcaggaaggagctgctgcccaacaaggagaccggggagctgatcaccttctactactactggaagaagaccccagaggccgccagcagccgggcccacagaagacaccggcggcaggccgtgttccgccgcatcaagaccaggacagccagcacccctgtgaacacccccagcaggcctcccagcagcgagttcctggacctgagcagcgcctctgaagatgactttgattctgaggacagcgagcaggagctgaagggctacgcctgccgccactgcttcaccaccaccagcaaggactggcaccacggcggccgggagaacatcctgctgtgcacagactgccgcatccacttcaagaagtatggagagctgccccccatcgagaagcctgtggaccccccacccttcatgttcaagcctgtgaaggaggaggatgatggcctgagcggcaagcacagcatgaggaccaggaggagccggggctccatgagcaccctgcggagcggcaggaagaagcagcctgccagcccagatggccgcaccagccccatcaatgaagacatccgcagcagtggaagaaacagccccagcgctgccagcaccagcagcaatgacagcaaggccgagaccgtgaagaagagcgccaagaaggtgaaggaggaggccagcagccccctgaagagcaacaagaggcagcgggagaaggtggccagtgacacagaggaggccgacaggaccagcagcaagaagaccaagacccaggagatcagccggcccaacagccccagcgagggggagggggagagcagtgacagccgctctgtgaatgatgagggcagcagtgaccccaaggacatcgaccaggacaacagaagcaccagccccagcatccccagcccccaggacaatgaaagtgacagcgacagcagcgcccagcagcagatgctgcaggcccagcccccagccctgcaggcccccactggagtgaccccagcccccagcagcgcccctcctggcaccccccagctgcccaccccaggccccaccccatctgccacagctgtgcccccccagggcagccccacagccagccaggcccccaaccagccccaggcccccacagcccctgtgccccacacccacatccagcaggccccagccctgcacccccagaggcctcccagcccccaccccccaccccaccccagcccccacccccccctgcagcccctgaccggcagcgctggccagcccagcgcccccagccacgcccagccccccctgcacggccagggccccccaggcccccacagcctgcaggccggccccctgctgcagcaccctggccccccccagcccttcggcctgcccccccaggccagccagggccaggcccccctgggcaccagccctgctgctgcctacccccacaccagcctgcagctgcctgccagccagagcgccctgcagagccagcagcccccccgggagcagcccctgcccccagcccccctggccatgccccacatcaagcccccacccaccacccccatcccccagctgcctgccccccaggcccacaagcaccccccccacctgagcggccccagccccttctccatgaatgccaacctgcccccacctccagccctgaagcccctgagcagcctgagcacccaccacccccccagcgcccaccccccacccctgcagctgatgccccagagccagcccctgcccagcagccctgcccagcccccaggcctgacccagagccagaacctgcccccacctccagccagccaccccccaacaggcctgcaccaggtggccccccagcccccatttgcccagcacccctttgtgcctgggggccccccacccatcaccccacccacctgccccagcaccagcaccccacctgctggccctggcaccagcgcccagcccccctgcagcggggccgccgccagcggcggcagcattgctgggggcagcagctgccccctgcccaccgtgcagatcaaggaggaggccctggatgatgctgaggagcctgagagccccccacctccacccaggagccccagccctgagcccaccgtggtggacacccccagccacgccagccagagcgcccgcttctacaagcacctggaccggggctacaacagctgtgccaggacagacctgtacttcatgcccctggccggcagcaagctggccaagaagcgggaggaggccatcgagaaggccaagcgggaggccgagcagaaggcccgggaggagcgggagcgggagaaggagaaggagaaggagcgggagcgggagcgggagcgggagcgggaggccgagagagctgccaaggccagcagcagcgcccacgagggccgcctgagtgacccccagctgagcggccctggccacatgaggcccagctttgagcccccacccaccaccatcgctgctgtgcccccctacatcggccctgacaccccagccctgcggaccctgtctgaatatgcccggccccacgtgatgagccccaccaacagaaaccaccccttctacatgcccctgaaccccacagaccccctgctggcctaccacatgcctggcctgtacaacgtggaccccaccatccgggagcgggagctgcgggagcgggagatccgggagcgggagatccgggagcgggagctgcgggagaggatgaagccaggctttgaggtgaagcccccagagctggaccccctgcaccctgctgccaaccccatggagcactttgcccggcacagcgccctgaccatccccccaacagctggcccccacccctttgccagcttccaccctggcctgaaccccctggagcgggagcggctggccctggccggcccccagctgcggcctgagatgagctacccagaccggctggccgctgagcgcatccatgctgagaggatggccagcctgaccagtgaccccctggcccggctgcagatgtttaatgtgaccccccaccaccaccagcacagccacatccacagccacctgcacctgcaccagcaggaccccctgcaccagggcagcgctggccctgtgcaccccctggtggaccccctgacagctggcccccacctggcccgcttcccctacccacctggcaccctgcccaaccccctgctgggccagccccctcatgaacatgagatgctgcggcaccctgtgtttggcaccccctacccccgggacctgcccggggccatccccccacccatgtctgctgcccaccagctgcaggccatgcacgcccagagcgctgagctgcagaggctggccatggagcagcagtggctgcacggccacccccacatgcacggcggccacctgcccagccaggaggactactacagccggctgaagaaggagggggacaagcagctgtag

SEQ ID NO: 144017 - DNA, 3897 bp, synthetic construct
  misc_feature 1..3897: note = Description of Artificial Sequence: Synthetic coding sequence
  source 1..3897: mol_type = other DNA
atggatgaccccttcagcccctgccggcggctgaacagcacccagggcgagatccgggtgggccccagccaccaggccaagctgcctgacctgcagcccttccccagcccagatggagacacagtgacccagcacgaggagctggtgtggatgcctggggtgaatgactgtgacctgctgatgtacctgcgggccgcccgctccatggccgcctttgctggcatgtgtgatggcggcagcacagaagatggctgtgtggccgccagcagagatgacaccaccctgaatgccctgaacaccctgcacgagagcggctatgatgctgggaaggccctgcagaggctggtgaagaagcctgtgcccaagctgattgagaagtgctggacagaagatgaggtgaagagatttgtgaagggcctgcggcagtatggcaagaacttcttccgcatcaggaaggagctgctgcccaacaaggagaccggggagctgatcaccttctactactactggaagaagaccccagaggccgccagcagccgggcccacagaagacaccggcggcaggccgtgttccgccgcatcaagaccaggacagccagcacccctgtgaacacccccagcaggcctcccagcagcgagttcctggacctgagcagcgcctctgaagatgactttgattctgaggacagcgagcaggagctgaagggctacgcctgccgccactgcttcaccaccaccagcaaggactggcaccacggcggccgggagaacatcctgctgtgcacagactgccgcatccacttcaagaagtatggagagctgccccccatcgagaagcctgtggaccccccacccttcatgttcaagcctgtgaaggaggaggatgatggcctgagcggcaagcacagcatgaggaccaggaggagccggggctccatgagcaccctgcggagcggcaggaagaagcagcctgccagcccagatggccgcaccagccccatcaatgaagacatccgcagcagtggaagaaacagccccagcgctgccagcaccagcagcaatgacagcaaggccgagaccgtgaagaagagcgccaagaaggtgaaggaggaggccagcagccccctgaagagcaacaagaggcagcgggagaaggtggccagtgacacagaggaggccgacaggaccagcagcaagaagaccaagacccaggagatcagccggcccaacagccccagcgagggggagggggagagcagtgacagccgctctgtgaatgatgagggcagcagtgaccccaaggacatcgaccaggacaacagaagcaccagccccagcatccccagcccccaggacaatgaaagtgacagcgacagcagcgcccagcagcagatgctgcaggcccagcccccagccctgcaggcccccactggagtgaccccagcccccagcagcgcccctcctggcaccccccagctgcccaccccaggccccaccccatctgccacagctgtgcccccccagggcagccccacagccagccaggcccccaaccagccccaggcccccacagcccctgtgccccacacccacatccagcaggccccagccctgcacccccagaggcctcccagcccccaccccccaccccaccccagcccccacccccccctgcagcccctgaccggcagcgctggccagcccagcgcccccagccacgcccagccccccctgcacggccagggccccccaggcccccacagcctgcaggccggccccctgctgcagcaccctggccccccccagcccttcggcctgcccccccaggccagccagggccaggcccccctgggcaccagccctgctgctgcctacccccacaccagcctgcagctgcctgccagccagagcgccctgcagagccagcagcccccccgggagcagcccctgcccccagcccccctggccatgccccacatcaagcccccacccaccacccccatcccccagctgcctgccccccaggcccacaagcaccccccccacctgagcggccccagccccttctccatgaatgccaacctgcccccacctccagccctgaagcccctgagcagcctgagcacccaccacccccccagcgcccaccccccacccctgcagctgatgccccagagccagcccctgcccagcagccctgcccagcccccaggcctgacccagagccagaacctgcccccacctccagccagccaccccccaacaggcctgcaccaggtggccccccagcccccatttgcccagcacccctttgtgcctgggggccccccacccatcaccccacccacctgccccagcaccagcaccccacctgctggccctggcaccagcgcccagcccccctgcagcggggccgccgccagcggcggcagcattgctgggggcagcagctgccccctgcccaccgtgcagatcaaggaggaggccctggatgatgctgaggagcctgagagccccccacctccacccaggagccccagccctgagcccaccgtggtggacacccccagccacgccagccagagcgcccgcttctacaagcacctggaccggggctacaacagctgtgccaggacagacctgtacttcatgcccctggccggcagcaagctggccaagaagcgggaggaggccatcgagaaggccaagcgggaggccgagcagaaggcccgggaggagcgggagcgggagaaggagaaggagaaggagcgggagcgggagcgggagcgggagcgggaggccgagagagctgccaaggccagcagcagcgcccacgagggccgcctgagtgacccccagctgagcggccctggccacatgaggcccagctttgagcccccacccaccaccatcgctgctgtgcccccctacatcggccctgacaccccagccctgcggaccctgtctgaatatgcccggccccacgtgatgagccccaccaacagaaaccaccccttctacatgcccctgaaccccacagaccccctgctggcctaccacatgcctggcctgtacaacgtggaccccaccatccgggagcgggagctgcgggagcgggagatccgggagcgggagatccgggagcgggagctgcgggagaggatgaagccaggctttgaggtgaagcccccagagctggaccccctgcaccctgctgccaaccccatggagcactttgcccggcacagcgccctgaccatccccccaacagctggcccccacccctttgccagcttccaccctggcctgaaccccctggagcgggagcggctggccctggccggcccccagctgcggcctgagatgagctacccagaccggctggccgctgagcgcatccatgctgagaggatggccagcctgaccagtgaccccctggcccggctgcagatgtttaatgtgaccccccaccaccaccagcacagccacatccacagccacctgcacctgcaccagcaggaccccctgcaccagggcagcgctggccctgtgcaccccctggtggaccccctgacagctggcccccacctggcccgcttcccctacccacctggcaccctgcccaaccccctgctgggccagccccctcatgaacatgagatgctgcggcaccctgtgtttggcaccccctacccccgggacctgcccggggccatccccccacccatgtctgctgcccaccagctgcaggccatgcacgcccagagcgctgagctgcagaggctggccatggagcagcagtggctgcacggccacccccacatgcacggcggccacctgcccagccaggaggactactacagccggctgaagaaggagggggacaagcagctgtag

SEQ ID NO: 144018 - DNA, 4701 bp, synthetic construct; identical to SEQ ID NO: 144016
  misc_feature 1..4701: note = Description of Artificial Sequence: Synthetic coding sequence
  source 1..4701: mol_type = other DNA

SEQ ID NO: 144019 - DNA, 3039 bp, synthetic construct
  misc_feature 1..3039: note = Description of Artificial Sequence: Synthetic coding sequence
  source 1..3039: mol_type = other DNA
atgttcaagcctgtgaaggaggaggatgatggcctgagcggcaagcacagcatgaggaccaggaggagccggggctccatgagcaccctgcggagcggcaggaagaagcagcctgccagcccagatggccgcaccagccccatcaatgaagacatccgcagcagtggaagaaacagccccagcgctgccagcaccagcagcaatgacagcaaggccgagaccgtgaagaagagcgccaagaaggtgaaggaggaggccagcagccccctgaagagcaacaagaggcagcgggagaaggtggccagtgacacagaggaggccgacaggaccagcagcaagaagaccaagacccaggagatcagccggcccaacagccccagcgagggggagggggagagcagtgacagccgctctgtgaatgatgagggcagcagtgaccccaaggacatcgaccaggacaacagaagcaccagccccagcatccccagcccccaggacaatgaaagtgacagcgacagcagcgcccagcagcagatgctgcaggcccagcccccagccctgcaggcccccactggagtgaccccagcccccagcagcgcccctcctggcaccccccagctgcccaccccaggccccaccccatctgccacagctgtgcccccccagggcagccccacagccagccaggcccccaaccagccccaggcccccacagcccctgtgccccacacccacatccagcaggccccagccctgcacccccagaggcctcccagcccccaccccccaccccaccccagcccccacccccccctgcagcccctgaccggcagcgctggccagcccagcgcccccagccacgcccagccccccctgcacggccagggccccccaggcccccacagcctgcaggccggccccctgctgcagcaccctggccccccccagcccttcggcctgcccccccaggccagccagggccaggcccccctgggcaccagccctgctgctgcctacccccacaccagcctgcagctgcctgccagccagagcgccctgcagagccagcagcccccccgggagcagcccctgcccccagcccccctggccatgccccacatcaagcccccacccaccacccccatcccccagctgcctgccccccaggcccacaagcaccccccccacctgagcggccccagccccttctccatgaatgccaacctgcccccacctccagccctgaagcccctgagcagcctgagcacccaccacccccccagcgcccaccccccacccctgcagctgatgccccagagccagcccctgcccagcagccctgcccagcccccaggcctgacccagagccagaacctgcccccacctccagccagccaccccccaacaggcctgcaccaggtggccccccagcccccatttgcccagcacccctttgtgcctgggggccccccacccatcaccccacccacctgccccagcaccagcaccccacctgctggccctggcaccagcgcccagcccccctgcagcggggccgccgccagcggcggcagcattgctgggggcagcagctgccccctgcccaccgtgcagatcaaggaggaggccctggatgatgctgaggagcctgagagccccccacctccacccaggagccccagccctgagcccaccgtggtggacacccccagccacgccagccagagcgcccgcttctacaagcacctggaccggggctacaacagctgtgccaggacagacctgtacttcatgcccctggccggcagcaagctggccaagaagcgggaggaggccatcgagaaggccaagcgggaggccgagcagaaggcccgggaggagcgggagcgggagaaggagaaggagaaggagcgggagcgggagcgggagcgggagcgggaggccgagagagctgccaaggccagcagcagcgcccacgagggccgcctgagtgacccccagctgagcggccctggccacatgaggcccagctttgagcccccacccaccaccatcgctgctgtgcccccctacatcggccctgacaccccagccctgcggaccctgtctgaatatgcccggccccacgtgatgagccccaccaacagaaaccaccccttctacatgcccctgaaccccacagaccccctgctggcctaccacatgcctggcctgtacaacgtggaccccaccatccgggagcgggagctgcgggagcgggagatccgggagcgggagatccgggagcgggagctgcgggagaggatgaagccaggctttgaggtgaagcccccagagctggaccccctgcaccctgctgccaaccccatggagcactttgcccggcacagcgccctgaccatccccccaacagctggcccccacccctttgccagcttccaccctggcctgaaccccctggagcgggagcggctggccctggccggcccccagctgcggcctgagatgagctacccagaccggctggccgctgagcgcatccatgctgagaggatggccagcctgaccagtgaccccctggcccggctgcagatgtttaatgtgaccccccaccaccaccagcacagccacatccacagccacctgcacctgcaccagcaggaccccctgcaccagggcagcgctggccctgtgcaccccctggtggaccccctgacagctggcccccacctggcccgcttcccctacccacctggcaccctgcccaaccccctgctgggccagccccctcatgaacatgagatgctgcggcaccctgtgtttggcaccccctacccccgggacctgcccggggccatccccccacccatgtctgctgcccaccagctgcaggccatgcacgcccagagcgctgagctgcagaggctggccatggagcagcagtggctgcacggccacccccacatgcacggcggccacctgcccagccaggaggactactacagccggctgaagaaggagggggacaagcagctgtag

SEQ ID NO: 144020 - DNA, 1953 bp, synthetic construct
  misc_feature 1..1953: note = Description of Artificial Sequence: Synthetic coding sequence
  source 1..1953: mol_type = other DNA
atggccagcggggagcacagccctggcagcggggccgcccggcggcccctgcacagcgcccaggccgtggatgtggccagcgccagcaacttccgggcctttgagctgctgcacctgcacctggacctgcgggcagagtttggacctcctggccctggggccggcagccggggcctgagcggcacagctgtgctggacctgcgctgcctggagcctgagggcgctgctgagctgcggctggacagccacccctgcctggaggtgacagctgctgccctgcggcgggagcggcccggcagcgaggagcccccagctgagcctgtgtccttctacacccagcccttcagccactacggccaggccctgtgtgtgtccttcccccagccctgcagagctgctgagcggctgcaggtgctgctgacctacagagtgggggagggccctggggtgtgctggctggcccctgagcagacagctgggaagaagaagccctttgtgtacacccagggccaggccgtgctgaacagagccttcttcccctgctttgacaccccagctgtgaagtacaagtacagcgccctgattgaggtgcctgatggcttcaccgctgtgatgtctgccagcacctgggagaagaggggccccaacaagttcttcttccagatgtgccagcccatccccagctacctgattgccctggccatcggggacctggtgtctgctgaggtgggccccaggagccgggtgtgggccgagccctgcctgattgatgctgccaaggaggagtacaacggggtgattgaggagttcctggccactggagagaagctgtttggcccctacgtgtggggccgctatgacctgctcttcatgccacccagcttcccctttggaggcatggagaacccctgcctgacctttgtgaccccctgcctgctggccggggacaggagcctggctgatgtgatcatccacgagatcagccacagctggtttggaaacctggtgaccaatgccaactggggcgagttctggctgaatgaaggcttcaccatgtatgcccagaggcgcatcagcaccatcctgtttggagctgcctacacctgcctggaggccgccaccggccgggccctgctgcggcagcacatggacatcaccggggaggagaaccccctgaacaagctgcgggtgaagattgagcccggggtggaccctgatgacacctacaatgagaccccctatgagaagggcttctgctttgtgtcctacctggcccacctggtgggggaccaggaccagtttgacagcttcctgaaggcctacgtgcatgagttcaagttccgcagcatcctggctgatgacttcctggacttctacctggagtacttccctgagctgaagaagaagagggtggacatcatccctggctttgaatttgaccgctggctgaacaccccaggctggccaccctacctgcctgacctgagccctggggacagcctgatgaagccagctgaggagctggcccagctgtgggccgctgaggagctggacatgaaggccatcgaggccgtggccatcagcccctggaagacctaccagctggtgtacttcctggacaagatcctgcagaagagccccctgcccccaggaaatgtgaagaagctgggggacacctaccccagcatcagcaatgccagaaatgctgagctgcggctgcgctggggccagatcgtgctgaagaatgaccaccaggaggacttctggaaggtgaaggagttcctgcacaaccagggcaagcagaagtacaccctgcccctgtaccacgccatgatgggcggcagcgaggtggcccagaccctggccaaggagacctttgccagcacagccagccagctgcacagcaatgtggtgaactacgtgcagcagatcgtggcccccaagggcagctag

SEQ ID NO: 144021 - DNA, 1836 bp, synthetic construct
  misc_feature 1..1836: note = Description of Artificial Sequence: Synthetic coding sequence
  source 1..1836: mol_type = other DNA
atggccagcggggagcacagccctggcagcggggccgcccggcggcccctgcacagcgcccaggccgtggatgtggccagcgccagcaacttccgggcctttgagctgctgcacctgcacctggacctgcgggcagagtttggacctcctggccctggggccggcagccggggcctgagcggcacagctgtgctggacctgcgctgcctggagcctgagggcgctgctgagctgcggctggacagccacccctgcctggaggtgacagctgctgccctgcggcgggagcggcccggcagcgaggagcccccagctgagcctgtgtccttctacacccagcccttcagccactacggccaggccctgtgtgtgtccttcccccagccctgcagagctgctgagcggctgcaggtgctgctgacctacagagtgggggagggccctggggtgtgctggctggcccctgagcagacagctgggaagaagaagccctttgtgtacacccagggccaggccgtgctgaacagagccttcttcccctgctttgacaccccagctgtgaagtacaagtacagcgccctgattgaggtgcctgatggcttcaccgctgtgatgtctgccagcacctgggagaagaggggccccaacaagttcttcttccagatgtgccagcccatccccagctacctgattgccctggccatcggggacctggtgtctgctgaggtgggccccaggtatgacctgctcttcatgcctccttccttcccctttggaggcatggagaacccctgcctgacctttgtgaccccctgcctgctggccggggacaggagcctggctgatgtgatcatccacgagatcagccacagctggtttggaaacctggtgaccaatgccaactggggcgagttctggctgaatgaaggcttcaccatgtatgcccagaggcgcatcagcaccatcctgtttggagctgcctacacctgcctggaggccgccaccggccgggccctgctgcggcagcacatggacatcactggagaggagaaccccctgaacaagctgcgggtgaagattgagcccggggtggaccctgatgacacctacaatgagaccccctatgagaagggcttctgctttgtgtcctacctggcccacctggtgggggaccaggaccagtttgacagcttcctgaaggcctacgtgcatgagttcaagttccgcagcatcctggctgatgacttcctggacttctacctggagtacttccctgagctgaagaagaagagggtggacatcatccctggctttgaatttgaccgctggctgaacaccccaggctggccaccctacctgcctgacctgagccctggggacagcctgatgaagccagctgaggagctggcccagctgtgggccgctgaggagctggacatgaaggccattgaagctgtggccatcagcccctggaagacctaccagctggtgtacttcctggacaagatcctgcagaagagccccctgcccccaggaaatgtgaagaagctgggggacacctaccccagcatcagcaatgccagaaatgctgagctgcggctgcgctggggccagatcgtgctgaagaatgaccaccaggaggacttctggaaggtgaaggagttcctgcacaaccagggcaagcagaagtacaccctgcccctgtaccacgccatgatgggcggcagcgaggtggcccagaccctggccaaggagacctttgccagcacagccagccagctgcacagcaatgtggtgaactacgtgcagcagatcgtggcccccaagggcagctag

SEQ ID NO: 144022 - DNA, 1035 bp, synthetic construct
  misc_feature 1..1035: note = Description of Artificial Sequence: Synthetic coding sequence
  source 1..1035: mol_type = other DNA
atgacctgctgcagctgcaccagcctgagcgccctgctggacttctgggccgaggtgtgctggctggcccctgagcagacagctgggaagaagaagccctttgtgtacacccagggccaggccgtgctgaacagagccttcttcccctgctttgacaccccagctgtgaagtacaagtacagcgccctgattgaggtgcctgatggcttcaccgctgtgatgtctgccagcacctgggagaagaggggccccaacaagttcttcttccagatgtgccagcccatccccagctacctgattgccctggccatcggggacctggtgtctgctgaggtgggccccaggagccgggtgtgggccgagccctgcctgattgatgctgccaaggaggagtacaatggagtcatcgaggagttcctggccaccggggagaagctgtttggcccctacgtgtggggccgctatgacctgctcttcatgcctccttccttcccctttggaggcatggagaacccctgcctgacctttgtgaccccctgcctgctggccggggacaggagcctggctgatgtgatcatccacgagatcagccacagctggtttggaaacctggtgaccaatgccaactggggcgagttctggctgaatgaaggcttcaccatgtatgcccagaggcgcatcagcaccatcctgtttggagctgcctacacctgcctggaggccgccaccggccgggccctgctgcggcagcacatggacatcactggagaggagaaccccctgaacaagctgcgggtgaagattgagcccggggtggaccctgatgacacctacaatgagaccccctatgagaagggcttctgctttgtgtcctacctggcccacctggtgggggaccaggaccagtttgacagcttcctgaaggcctacgtgcatgagttcaagttccgcagcatcctggctgatgacttcctggacttctacctggagtacttccctgagctgaagaagaagagggtggacatcatcccctag

SEQ ID NO: 144023 - DNA, 507 bp, synthetic construct
  misc_feature 1..507: note = Description of Artificial Sequence: Synthetic coding sequence
  source 1..507: mol_type = other DNA
ctcattgatgctgccaaggaggagtacaacggggtgattgaggagttcctggccactggagagaagctgtttggcccctacgtgtggggccgctatgacctgctcttcatgccacccagcttcccctttggaggcatggagaacccctgcctgacctttgtgaccccctgcctgctggccggggacaggagcctggctgatgtgatcatccacgagatcagccacagctggtttggaaacctggtgaccaatgccaactggggcgagttctggctgaatgaaggcttcaccatgtatgcccagaggcgcatcagcaccatcctgtttggagtggaccctgatgacacctacaatgagaccccctatgagaagggcttctgctttgtgtcctacctggcccacctggtgggggaccaggaccagtttgacagcttcctgaaggcctacgtgcatgagttcaagttccgcagcatcctggctgatgacttcctggacttctacctgtag

SEQ ID NO: 144024 - DNA, 1485 bp, synthetic construct
  misc_feature 1..1485: note = Description of Artificial Sequence: Synthetic coding sequence
  source 1..1485: mol_type = other DNA
atgtctgccaccaggtctgcctacatggaggaggagggcgtcttccacttccacatggagcaccctgtgcctgcctacctggtggccctggtggccggggacctgaagccagctgacatcggccccaggagccgggtgtgggccgagccctgcctgctgcccacagccaccagcaagctgtctggagctgtggagcagtggctgtctgctgctgagcggctgtatggcccctacatgtggggccgctatgacatcgtgttcctgcccccatccttccccatcgtggccatggagaacccctgcctgaccttcatcatcagcagcatcctggagagtgatgagttcctggtgattgatgtgatccacgaggtggcccacagctggtttggaaatgctgtgaccaatgccacctgggaggagatgtggctgtctgagggcctggccacctacgcccagaggcgcatcaccacagagacctacggggccgccttcacctgcctggagacagccttccggctggatgccctgcaccggcagatgaagctgctgggggaggacagccctgtgtccaagctgcaggtgaagctggagcccggggtgaaccccagccacctgatgaacctcttcacctatgagaagggctactgctttgtgtactacctgagccagctgtgtggggacccccagagatttgatgacttcctgcgggcctacgtggagaagtacaagttcacctctgtggtggcccaggacctgctggacagcttcctgtccttcttccctgagctgaaggagcagagcgtggactgccgggccggcctggagtttgagcgctggctgaatgccactggaccacccctggccgagccagacctgagccagggcagcagcctgaccaggcctgtggaggccctcttccagctgtggacagctgagcccctggaccaggccgccgccagcgccagcgccatcgacatcagcaagtggaggaccttccagacagccctcttcctggaccggctgctggatggcagccccctgccccaggaggtggtgatgagcctgagcaagtgctacagcagcctgctggacagcatgaatgctgagatccgcatccgctggctgcagatcgtggtgagaaatgactactacccagacctgcaccgggtgcggcgcttcctggagagccagatgagcaggatgtacaccatccccctgtatgaggacctgtgcaccggggccctgaagagctttgccctggaggtgttctaccagacccagggccgcctgcaccccaacctgcggcgggccatccagcagatcctgagccagggcctgggcagcagcacagagcccgccagcgagcccagcacagagctgggcaaggccgaggccgacacagacagtgatgcccaggccctgctgctgggagatgaggcccccagcagcgccatcagcctgagagatgtgaatgtgtctgcctag

SEQ ID NO: 144025 - DNA, 1236 bp, synthetic construct
  misc_feature 1..1236: note = Description of Artificial Sequence: Synthetic coding sequence
  source 1..1236: mol_type = other DNA
atggaggtgaacccccccaagcaggagcacctgctggccctgaaggtgatgaggctgaccaagcccaccctcttcaccaacatccctgtgacctgtgaggagaaggacctgcccggggacctcttcaaccagctgatgagagatgaccccagcacagtgaatggagctgaggtgctgatgctgggggagatgctgaccctgccccagaactttggaaacatcttcctgggggagaccttcagcagctacatctctgtgcacaatgacagcaaccaggtggtgaaggacatcctggtgaaggctgacctgcagaccagcagccagaggctgaacctgagcgccagcaatgctgctgtggccgagctgaagccagactgctgcattgatgatgtgatccaccacgaggtgaaggagatcggcacccacatcctggtgtgtgctgtgtcctacaccacccaggccggggagaagatgtacttcaggaagttcttcaagttccaggtgctgaagcccctggatgtgaagaccaagttctacaatgctgagacagatgaggtgttcctggaggcccagatccagaacatgaccaccagccccatgttcatggagaaggtgtccctggagcccagcatcatgtacaacgtgacagagctgaacagcgtgtcccaggccggggagtgtgtgtccaccttcggcagccgggcctacctgcagcccatggacacccggcagtacctgtactgcctgaagcccaagaatgaatttgctgagaaggccggcatcatcaagggcgtgaccgtcatcggcaagctggacatcgtgtggaagaccaacctgggggagcggggccgcctgcagaccagccagctgcagaggatggcccctggctatggagatgtgcggctgagcctggaggccatcccagacacagtgaacctggaggagcccttccacatcacctgcaagatcaccaactgcagcgagaggaccatggacctggtgctggagatgtgcaacaccaacagcatccactggtgtggcatcagcggccggcagctgggcaagctgcaccccagcagcagcctgtgcctggccctgaccctgctgagctctgtgcagggcctgcagagcatcagcggcctgcggctgacagacaccttcctgaagaggacctatgaatatgatgacatcgcccaggtgtgtgtggtgtcctctgccatcaaggtggagagctag

SEQ ID NO: 144026 - DNA, 1365 bp, synthetic construct
  misc_feature 1..1365: note = Description of Artificial Sequence: Synthetic coding sequence
  source 1..1365: mol_type = other DNA
atgcacgtgggccacctgcggagcaccatcattggagagagcatcagccggctgtttgaatttgctggctatgatgtgctgcggctgaaccacgtgggggactggggcacccagtttggcatgctgattgcccacctgcaggacaagttcccagactacctgactgtgagcccccccatcggggacctgcaggtgttctacaaggagagcaagaagagatttgacacagaggaggagttcaagaagagggcctaccagtgtgtggtgctgctgcagggcaagaacccagacatcaccaaggcctggaagctgatctgtgatgtgtcccggcaggagctgaacaagatctatgatgccctggatgtgtccctgattgagcggggggagagcttctaccaggacaggatgaatgacatcgtgaaggagtttgaggaccggggctttgtgcaggtggatgatggcaggaagatcgtgtttgtgcccggctgcagcatccccctgaccatcgtgaagagtgatggcggctacacctatgacaccagtgacctggccgccatcaagcagaggctgtttgaggagaaggctgacatgatcatctacgtggtggacaatggccagagcgtgcacttccagaccatctttgctgctgcccagatgattggctggtatgaccccaaggtgaccagggtcttccacgccggctttggagtggtgctgggggaggacaagaagaagttcaagaccaggtctggagaaacagtgcggctgatggacctgctgggggagggcctgaagaggtccatggacaagctgaaggagaaggagcgggacaaggtgctgacagctgaggagctgaatgctgcccagacctctgtggcctacggctgcatcaagtatgctgacctgagccacaaccggctgaatgactacatcttctcctttgacaagatgctggatgaccggggcaacacagctgcctacctgctgtatgccttcacccgcatccgcagcatcgcccggctggccaacattgatgaggagatgctgcagaaggccgcccgggagaccaagatcctgctggaccacgagaaggagtggaagctgggccgctgcatcctgcgcttccctgagatcctgcagaagatcctggatgacctcttcctgcacaccctgtgtgactacatctatgagctggccacagccttcacagagttctatgacagctgctactgtgtggagaaggaccggcagacaggcaagatcctgaaggtgaacatgtggaggatgctgctgtgtgaggccgtggccgctgtgatggccaagggctttgacatcctgggcatcaagcctgtgcagaggatgtag

SEQ ID NO: 144027 - DNA, 618 bp, synthetic construct
  misc_feature 1..618: note = Description of Artificial Sequence: Synthetic coding sequence
  source 1..618: mol_type = other DNA
ttccagagcgtggagagcagcaccaggaagctggaccacatcaacatctgcagcagcaacttccccaagaggagctttgccctggtgacccaggccggcgtgcagtggcacaacctggacagcctgcagagccccccacctggcttcaagcgcttcccctgcctgagcctgcccagctcctgggactgccgggaggtggccgacttccagctgtctgtggacagcctgctggagaaggacaatgaccacagcaggccagacatccaggtgcaggccaagaggctggccgagaagctgcgctgtgacacagtggtgtctgagatcagcacaggccagaggacagtgaacttcaagatcaaccgggagctgctgaccaagacagtgctgcagcaggtgattgaagatggcagcaaatatggcctgaagtctgagctgttcagcggcctgccccagaagaagatcgtggtggagttcagcagccccaacgtggccaagaagttccacgtgggccacctgcggagcaccatcatcggcaacttcatcgccaacctgaaggaggccctgggccaccaggtgatccgcatcaactacctgggggactggggcatgcagttctag

SEQ ID NO: 144028 - DNA, 1737 bp, synthetic construct
  misc_feature 1..1737: note = Description of Artificial Sequence: Synthetic coding sequence
  source 1..1737: mol_type = other DNA
atggcctgtggcttccggcgggccatcgcctgccagctgagccgggtgctgaacctgcccccagagaacctgatcaccagcatctctgctgtgcccatcagccagaaggaggaggtggccgacttccagctgtctgtggacagcctgctggagaaggacaatgaccacagcaggccagacatccaggtgcaggccaagaggctggccgagaagctgcgctgtgacacagtggtgtctgagatcagcacaggccagaggacagtgaacttcaagatcaaccgggagctgctgaccaagacagtgctgcagcaggtgattgaagatggcagcaaatatggcctgaagtctgagctgttcagcggcctgccccagaagaagatcgtggtggagttcagcagccccaacgtggccaagaagttccacgtgggccacctgcggagcaccatcatcggcaacttcatcgccaacctgaaggaggccctgggccaccaggtgatccgcatcaactacctgggggactggggcatgcagtttggcctgctgggcaccggcttccagctgtttggctatgaggagaagctgcagagcaaccccctgcagcacctgtttgaggtgtatgtgcaggtgaacaaggaggccgcagatgacaagtctgtggccaaggccgcccaggagttcttccagaggctggagctgggagatgtgcaggccctgagcctgtggcagaagttccgggacctgagcattgaggagtacatccgggtgtacaagaggctgggcgtgtactttgatgagtacagcggggagagcttctaccgggagaagagccaggaggtgctgaagctgctggagagcaagggcctgctgctgaagaccatcaagggcacagctgtggtggacctgtctggaaatggagaccccagcagcatctgcaccgtgatgagaagtgatggcaccagcctgtatgccacccgggacctggccgccgccatcgacaggatggacaagtacaactttgacaccatgatctacgtgacagacaagggccagaagaagcacttccagcaggtgttccagatgctgaagatcatgggctatgactgggccgagcgctgccagcacgtgccctttggagtggtgcagggcatgaagaccaggagaggagatgtgaccttcctggaggatgtgctgaatgagatccagctgaggatgctgcagaacatggccagcatcaagaccaccaaggagctgaagaacccccaggagacagctgagcgggtgggcctggccgccctgatcatccaggacttcaagggcctgctgctgagtgactacaagttctcctgggacagagtcttccagagcagaggagacacaggagtcttcctgcagtacacccacgcccggctgcacagcctggaggagaccttcggctgcggctacctgaatgacttcaacacagcctgcctgcaggagccccagagcgtgtccatcctgcagcacctgctgcgctttgatgaggtgctgtacaagagcagccaggacttccagcccaggcacatcgtgtcctacctgctgaccctgagccacctggccgctgtggcccacaagaccctgcagatcaaggacagccccccagaggtggccggggcccggctgcacctgttcaaggctgtgcgctctgtgctggccaacggcatgaagctgctgggcatcacccctgtgtgcaggatgtag

SEQ ID NO: 144029 - DNA, 621 bp, synthetic construct
  misc_feature 1..621: note = Description of Artificial Sequence: Synthetic coding sequence
  source 1..621: mol_type = other DNA
tgattccagagcgtggagagcagcaccaggaagctggaccacatcaacatctgcagcagcaacttccccaagaggagctttgccctggtgacccaggccggcgtgcagtggcacaacctggacagcctgcagagccccccacctggcttcaagcgcttcccctgcctgagcctgcccagctcctgggactgccgggaggtggccgacttccagctgtctgtggacagcctgctggagaaggacaatgaccacagcaggccagacatccaggtgcaggccaagaggctggccgagaagctgcgctgtgacacagtggtgtctgagatcagcacaggccagaggacagtgaacttcaagatcaaccgggagctgctgaccaagacagtgctgcagcaggtgattgaagatggcagcaaatatggcctgaagtctgagctgttcagcggcctgccccagaagaagatcgtggtggagttcagcagccccaacgtggccaagaagttccacgtgggccacctgcggagcaccatcatcggcaacttcatcgccaacctgaaggaggccctgggccaccaggtgatccgcatcaactacctgggggactggggcatgcagttctag

SEQ ID NO: 144030 - DNA, 1482 bp, synthetic construct
  misc_feature 1..1482: note = Description of Artificial Sequence: Synthetic coding sequence
  source 1..1482: mol_type = other DNA
atgtctgtggacatgaacagccagggcagtgacagcaatgaagaagattatgaccccaactgtgaggaggaggaggaggaggaggaggatgaccccggggacatcgaggactactacgtgggcgtggccagtgatgtggagcagcagggcgcagatgcctttgatcctgaggagtaccagttcacctgcctgacctacaaggagagcgagggcgccctgaatgagcacatgaccagcctggcctctgtgctgaaggtgagccacagcgtggccaagctgatcctggtgaacttccactggcaggtgtctgagatcctggaccgctacaagagcaacagcgcccagctgctggtggaggcccgggtgcagcccaaccccagcaagcacgtgcccaccagccaccccccccaccactgtgctgtgtgcatgcagtttgtgaggaaagaaaacctgctgagcctggcctgccagcaccagttctgccgcagctgctgggagcagcactgcagcgtgctggtgaaggatggagtgggcgtgggcgtgtcctgcatggcccaggactgccccctgcggaccccagaggactttgtgttccccctgctgcccaatgaggagctgcgggagaagtaccgccgctacctgttccgggactatgtggagagccactaccagctgcagctgtgccctggagctgactgccccatggtgatccgggtgcaggagccccgggccaggagagtgcagtgcaaccgctgcaatgaggtgttctgcttcaagtgccggcagatgtaccacgcccccacagactgtgccaccatcaggaagtggctgaccaagtgtgctgatgacagcgagacagccaactacatcagcgcccacaccaaggactgccccaagtgcaacatctgcatcgagaagaatggaggctgcaaccacatgcagtgcagcaagtgcaagcatgacttctgctggatgtgcctgggggactggaagacccacggcagcgagtactatgaatgtagccgctacaaggaaaatccagacatcgtgaaccagagccagcaggcccaggcccgggaggccctgaagaagtacctgttctactttgagcgctgggagaaccacaacaagagcctgcagctggaggcccagacctaccagaggatccacgagaagatccaggagcgggtgatgaacaacctgggcacctggattgactggcagtacctgcagaatgctgccaagctgctggccaagtgccgctacaccctgcagtacacctacccctatgcctactacatggagagcggccccaggaagaagctgtttgagtaccagcaggcccagctggaggccgagattgagaacctgtcctggaaggtggagagagctgacagctatgacagaggagacctggagaaccagatgcacatcgccgagcagaggaggaggaccctgctgaaggacttccatgacacctag

SEQ ID NO: 144031 - DNA, 954 bp, synthetic construct
  misc_feature 1..954: note = Description of Artificial Sequence: Synthetic coding sequence
  source 1..954: mol_type = other DNA
ggcatcactggagtgtcctgcatggcccaggactgccccctgcggaccccagaggactttgtgttccccctgctgcccaatgaggagctgcgggagaagtaccgccgctacctgttccgggactatgtggagagccactaccagctgcagctgtgccctggagctgactgccccatggtgatccgggtgcaggagccccgggccaggagagtgcagtgcaaccgctgcaatgaggtgttctgcttcaagtgccggcagatgtaccacgcccccacagactgtgccaccatcaggaagtggctgaccaagtgtgctgatgacagcgagacagccaactacatcagcgcccacaccaaggactgccccaagtgcaacatctgcatcgagaagaatggaggctgcaaccacatgcagtgcagcaagtgcaagcatgacttctgctggatgtgcctgggggactggaagacccacggcagcgagtactatgaatgtagccgctacaaggaaaatccagacatcgtgaaccagagccagcaggcccaggcccgggaggccctgaagaagtacctgttctactttgagcgctgggagaaccacaacaagagcctgcagctggaggcccagacctaccagaggatccacgagaagatccaggagcgggtgatgaacaacctgggcacctggattgactggcagtacctgcagaatgctgccaagctgctggccaagtgccgctacaccctgcagtacacctacccctatgcctactacatggagagcggccccaggaagaagctgtttgagtaccagcaggcccagctggaggccgagattgagaacctgtcctggaaggtggagagagctgacagctatgacagaggagacctggagaaccagatgcacatcgccgagcagaggaggaggaccctgctgaaggacttccatgacacctag

SEQ ID NO: 144032 - DNA, 1233 bp, synthetic construct
  misc_feature 1..1233: note = Description of Artificial Sequence: Synthetic coding sequence
  source 1..1233: mol_type = other DNA
tctgtggacatgaacagccagggcagtgacagcaatgaggaggactatgaccccaactgtgaggaggaggaggaggaggaggaggatgatcctggggacatcgaggactactacgtgggcgtggccagtgatgtggagcagcagggcgcagatgcctttgatcctgaggagtaccagttcacctgcctgacctacaaggagagcgagggcgccctgaatgagcacatgaccagcctggcctctgtgctgaaggtgagccacagcgtggccaagctgatcctggtgaacttccactggcaggtgtctgagatcctggaccgctacaagagcaacagcgcccagctgctggtggaggcccgggtgcagcccaaccccagcaagcacgtgcccaccagccaccccccccaccactgtgctgtgtgcatgcagtttgtgaggaaggagaacctgctgagcctggcctgccagcaccagttctgccgcagctgctgggagcagcactgcagcgtgctggtgaaggatggagtgggcgtgggcgtgtcctgcatggcccaggactgccccctgcggaccccagaagattttgtgttccccctgctgcccaatgaggagctgcgggagaagtaccgccgctacctgttccgggactatgtggagagccactaccagctgcagctgtgccctggagctgactgccccatggtgatccgggtgcaggagccccgggcccggcgggtgcagtgcaaccgctgcaatgaggtgttctgcttcaagtgccggcagatgtaccacgcccccacagactgtgccaccatcaggaagtggctgaccaagtgtgctgatgattctgaaacagccaactacatcagcgcccacaccaaggactgccccaagtgcaacatctgcatcgagaagaatggaggctgcaaccacatgcagtgcagcaagtgcaagcatgacttctgctggatgtgcctgggggactggaagacccacggcagcgagtactatgagtgcagccgctacaaggagaacccagacatcgtgaaccagagccagcaggcccaggcccgggaggccctgaagaagtacctgttctactttgagcggctggagaacctgtcctggaaggtggagagagctgacagctatgacagaggagacctggagaaccagatgcacatcgccgagcagaggaggaggaccctgctgaaggacttccatgacacctag

SEQ ID NO: 144033 - DNA, 1482 bp, synthetic construct; identical to SEQ ID NO: 144030
  misc_feature 1..1482: note = Description of Artificial Sequence: Synthetic coding sequence
  source 1..1482: mol_type = other DNA

SEQ ID NO: 144034 - DNA, 1584 bp, synthetic construct
  misc_feature 1..1584: note = Description of Artificial Sequence: Synthetic coding sequence
  source 1..1584: mol_type = other DNA
ctgcggcgggccgccagcggccccctggcccccagcctgcccccaccccggcccccccggcggcaccagcccagcaatgccaacagaagatcctggggcggggccgccgcccggggggccggggcccggcctgccagcggccaccagcctgagcctgagcgggagcccggcccccggcggccccggcccctgcctgccagcgcctctgtgagaagagccccagcccggcgggccatggacagtgatgagggctacaactatgaatttgtgaatgaagtcatccagaacccagccaccatcacccgcatcctgctgagccacttcaactgggacaaggagaagctgatggagcgctactttgatggcaacctggagaagctgtttgctgagtgccacgtgatcaaccccagcaagaagagcaggacccggcagatgaacaccaggagcagcgcccaggacatgccctgccagatctgctacctgaactaccccaacagctacttcaccggcctggagtgtggccacaagttctgcatgcagtgctggagcgagtacctgaccaccaagatcatggaggagggcatgggccagaccatcagctgcccagcccacggctgtgacatcctggtggatgacaacacagtgatgaggctcatcacagacagcaaggtgaagctgaagtaccagcacctgatcaccaacagctttgtggagtgcaaccggctgctgaagtggtgcccagccccagactgccaccacgtggtgaaggtgcagtacccagatgccaagcctgtgcgctgcaagtgtggccggcagttctgcttcaactgtggggagaactggcatgaccctgtgaagtgcaagtggctgaagaagtggatcaagaagtgtgatgatgattctgagaccagcaactggattgctgccaacaccaaggaatgtcccaagtgccacgtgaccatcgagaaggatggcggctgcaaccacatggtgtgcaggaaccagaactgcaaggccgagttctgctgggtgtgcctgggcccctgggagccccacggcagcgcctggtacaactgcaaccgctacaatgaagatgatgccaaggccgccagagatgcccaggagaggagcagagctgccctgcagcgctacctgttctactgcaaccgctacatgaaccacatgcagagcctgcgctttgagcacaagctgtatgcccaggtgaagcagaagatggaggagatgcagcagcacaacatgtcctggattgaggtgcagttcctgaagaaggctgtggatgtgctgtgccagtgccgggccaccctgatgtacacctacgtgtttgccttctacctgaagaagaacaaccagagcatcatctttgagaacaaccaggccgacctggagaatgccacagaggtgctgagcggctacctggagcgggacatcagccaggacagcctgcaggacatcaagcagaaggtgcaggacaagtaccgctactgtgagagcagaagaagagtgctgctgcagcacgtgcatgagggctatgagaaggacctgtgggagtacatcgaggactag

SEQ ID NO: 144035 - DNA, 1674 bp, synthetic construct
  misc_feature 1..1674: note = Description of Artificial Sequence: Synthetic coding sequence
  source 1..1674: mol_type = other DNA
atggacagtgatgagggctacaactatgaatttgatgaagatgaggagtgcagcgaggaggacagcggggctgaggaggaggaggatgaagatgatgatgagccagatgatgacaccctggacctgggggaggtggagctggtggagcccggcctgggcgtgggcggggagagagatggcctgctgtgtggggagaccggcggcggcggcggcagcgccctgggccctgggggcggcggcggcggcggcggcggcggcggcggcggcggccctggccacgagcaggaggaggactaccgctatgaggtgctgacagctgagcagatcctgcagcacatggtggagtgcatccgggaggtgaatgaagtcatccagaacccagccaccatcacccgcatcctgctgagccacttcaactgggacaaggagaagctgatggagcgctactttgatggcaacctggagaagctgtttgctgagtgccacgtgatcaaccccagcaagaagagcaggacccggcagatgaacaccaggagcagcgcccaggacatgccctgccagatctgctacctgaactaccccaacagctacttcaccggcctggagtgtggccacaagttctgcatgcagtgctggagcgagtacctgaccaccaagatcatggaggagggcatgggccagaccatcagctgcccagcccacggctgtgacatcctggtggatgacaacacagtgatgaggctcatcacagacagcaaggtgaagctgaagtaccagcacctgatcaccaacagctttgtggagtgcaaccggctgctgaagtggtgcccagccccagactgccaccacgtggtgaaggtgcagtacccagatgccaagcctgtgcgctgcaagtgtggccggcagttctgcttcaactgtggggagaactggcatgaccctgtgaagtgcaagtggctgaagaagtggatcaagaagtgtgatgatgattctgagaccagcaactggattgctgccaacaccaaggaatgtcccaagtgccacgtgaccatcgagaaggatggcggctgcaaccacatggtgtgcaggaaccagaactgcaaggccgagttctgctgggtgtgcctgggcccctgggagccccacggcagcgcctggtacaactgcaaccgctacaatgaagatgatgccaaggccgccagagatgcccaggagaggagcagagctgccctgcagcgctacctgttctactgcaaccgctacatgaaccacatgcagagcctgcgctttgagcacaagctgtatgcccaggtgaagcagaagatggaggagatgcagcagcacaacatgtcctggattgaggtgcagttcctgaagaaggctgtggatgtgctgtgccagtgccgggccaccctgatgtacacctacgtgtttgccttctacctgaagaagaacaaccagagcatcatctttgagaacaaccaggccgacctggagaatgccacagaggtgctgagcggctacctggagcgggacatcagccaggacagcctgcaggacatcaagcagaaggtgcaggacaagtaccgctactgtgagagcagaagaagagtgctgctgcagcacgtgcatgagggctatgagaaggacctgtgggagtacatcgaggactag

SEQ ID NO: 144036 - DNA, 1689 bp, synthetic construct
  misc_feature 1..1689: note = Description of Artificial Sequence: Synthetic coding sequence
  source 1..1689: mol_type = other DNA
atgagcaaccagtaccaggaggagggctgcagcgagaggcctgagtgcaagagcaagagccccaccctgctgagcagctactgcatcgacagcatcctgggcagaagaagcccctgcaagatgaggctgctgggcgccgcccagagcctgcctgcccccctgaccagcagagctgaccctgagaaggctgtgcagggcagccccaagagcagcagcgccccctttgaagctgagctgcacctgccccccaagctgcggcggctgtatggccctgggggcggccgcctgctgcagggcgctgctgctgctgctgctgctgctgctgctgctgctgctgctgctgccacagccacagctggccccagaggagaggcccctcctcctcctccacccacagcccggcctggagagaggccagatggagctggagctgctgctgctgctgctgctgctgctgctgctgcctgggacaccctgaagatcagccaggccccccaggtgtccatcagccgcagcaagagctacagagaaaatggagccccctttgtgcccccacctccagccctggatgagctgggcggccctggaggagtgacccaccctgaggagcggctgggcgtggccggcggccctggcagcgccccagctgctgggggcggcactggaacagaagatgatgaggaggagctgctggaggatgaagaagatgaagatgaggaggaggagctgctggaggatgatgaggaggagctgctggaggatgatgcccgggccctgctgaaggagccccggcgctgccctgtggccgccactggagctgtggccgctgctgctgctgctgctgtggccacagagggcggggagctgagccccaaggaggagctgctgctgcacccagaagatgctgagggcaaggatggagaggacagcgtgtgcctgtctgctggcagtgacagcgaggagggcctgctgaagaggaagcagaggcgctaccgcaccaccttcaccagctaccagctggaggagctggagcgggccttccagaagacccactacccagatgtgttcacccgggaggagctggccatgaggctggacctgacagaggcccgggtgcaggtgtggttccagaacagaagagccaagtggaggaagcgggagaaggccggggcccagacccaccccccaggcctgcccttccctggccccctgagcgccacccaccccctgagcccctacctggatgccagccccttccccccccaccacccagccctggacagcgcctggacagctgctgctgctgctgctgctgctgccttccccagcctgcccccacctcctggcagcgccagcctgccccccagcggggcccccctgggcctgagcaccttcctgggcgctgctgtgttccgccacccagccttcatcagccctgccttcggccgcctcttcagcaccatggcccccctgaccagcgccagcacagctgctgccctgctgcggcagcccaccccagctgtggagggcgctgtggccagcggggccctggccgaccctgccacagctgctgctgacagaagagccagcagcattgctgccctgcggctgaaggccaaggagcacgccgcccagctgacccagctgaacatcctgcccggcaccagcacaggcaaggaggtgtgctag

SEQ ID NO: 144037 - DNA, 1032 bp, synthetic construct
  misc_feature 1..1032: note = Description of Artificial Sequence: Synthetic coding sequence
  source 1..1032: mol_type = other DNA
atgggcggccccagaggagctggctgggtggccgccggcctgctgctgggcgctggggcctgctactgcatctaccgcctgacccggggcagaagaagaggagaccgggagctgggcatccgcagcagcaagtctgctggggccctggaggagggcaccagcgagggccagctgtgtggccgcagcgcccggccccagacaggaggcacctgggagagccagtggagcaagaccagccagcctgaggacctgacagatggcagctatgatgatgtgctgaatgctgagcagctgcagaagctgctgtacctgctggagagcacagaagatcctgtgatcatcgagcgggccctgatcaccctgggcaacaatgctgccttctctgtgaaccaggccatcatccgggagctgggcggcatccccatcgtggccaacaagatcaaccacagcaaccagagcatcaaggagaaggccctgaatgccctgaacaacctgtctgtgaatgtggagaaccagatcaagatcaagatctacatcagccaggtgtgtgaagatgtgttcagcggccccctgaacagcgctgtgcagctggccggcctgaccctgctgaccaacatgacagtgaccaatgaccaccagcacatgctgcacagctacatcacagacctcttccaggtgctgctgactggaaatggaaacaccaaggtgcaggtgctgaagctgctgctgaacctgtctgaaaatcctgccatgacagagggcctgctgcgggcccaggtggacagcagcttcctgagcctgtatgacagccacgtggccaaggagatcctgctgcgggtgctgaccctcttccagaacatcaagaactgcctgaagattgagggccacctggccgtgcagcccaccttcacagagggcagcctcttcttcctgctgcatggagaggagtgtgcccagaagatccgggccctggtggaccaccatgatgctgaggtgaaggagaaggtggtgaccatcatccccaagatctag

SEQ ID NO: 144038 - DNA, 855 bp, synthetic construct
  misc_feature 1..855: note = Description of Artificial Sequence: Synthetic coding sequence
  source 1..855: mol_type = other DNA
atgggcggccccagaggagctggctgggtggccgccggcctgctgctgggcgctggggcctgctactgcatctaccgcctgacccggggcagaagaagaggagaccgggagctgggcatccgcagcagcaagtctgctgaggacctgacagatggcagctatgatgatgtgctgaatgctgagcagctgcagaagctgctgtacctgctggagagcacagaggaccccgtcatcatcgagcgggccctgatcaccctgggcaacaatgctgccttctctgtgaaccaggccatcatccgggagctgggcggcatccccatcgtggccaacaagatcaaccacagcaaccagagcatcaaggagaaggccctgaatgccctgaacaacctgtctgtgaatgtggagaaccagatcaagatcaagatctacatcagccaggtgtgtgaagatgtgttttctggccccctgaacagcgctgtgcagctggccggcctgaccctgctgaccaacatgacagtgaccaatgaccaccagcacatgctgcacagctacatcacagacctcttccaggtgctgctgactggaaatggaaacaccaaggtggacagcagcttcctgagcctgtatgacagccacgtggccaaggagatcctgctgcgggtgctgaccctcttccagaacatcaagaactgcctgaagattgagggccacctggccgtgcagcccaccttcacagagggcagcctcttcttcctgctgcacggggaggagtgtgcccagaagatccgggccctggtggaccaccatgatgctgaggtgaaggagaaggtggtgaccatcatccccaagatctag

SEQ ID NO: 144039 - DNA, 855 bp, synthetic construct
  misc_feature 1..855: note = Description of Artificial Sequence: Synthetic coding sequence
  source 1..855: mol_type = other DNA
atgggcggccccagaggagctggctgggtggccgccggcctgctgctgggcgctggggcctgctactgcatctaccgcctgacccggggcagaagaagaggagaccgggagctgggcatccgcagcagcaagtctgctggggccctggaggagggcaccagcgagggccagctgtgtggccgcagcgcccggccccagacaggaggcacctgggagagccagtggagcaagaccagccagcctgaggacctgacagatggcagctatgatgatgtgctgaatgctgagcagctgcagaagctgctgtacctgctggagagcacagaagatcctgtgatcatcgagcgggccctgatcaccctgggcaacaatgctgccttctctgtgaaccaggccatcatccgggagctgggcggcatccccatcgtggccaacaagatcaaccacagcaaccagagcatcaaggagaaggccctgaatgccctgaacaacctgtctgtgaatgtggagaaccagatcaagatcaaggtgcaggtgctgaagctgctgctgaacctgtctgagaacccagccatgacagagggcctgctgcgggcccaggtggacagcagcttcctgagcctgtatgacagccacgtggccaaggagatcctgctgcgggtgctgaccctcttccagaacatcaagaactgcctgaagattgagggccacctggccgtgcagcccaccttcacagagggcagcctcttcttcctgctgcacggggaggagtgtgcccagaagatccgggccctggtggaccaccatgatgctgaggtgaaggagaaggtggtgaccatcatccccaagatctag

SEQ ID NO: 144040 - DNA, 927 bp, synthetic construct
  misc_feature 1..927: note = Description of Artificial Sequence: Synthetic coding sequence
  source 1..927: mol_type = other DNA
atgggcggccccagaggagctggctgggtggccgccggcctgctgctgggcgctggggcctgctactgcatctaccgcctgacccggggcagaagaagaggagaccgggagctgggcatccgcagcagcaagtctgctgaggacctgacagatggcagctatgatgatgtgctgaatgctgagcagctgcagaagctgctgtacctgctggagagcacagaggaccccgtcatcatcgagcgggccctgatcaccctgggcaacaatgctgccttctctgtgaaccaggccatcatccgggagctgggcggcatccccatcgtggccaacaagatcaaccacagcaaccagagcatcaaggagaaggccctgaatgccctgaacaacctgtctgtgaatgtggagaaccagatcaagatcaagatctacatcagccaggtgtgtgaagatgtgttttctggccccctgaacagcgctgtgcagctggccggcctgaccctgctgaccaacatgacagtgaccaatgaccaccagcacatgctgcacagctacatcacagacctcttccaggtgctgctgactggaaatggaaacaccaaggtgcaggtgctgaagctgctgctgaacctgtctgagaacccagccatgacagagggcctgctgcgggcccaggtggacagcagcttcctgagcctgtatgacagccacgtggccaaggagatcctgctgcgggtgctgaccctcttccagaacatcaagaactgcctgaagattgagggccacctggccgtgcagcccaccttcacagagggcagcctcttcttcctgctgcacggggaggagtgtgcccagaagatccgggccctggtggaccaccatgatgctgaggtgaaggagaaggtggtgaccatcatccccaagatctag

SEQ ID NO: 144041 - DNA, 750 bp, synthetic construct
  misc_feature 1..750: note = Description of Artificial Sequence: Synthetic coding sequence
  source 1..750: mol_type = other DNA
atgggcggccccagaggagctggctgggtggccgccggcctgctgctgggcgctggggcctgctactgcatctaccgcctgacccggggcagaagaagaggagaccgggagctgggcatccgcagcagcaagtctgctgaggacctgacagatggcagctatgatgatgtgctgaatgctgagcagctgcagaagctgctgtacctgctggagagcacagaggaccccgtcatcatcgagcgggccctgatcaccctgggcaacaatgctgccttctctgtgaaccaggccatcatccgggagctgggcggcatccccatcgtggccaacaagatcaaccacagcaaccagagcatcaaggagaaggccctgaatgccctgaacaacctgtctgtgaatgtggagaaccagatcaagatcaaggtgcaggtgctgaagctgctgctgaacctgtctgaaaatcctgccatgacagagggcctgctgcgggcccaggtggacagcagcttcctgagcctgtatgacagccacgtggccaaggagatcctgctgcgggtgctgaccctcttccagaacatcaagaactgcctgaagattgagggccacctggccgtgcagcccaccttcacagagggcagcctcttcttcctgctgcatggagaggagtgtgcccagaagatccgggccctggtggaccaccatgatgctgaggtgaaggagaaggtggtgaccatcatccccaagatctag

SEQ ID NO: 144042 - DNA, 678 bp, synthetic construct
  misc_feature 1..678: note = Description of Artificial Sequence: Synthetic coding sequence
  source 1..678: mol_type = other DNA
atgggcggccccagaggagctggctgggtggccgccggcctgctgctgggcgctggggcctgctactgcatctaccgcctgacccggggcagaagaagaggagaccgggagctgggcatccgcagcagcaagtctgctgaggacctgacagatggcagctatgatgatgtgctgaatgctgagcagctgcagaagctgctgtacctgctggagagcacagaggaccccgtcatcatcgagcgggccctgatcaccctgggcaacaatgctgccttctctgtgaaccaggccatcatccgggagctgggcggcatccccatcgtggccaacaagatcaaccacagcaaccagagcatcaaggagaaggccctgaatgccctgaacaacctgtctgtgaatgtggagaaccagatcaagatcaaggtggacagcagcttcctgagcctgtatgacagccacgtggccaaggagatcctgctgcgggtgctgaccctcttccagaacatcaagaactgcctgaagattgagggccacctggccgtgcagcccaccttcacagagggcagcctcttcttcctgctgcatggagaggagtgtgcccagaagatccgggccctggtggaccaccatgatgctgaggtgaaggagaaggtggtgaccatcatccccaagatctag

SEQ ID NO: 144043 - DNA, 1362 bp, synthetic construct
  misc_feature 1..1362: note = Description of Artificial Sequence: Synthetic coding sequence
  source 1..1362: mol_type = other DNA
atgggccgcacccgggaggccggctgtgtggccgccggcgtggtgattggagctggggcctgctactgtgtgtaccgcctggcctggggcagagatgaaaatgagaagatctgggatgaagatgaggagagcacagacaccagcgagattggagtggagaccgtgaagggggccaagaccaatgctggggccggcagcggggccaagctgcagggcgacagcgaggtgaagccagaggtgtccctgggcctggaggactgccctggggtgaaggagaaggcccacagcggcagccacagcggcggcggcctggaggccaaggccaaggccctcttcaacaccctgaaggagcaggccagcgccaaggccgggaaaggagcccgggtgggcaccatcagcggcaacagaaccctggcccccagcctgccctgccctgggggccggggcggcggctgccaccccaccaggagcggcagcagagctgggggccgggccagcggcaagagcaagggcaaggcccggagcaagagcacccgggccccagccaccacctggcctgtgcggcggggcaagttcaacttcccctacaagattgatgacatcctgagcgccccagacctgcagaaggtgctgaacatcctggagaggaccaatgaccccttcatccaggaggtggccctggtgaccctgggcaacaatgctgcctacagcttcaaccagaatgccatccgggagctgggcggcgtgcccatcatcgccaagctgatcaagaccaaggaccccatcatccgggagaagacctacaatgccctgaacaacctgtctgtgaatgctgagaaccagggcaagatcaagacctacatcagccaggtgtgtgatgacaccatggtgtgccgcctggacagcgctgtgcagatggccggcctgcggctgctgaccaacatgacagtgaccaaccactaccagcacctgctgagctacagcttcccagacttctttgccctgctcttcctgggcaaccacttcaccaagatccagatcatgaagctgatcatcaacttcacagagaacccagccatgacccgggagctggtgtcctgcaaggtgcccagcgagctgatcagcctcttcaacaaggagtgggaccgggagatcctgctgaacatcctgaccctgtttgagaacatcaatgacaacatcaagaatgaaggcctggccagcagcaggaaggagttcagccgcagcagcctcttcttcctgttcaaggagagcggcgtgtgtgtgaagaagatcaaggccctggccaaccacaatgacctggtggtgaaggtgaaggtgctgaaggtgctgaccaagctgtag

SEQ ID NO: 144044 - DNA, 477 bp, synthetic construct
  misc_feature 1..477: note = Description of Artificial Sequence: Synthetic coding sequence
  source 1..477: mol_type = other DNA
atggtgtgccgcctggacagcgctgtgcagatggccggcctgcggctgctgaccaacatgacagtgaccaaccactaccagcacctgctgagctacagcttcccagacttctttgccctgctcttcctgggcaaccacttcaccaagatccagatcatgaagctgatcatcaacttcacagaaaatcctgccatgacccgggagctggtgtcctgcaaggtgcccagcgagctgatcagcctcttcaacaaggagtgggaccgggagatcctgctgaacatcctgaccctgtttgagaacatcaatgacaacatcaagaatgaaggcctggccagcagcaggaaggagttcagccgcagcagcctcttcttcctgttcaaggagagcggcgtgtgtgtgaagaagatcaaggccctggccaaccacaatgacctggtggtgaaggtgaaggtgctgaaggtgctgaccaagctgtag

SEQ ID NO: 144045 - DNA, 1899 bp, synthetic construct
  misc_feature 1..1899: note = Description of Artificial Sequence: Synthetic coding sequence
  source 1..1899: mol_type = other DNA
atgagccgggtgagagatgctggctgtgtggccgccggcatcgtcatcggggccggggcctggtactgtgtgtacaagtacacccggggccgggaccagaccaagaagaggatggccaagcccaagaacagagctgtggccggcactggagcccgggcccgggccggcctgcgggccggcttcaccatcgacctgggcagcggcttcagcccccccacccctgtgcgggcagaggccgaggaccgggcccaggatgaggccagcgccctggacacagtgggcgctgaggccgtggccccagctgccagcagcgctgaggcccagagcggggccggcagccaggcccaggaggctgatggagctggggtgggccccaaggccgagagcgtggtgggcgccgccatggccagcgccatcgcccctcctcctggggtgacagaggccctgggcgctgctgaggccccagccatggccggggcccccaaggtggccgaggccccccgggaggccgagaccagcagagctgctgtgcccccaggcaccgtggtgcccacagaagctgctgcccccacagaggtgacagagggccctggggtggccgcccccaccaaggtggccgaggcccctggggtggccagccccacagaagctgctgaggcccctgtgcctgccacccccactggagctgctgcccccactggagctgctgagagccctggcaccagcggcagccccaggacagctgtggtgcccggcaccagcgctgccaagaaggccacccctggggcccacactggagccatccccaaggccaccagcgccactggagctgtgcccaagggcggcggcaagggcgtgaccaggagcagaaatggaggcaagggcaagggcaagaagagcaaggtggaggtggatgagctgggcatgggcttccggcctggagatggagctgctgctgctgctgctgccagcgccaacggcggccaggccttcctggccgaggtgcctgacagcgaggagggggagagcggctggacagacacagaaagtgacagcgacagcgagcctgagacccagaggcggggccggggcagaagacctgtggccatgcagaagaggcccttcccctatgaaattgatgagatcctgggcgtgcgggacctgaggaaggtgctggccctgctgcagaagagtgatgaccccttcatccagcaggtggccctgctgaccctgagcaacaatgccaactacagctgcaaccaggagaccatcaggaagctgggcggcctgcccatcatcgccaacatgatcaacaagacagacccccacatcaaggagaaggccctgatggccatgaacaacctgtctgaaaattatgagaaccagggccgcctgcaggtgtacatgaacaaggtgatggatgacatcatggccagcaacctgaacagcgctgtgcaggtggtgggcctgaagttcctgaccaacatgaccatcaccaatgactaccagcacctgctggtgaacagcatcgccaacttcttccggctgctgagccagggcggcggcaagatcaaggtggagatcctgaagatcctgagcaactttgctgaaaatccagacatgctgaagaagctgctgagcacccaggtgcctgccagcttcagcagcctgtacaacagctatgtggagagcgagatcctgatcaatgccctgaccctgtttgagatcatctatgacaacctgcgggcagaggtgttcaactaccgggagttcaacaagggcagcctcttctacctgtgcaccaccagcggcgtgtgtgtgaagaagatccgggccctggccaaccaccacgacctgctggtgaaggtgaaggtgatcaagctggtgaacaagttctag

SEQ ID NO: 144046 - DNA, 1899 bp, synthetic construct; identical to SEQ ID NO: 144045
  misc_feature 1..1899: note = Description of Artificial Sequence: Synthetic coding sequence
  source 1..1899: mol_type = other DNA

SEQ ID NO: 144047 - DNA, 1899 bp, synthetic construct; identical to SEQ ID NO: 144045
  misc_feature 1..1899: note = Description of Artificial Sequence: Synthetic coding sequence
  source 1..1899: mol_type = other DNA

SEQ ID NO: 144048 - DNA, 504 bp, synthetic construct
  misc_feature 1..504: note = Description of Artificial Sequence: Synthetic coding sequence
  source 1..504: mol_type = other DNA
atgagccgggtgagagatgctggctgtgtggccgccggcatcgtcatcggggccggggcctggtactgtgtgtacaagtacacccggggccgggaccagaccaagaagaggatggccaagcccaagaacagagctgtggccggcactggagcccgggcccgggccggcctgcgggccggcttcaccatcgacctgggcagcggcttcagcccccccacccctgtgcgggcagaggccgaggaccgggcccaggatgaggccagcgccctggacacagtgggcgctgaggccgtggccccagctgccagcagcgctgaggcccagagcggggccggcagccaggcccaggaggctgatggagctggggtgggccccaaggccgagagcgtggtgggcgccgccatggccagcgccatcgcccctcctcctggggtgacagaggccctgggcgctgctgaggccccagccatggccggggcccccaaggtggccgaggccccctag

SEQ ID NO: 144049 - DNA, 189 bp, synthetic construct
  misc_feature 1..189: note = Description of Artificial Sequence: Synthetic coding sequence
  source 1..189: mol_type = other DNA
atgagccgggtgagagatgctggctgtgtggccgccggcatcgtcatcggggccggggcctggtactgtgtgtacaagtacacccggggccgggaccagaccaagaagaggatggccaagcccaagaacagagctgtggccggcactggagcccgggcccgggccggcctgcgggccggcttcacctag

SEQ ID NO: 144050 - DNA, 498 bp, synthetic construct
  misc_feature 1..498: note = Description of Artificial Sequence: Synthetic coding sequence
  source 1..498: mol_type = other DNA
atgagccgggtgagagatgctggctgtgtggccgccggcatcgtcatcggggccggggcctggtactgtgtgtacaagtacacccggggccgggaccagaccaagaagaggatggccaagcccaagaacagagctgtggccggcactggagcccgggcccgggccggcctgcgggccggcttcaccatcgacctgggcagcggcttcagcccccccacccctgtgcgggcagaggccgaggaccgggcccaggatgaggccagcgccctggacacagtgggcgctgaggccgtggccccagctgccagcagcgctgaggcccagagcggggccggcagccaggcccaggaggctgatggagctggggtgggccccaaggccgagagcgtggtgggcgccgccatggccagcgccatcgcccctcctcctggggtgacagaggccctgggcgctgctgaggccccagccatggccggggcccccaaggtggccgagtag

SEQ ID NO: 144051 - DNA, 318 bp, synthetic construct
  misc_feature 1..318: note = Description of Artificial Sequence: Synthetic coding sequence
  source 1..318: mol_type = other DNA
atgagccgggtgagagatgctggctgtgtggccgccggcatcgtcatcggggccggggcctggtactgtgtgtacaagtacacccggggccgggaccagaccaagaagaggatggccaagcccaagaacagagctgtggccggcactggagcccgggcccgggccggcctgcgggccggcttcaccatcgacctgggcagcggcttcagcccccccacccctgtgcgggcagaggccgaggaccgggcccaggatgaggccagcgccctggacacagtgggcgctgaggccgtggccccagctgccagcagcgcctag

SEQ ID NO: 144052 - DNA, 282 bp, synthetic construct
  misc_feature 1..282: note = Description of Artificial Sequence: Synthetic coding sequence
  source 1..282: mol_type = other DNA
atgagccgggtgagagatgctggctgtgtggccgccggcatcgtcatcggggccggggcctggtactgtgtgtacaagtacacccggggccgggaccagaccaagaagaggatggccaagcccaagaacagagctgtggccggcactggagcccgggcccgggccggcctgcgggccggcttcaccatcgacctgggcagcggcttcagcccccccacccctgtgcgggcagaggccgaggaccgggcccaggatgaggccagcgccctggacacagtgtag

SEQ ID NO: 144053 - DNA, 1140 bp, synthetic construct
  misc_feature 1..1140: note = Description of Artificial Sequence: Synthetic coding sequence
  source 1..1140: mol_type = other DNA
atgggctacgccaggaaggtgggctgggtgacagctggcctggtgattggagctggggcctgctactgcatctaccgcctgacccggggcaggaagcagaacaaggagaagatggccgagggcggcagcggagatgtggatgatgctggggactgcagcggggcccgctacaatgactggagcgatgatgatgatgacagcaatgaaagcaagagcatcgtgtggtacccaccctgggcccgcatcggcacagaggccggcacccgggcccgggcccgggcccgggcccgggccacccgggcccggcgggctgtgcagaagagggccagccccaacagtgatgacacagtgctgagcccccaggagctgcagaaggtgctgtgcctggtggagatgtctgagaagccctacatcctggaggccgccctgattgccctgggcaacaatgctgcctatgccttcaacagagacatcatccgggacctgggcggcctgcccatcgtggccaagatcctgaacacccgggaccccatcgtgaaggagaaggccctgattgtgctgaacaacctgtctgtgaatgctgagaaccagaggcggctgaaggtgtacatgaaccaggtgtgtgatgacaccatcaccagccggctgaacagctctgtgcagctggccggcctgcggctgctgaccaacatgacagtgaccaatgagtaccagcacatgctggccaacagcatcagtgacttcttccgcctcttctctgctggaaatgaggagaccaagctgcaggtgctgaagctgctgctgaacctggccgagaacccagccatgacccgggagctgctgcgggcccaggtgcccagcagcctgggcagcctcttcaacaagaaggagaacaaggaggtgatcctgaagctgctggtgatctttgagaacatcaatgacaacttcaagtgggaggagaatgagcccacccagaaccagtttggagagggcagcctcttcttcttcctgaaggagttccaggtgtgtgccgacaaggtgctgggcatcgagagccaccacgacttcctggtgaaggtgaaggtgggcaagttcatggccaagctggccgagcacatgttccccaagagccaggagtag

SEQ ID NO: 144054 - DNA, 1140 bp, synthetic construct; identical to SEQ ID NO: 144053
  misc_feature 1..1140: note = Description of Artificial Sequence: Synthetic coding sequence
  source 1..1140: mol_type = other DNA

SEQ ID NO: 144055 - DNA, 2889 bp, synthetic construct
  misc_feature 1..2889: note = Description of Artificial Sequence: Synthetic coding sequence
  source 1..2889: mol_type = other DNA
atggaggactgcaatgtgcacagcgctgccagcatcctggcctctgtgaaggagcaggaggccaggtttgagcggctgacccgggccctggagcaggagcggcggcacgtggccctgcagctggagcgggcccagcagcccggcatggtgtctgggggcatgggcagcggccagcccctgcccatggcctggcagcagctggtgctgcaggagcagagccctggcagccaggccagcctggccaccatgcctgaggccccagatgtgctggaggagaccgtgacagtggaggaggaccccggcacccccaccagccacgtgtccatcgtgaccagtgaagatggcaccaccaggagaacagagaccaaggtgaccaagacagtgaagacagtgaccaccaggacagtgcggcaggtgcctgtgggcccagatggcctgcccctgctggatggcggcccccccctgggcccctttgctgatggagccctggacagacacttcctgctgcggggcggcggccctgtggccaccctgagccgggcctacctgagcagcggcggcggcttccctgagggccctgagccccgggacagccccagctatggcagcctgagccggggcctgggcatgaggcctcccagggctggccccctgggccctggccctggagatggctgcttcaccctgcccggccaccgggaggccttccctgtgggccctgagcccggccccccaggcggccgcagcctgcctgagcgcttccaggccgagccctacggcctggaggatgacaccaggagcctggccgcagatgatgagggcggccctgagctggagccagactatggaacagccacccggcggcggccagaatgtggccggggcctgcacacccgggcctatgaggacacagcagatgatggaggagagctggctgatgagaggcctgccttccccatggtgacagcccccctggcccagcctgagcggggctccatgggcagcctggaccggctggtgagaagaagccccagcgtggacagcgccaggaaggagccccgctggagggaccctgagctgcctgaggtgctggccatgctgcggcaccctgtggaccctgtgaaggccaatgctgctgcctacctgcagcacctgtgctttgaaaatgaaggagtgaagagaagagtgcggcagctgcggggcctgcccctgctggtggccctgctggaccaccccagggctgaggtgagaagaagagcctgtggggccctgaggaacctgtcctatggccgggacacagacaacaaggccgccatccgggactgtggcggcgtgcctgccctggtgcggctgctgcgggccgcccgggacaatgaggtgcgggagctggtgacaggcaccctgtggaacctgagcagctatgagcccctgaagatggtgatcatcgaccacggcctgcagaccctgacccatgaagtcatcgtgccccacagcggctgggagcgggagcccaatgaagacagcaagcccagagatgctgagtggaccaccgtcttcaagaacaccagcggctgcctgagaaatgtgtccagtgatggagctgaggcccggcggcggctgcgggagtgtgagggcctggtggatgccctgctgcacgccctgcagagcgctgtgggcaggaaggacacagacaacaagtctgtggagaactgtgtgtgcatcatgaggaacctgagctaccacgtgcacaaggaggtgcctggagctgaccgctaccaggaggccgagcccggccccctgggcagcgctgtgggcagccagaggagaagaagagatgatgccagctgctttggaggcaagaaggccaaggaggagtggttccaccagggcaagaaggatggagagatggacaggaactttgacaccctggacctgcccaagaggacagaagctgccaagggctttgagctgctgtaccagcctgaggtggtgcggctgtacctgagcctgctgacagagagcaggaacttcaacaccctggaggccgccgccggggccctgcagaacctgtctgctggcaactggatgtgggccacctacatccgggccaccgtgaggaaggagcggggcctgcctgtgctggtggagctgctgcagagcgagacagacaaggtggtgcgggctgtggccatcgccctgaggaacctgagcctggacagaagaaacaaggacctgattggcagctatgccatggccgagctggtgagaaatgtgagaaatgcccaggccccacccaggcctggggcctgcctggaggaggacacagtggtggccgtgctgaacaccatccacgagatcgtgtctgacagcctggacaatgcccggagcctgctgcaggcccggggcgtgcctgccctggtggccctggtggccagcagccagagcgtgcgggaggccaaggccgccagccacgtgctgcagacagtgtggagctacaaggagctgcggggcaccctgcagaaggatggctggaccaaggcccgcttccagagcgctgctgccacagccaagggccccaagggggccctgagccctgggggctttgatgacagcaccctgcccctggtggacaagagcctggagggggagaagacaggcagcagagatgtgatccccatggatgccctgggcccagatggctacagcacagtggaccggcgggagcggcggcccaggggggccagcagcgctggggaggccagcgagaaggagcccctgaagctggaccccagcaggaaggcccctcctcctggccccagcaggcctgctgtgcggctggtggatgctgtgggagatgccaagccccagcctgtggacagctgggtgtag

SEQ ID NO: 144056 - DNA, 2700 bp, synthetic construct
  misc_feature 1..2700: note = Description of Artificial Sequence: Synthetic coding sequence
  source 1..2700: mol_type = other DNA
atgcctgctgagctgcggcaggagcagagccctggcagccaggccagcctggccaccatgcctgaggccccagatgtgctggaggagaccgtgacagtggaggaggaccccggcacccccaccagccacgtgtccatcgtgaccagtgaagatggcaccaccaggagaacagagaccaaggtgaccaagacagtgaagacagtgaccaccaggacagtgcggcaggtgcctgtgggcccagatggcctgcccctgctggatggcggcccccccctgggcccctttgctgatggagccctggacagacacttcctgctgcggggcggcggccctgtggccaccctgagccgggcctacctgagcagcggcggcggcttccctgagggccctgagccccgggacagccccagctatggcagcctgagccggggcctgggcatgaggcctccccgggccggccccctgggccctggccctggagatggctgcttcaccctgcccggccaccgggaggccttccctgtgggccctgagcccggccccccaggcggccgcagcctgcctgagcgcttccaggccgagccctacggcctggaggatgacaccaggagcctggccgcagatgatgaaggaggccctgagctggagccagactatggaacagccaccaggagaagaccagaatgtggccggggcctgcacacccgggcctatgaggacacagcagatgatggaggagagctggctgatgagaggcctgccttccccatggtgacagcccccctggcccagcctgagcggggctccatgggcagcctggaccggctggtgcggcgcagccccagcgtggacagcgccaggaaggagccccgctggagggaccctgagctgcctgaggtgctggccatgctgcggcaccctgtggaccctgtgaaggccaatgctgctgcctacctgcagcacctgtgctttgaaaatgaaggagtgaagagaagagtgcggcagctgcggggcctgcccctgctggtggccctgctggaccaccccagggctgaggtgagaagaagagcctgtggggccctgaggaacctgtcctatggccgggacacagacaacaaggccgccatccgggactgtggcggcgtgcctgccctggtgcggctgctgcgggccgcccgggacaatgaggtgcgggagctggtgacaggcaccctgtggaacctgagcagctatgagcccctgaagatggtgatcatcgaccacggcctgcagaccctgacccatgaggtgattgtgccccacagcggctgggagcgggagcccaatgaagacagcaagcccagagatgctgagtggaccaccgtcttcaagaacaccagcggctgcctgagaaatgtgtccagtgatggagctgaggcccggcggcggctgagagaatgtgagggcctggtggatgccctgctgcacgccctgcagagcgctgtgggcaggaaggacacagacaacaagtctgtggagaactgtgtgtgcatcatgaggaacctgagctaccacgtgcacaaggaggtgcctggagctgaccgctaccaggaggccgagcccggccccctgggcagcgctgtgggcagccagaggagaagaagagatgatgccagctgcttcggcggcaagaaggccaaggaggagtggttccaccagggcaagaaggatggagagatggacaggaactttgacaccctggacctgcccaagaggacagaggccgccaagggctttgagctgctgtaccagcctgaggtggtgcggctgtacctgagcctgctgacagagagcaggaacttcaacaccctggaggccgctgctggggccctgcagaacctgtctgctggcaactggatgtgggccacctacatccgggccaccgtgaggaaggagcggggcctgcctgtgctggtggagctgctgcagagcgagacagacaaggtggtgcgggctgtggccatcgccctgaggaacctgagcctggacagaagaaacaaggacctgattggcagctatgccatggccgagctggtgagaaatgtgagaaatgcccaggccccacccaggcctggggcctgcctggaggaggacacagtggtggccgtgctgaacaccatccatgaaattgtgtctgacagcctggacaatgcccggagcctgctgcaggcccggggcgtgcctgccctggtggccctggtggccagcagccagagcgtgcgggaggccaaggccgccagccacgtgctgcagacagtgtggagctacaaggagctgcggggcaccctgcagaaggatggctggaccaaggcccgcttccagagcgctgctgccacagccaagggccccaagggggccctgagccctgggggctttgatgacagcaccctgcccctggtggacaagagcctggagggggagaagacaggcagcagagatgtgatccccatggatgccctgggcccagatggctacagcacagtggacagaagagagcggcggcccaggggggccagcagcgctggggaggccagcgagaaggagcccctgaagctggaccccagcaggaaggcccctcctcctggccccagcaggcctgctgtgcggctggtggatgctgtgggagatgccaagccccagcctgtggacagctgggtgtag

SEQ ID NO: 144057 - DNA, 2700 bp, synthetic construct; identical to SEQ ID NO: 144056
  misc_feature 1..2700: note = Description of Artificial Sequence: Synthetic coding sequence
  source 1..2700: mol_type = other DNA

SEQ ID NO: 144058 - DNA, 2871 bp, synthetic construct
  misc_feature 1..2871: note = Description of Artificial Sequence: Synthetic coding sequence
  source 1..2871: mol_type = other DNA
atggaggactgcaatgtgcacagcgctgccagcatcctggcctctgtgaaggagcaggaggccaggtttgagcggctgacccgggccctggagcaggagcggcggcacgtggccctgcagctggagcgggcccagcagcccggcatggtgtctgggggcatgggcagcggccagcccctgcccatggcctggcagcagctggtgctgcaggagcagagccctggcagccaggccagcctggccaccatgcctgaggccccagatgtgctggaggagaccgtgacagtggaggaggaccccggcacccccaccagccacgtgtccatcgtgaccagtgaagatggcaccaccaggagaacagagaccaaggtgaccaagacagtgaagacagtgaccaccaggacagtgcggcaggtgcctgtgggcccagatggcctgcccctgctggatggcggcccccccctgggcccctttgctgatggagccctggacagacacttcctgctgcggggcggcggccctgtggccaccctgagccgggcctacctgagcagcggcggcggcttccctgagggccctgagccccgggacagccccagctatggcagcctgagccggggcctgggcatgaggcctcccagggctggccccctgggccctggccctggagatggctgcttcaccctgcccggccaccgggaggccttccctgtgggccctgagcccggccccccaggcggccgcagcctgcctgagcgcttccaggccgagccctacggcctggaggatgacaccaggagcctggccgcagatgatgagggcggccctgagctggagccagactatggaacagccacccggcggcggccagaatgtggccggggcctgcacacccgggcctatgaggacacagcagatgatggaggagagctggctgatgagaggcctgccttccccatggtgacagcccccctggcccagcctgagcggggctccatgggcagcctggaccggctggtgagaagaagccccagcgtggacagcgccaggaaggagccccgctggagggaccctgagctgcctgaggtgctggccatgctgcggcaccctgtggaccctgtgaaggccaatgctgctgcctacctgcagcacctgtgctttgaaaatgaaggagtgaagagaagagtgcggcagctgcggggcctgcccctgctggtggccctgctggaccaccccagggctgaggtgagaagaagagcctgtggggccctgaggaacctgtcctatggccgggacacagacaacaaggccgccatccgggactgtggcggcgtgcctgccctggtgcggctgctgcgggccgcccgggacaatgaggtgcgggagctggtgacaggcaccctgtggaacctgagcagctatgagcccctgaagatggtgatcatcgaccacggcctgcagaccctgacccatgaagtcatcgtgccccacagcggctgggagcgggagcccaatgaagacagcaagcccagagatgctgagtggaccaccgtcttcaagaacaccagcggctgcctgagaaatgtgtccagtgatggagctgaggcccggcggcggctgcgggagtgtgagggcctggtggatgccctgctgcacgccctgcagagcgctgtgggcaggaaggacacagacaacaagtctgtggagaactgtgtgtgcatcatgaggaacctgagctaccacgtgcacaaggaggtgcctggagctgaccgctaccaggaggccgagcccggccccctgggcagcgctgtgggcagccagaggagaagaagagatgatgccagctgctttggaggcaagaaggccaagggcaagaaggatggagagatggacaggaactttgacaccctggacctgcccaagaggacagaagctgccaagggctttgagctgctgtaccagcctgaggtggtgcggctgtacctgagcctgctgacagagagcaggaacttcaacaccctggaggccgccgccggggccctgcagaacctgtctgctggcaactggatgtgggccacctacatccgggccaccgtgaggaaggagcggggcctgcctgtgctggtggagctgctgcagagcgagacagacaaggtggtgcgggctgtggccatcgccctgaggaacctgagcctggacagaagaaacaaggacctgattggcagctatgccatggccgagctggtgagaaatgtgagaaatgcccaggccccacccaggcctggggcctgcctggaggaggacacagtggtggccgtgctgaacaccatccacgagatcgtgtctgacagcctggacaatgcccggagcctgctgcaggcccggggcgtgcctgccctggtggccctggtggccagcagccagagcgtgcgggaggccaaggccgccagccacgtgctgcagacagtgtggagctacaaggagctgcggggcaccctgcagaaggatggctggaccaaggcccgcttccagagcgctgctgccacagccaagggccccaagggggccctgagccctgggggctttgatgacagcaccctgcccctggtggacaagagcctggagggggagaagacaggcagcagagatgtgatccccatggatgccctgggcccagatggctacagcacagtggaccggcgggagcggcggcccaggggggccagcagcgctggggaggccagcgagaaggagcccctgaagctggaccccagcaggaaggcccctcctcctggccccagcaggcctgctgtgcggctggtggatgctgtgggagatgccaagccccagcctgtggacagctgggtgtag

SEQ ID NO: 144059 - DNA, 2682 bp, synthetic construct
  misc_feature 1..2682: note = Description of Artificial Sequence: Synthetic coding sequence
  source 1..2682: mol_type = other DNA
atgcctgctgagctgcggcaggagcagagccctggcagccaggccagcctggccaccatgcctgaggccccagatgtgctggaggagaccgtgacagtggaggaggaccccggcacccccaccagccacgtgtccatcgtgaccagtgaagatggcaccaccaggagaacagagaccaaggtgaccaagacagtgaagacagtgaccaccaggacagtgcggcaggtgcctgtgggcccagatggcctgcccctgctggatggcggcccccccctgggcccctttgctgatggagccctggacagacacttcctgctgcggggcggcggccctgtggccaccctgagccgggcctacctgagcagcggcggcggcttccctgagggccctgagccccgggacagccccagctatggcagcctgagccggggcctgggcatgaggcctccccgggccggccccctgggccctggccctggagatggctgcttcaccctgcccggccaccgggaggccttccctgtgggccctgagcccggccccccaggcggccgcagcctgcctgagcgcttccaggccgagccctacggcctggaggatgacaccaggagcctggccgcagatgatgaaggaggccctgagctggagccagactatggaacagccaccaggagaagaccagaatgtggccggggcctgcacacccgggcctatgaggacacagcagatgatggaggagagctggctgatgagaggcctgccttccccatggtgacagcccccctggcccagcctgagcggggctccatgggcagcctggaccggctggtgcggcgcagccccagcgtggacagcgccaggaaggagccccgctggagggaccctgagctgcctgaggtgctggccatgctgcggcaccctgtggaccctgtgaaggccaatgctgctgcctacctgcagcacctgtgctttgaaaatgaaggagtgaagagaagagtgcggcagctgcggggcctgcccctgctggtggccctgctggaccaccccagggctgaggtgagaagaagagcctgtggggccctgaggaacctgtcctatggccgggacacagacaacaaggccgccatccgggactgtggcggcgtgcctgccctggtgcggctgctgcgggccgcccgggacaatgaggtgcgggagctggtgacaggcaccctgtggaacctgagcagctatgagcccctgaagatggtgatcatcgaccacggcctgcagaccctgacccatgaggtgattgtgccccacagcggctgggagcgggagcccaatgaagacagcaagcccagagatgctgagtggaccaccgtcttcaagaacaccagcggctgcctgagaaatgtgtccagtgatggagctgaggcccggcggcggctgagagaatgtgagggcctggtggatgccctgctgcacgccctgcagagcgctgtgggcaggaaggacacagacaacaagtctgtggagaactgtgtgtgcatcatgaggaacctgagctaccacgtgcacaaggaggtgcctggagctgaccgctaccaggaggccgagcccggccccctgggcagcgctgtgggcagccagaggagaagaagagatgatgccagctgcttcggcggcaagaaggccaagggcaagaaggatggagagatggacaggaactttgacaccctggacctgcccaagaggacagaggccgccaagggctttgagctgctgtaccagcctgaggtggtgcggctgtacctgagcctgctgacagagagcaggaacttcaacaccctggaggccgctgctggggccctgcagaacctgtctgctggcaactggatgtgggccacctacatccgggccaccgtgaggaaggagcggggcctgcctgtgctggtggagctgctgcagagcgagacagacaaggtggtgcgggctgtggccatcgccctgaggaacctgagcctggacagaagaaacaaggacctgattggcagctatgccatggccgagctggtgagaaatgtgagaaatgcccaggccccacccaggcctggggcctgcctggaggaggacacagtggtggccgtgctgaacaccatccatgaaattgtgtctgacagcctggacaatgcccggagcctgctgcaggcccggggcgtgcctgccctggtggccctggtggccagcagccagagcgtgcgggaggccaaggccgccagccacgtgctgcagacagtgtggagctacaaggagctgcggggcaccctgcagaaggatggctggaccaaggcccgcttccagagcgctgctgccacagccaagggccccaagggggccctgagccctgggggctttgatgacagcaccctgcccctggtggacaagagcctggagggggagaagacaggcagcagagatgtgatccccatggatgccctgggcccagatggctacagcacagtggacagaagagagcggcggcccaggggggccagcagcgctggggaggccagcgagaaggagcccctgaagctggaccccagcaggaaggcccctcctcctggccccagcaggcctgctgtgcggctggtggatgctgtgggagatgccaagccccagcctgtggacagctgggtgtag

SEQ ID NO: 144060 - DNA, 1131 bp, synthetic construct
  misc_feature 1..1131: note = Description of Artificial Sequence: Synthetic coding sequence
  source 1..1131: mol_type = other DNA
atggagagctatgacatcatcgccaaccagcctgtggtgattgacaatggcagcggggtcatcaaggccggctttgctggggaccagatccccaagtactgcttccccaactacgtgggccggcccaagcacatgagggtgatggccggggccctggagggggacctcttcatcggccccaaggccgaggagcaccggggcctgctgaccatccgctaccccatggagcacggcgtggtgcgggactggaatgacatggagcgcatctggcagtatgtgtacagcaaggaccagctgcagaccttcagcgaggagcaccctgtgctgctgacagaggcccccctgaaccccagcaagaaccgggagaaggctgctgaggtgttctttgagaccttcaacgtgcctgccctcttcatctccatgcaggccgtgctgagcctgtatgccaccggccgcaccaccggggtggtgctggacagcggagatggagtgacccatgctgtgcccatctatgagggctttgccatgccccacagcatcatgagggtggacattgctggaagagatgtgagccgctacctgcggctgctgctgaggaaggagggcgtggacttccacaccagcgctgagtttgaggtggtgaggaccatcaaggagcgggcctgctacctgagcatcaacccccagaaggatgaggccctggagacagagaaggtgcagtacaccctgcctgatggcagcaccctggatgtgggccctgcccgcttccgggcccctgagctgctcttccagcctgacctggtgggagatgagagcgagggcctgcacgaggtggtggcctttgccatccacaagagtgacatggacctgcggaggaccctgtttgccaacatcgtgctgagcggcggcagcaccctcttcaagggctttggagaccggctgctgtctgaggtgaagaagctggcccccaaggacatcaagatcaagatcagcgccccccaggagcggctgtacagcacctggattggaggcagcatcctggccagcctggacaccttcaagaagatgtgggtgtccaagaaggagtatgaagaagatggcagccgggccatccacaggaagaccttctag

SEQ ID NO: 144061 - DNA, 1167 bp, synthetic construct
  misc_feature 1..1167: note = Description of Artificial Sequence: Synthetic coding sequence
  source 1..1167: mol_type = other DNA
atgagcaaggtgttcaagaagaccagcagcaatggcaagctgagcatctacctgggcaagagggactttgtggaccacgtggacacagtggagcccattgatggagtggtgctggtggaccctgagtacctgaagtgcaggaagctgtttgtgatgctgacctgtgccttccgctatggaagagatgacctggaggtgattggcctgaccttcaggaaggacctgtatgtgcagaccctgcaggtggtgcctgctgagagcagcagcccccagggccccctgactgtgctgcaggagcggctgctgcacaagctgggggacaatgcctaccccttcaccctgcagatggtgaccaacctgccctgcagcgtgaccctgcagcccggcccagaagatgctgggaagccctgtggcatcgactttgaggtgaagagcttctgtgctgaaaatcctgaggagaccgtgtccaagagggactatgtgcggctggtggtgaggaaggtgcagtttgcccctcctgaggccggccctggccccagcgcccagaccatccgccgcttcctgctgagcgcccagcccctgcagctgcaggcctggatggaccgggaggtgcactaccatggagagcccatctctgtgaatgtgtccatcaacaactgcaccaacaaggtgatcaagaagatcaagatctctgtggaccagatcacagatgtggtgctgtacagcctggacaagtacaccaagacagtgttcatccaggagttcacagagaccgtggccgccaacagcagcttcagccagagctttgctgtgacccccatcctggccgccagctgccagaagaggggcctggccctggatggcaagctgaagcatgaggacaccaacctggccagcagcaccatcatccggcccggcatggacaaggagctgctgggcatcctggtgtcctacaaggtgcgggtgaacctgatggtgtcctgtggcggcatcctgggggacctgacagccagtgatgtgggcgtggagctgcccctggtgctgatccaccccaagcccagccatgaagctgccagcagtgaagatattgtgattgaggagttcaccaggaaaggagaggaggagagccagaaggctgtggaggccgagggagatgagggcagctag

SEQ ID NO: 144062 - DNA, 1167 bp, synthetic construct
  misc_feature 1..1167: note = Description of Artificial Sequence: Synthetic coding sequence
  source 1..1167: mol_type = other DNA
atgagcaaggtgttcaagaagaccagcagcaatggcaagctgagcatctacctgggcaagagggactttgtggaccacgtggacacagtggagcccattgatggagtggtgctggtggaccctgagtacctgaagtgcaggaagctgtttgtgatgctgacctgtgccttccgctatggaagagatgacctggaggtgattggcctgaccttcaggaaggacctgtatgtgcagaccctgcaggtggtgcctgctgagagcagcagcccccagggccccctgactgtgctgcaggagcggctgctgcacaagctgggggacaatgcctaccccttcaccctgcagatggtgaccaacctgccctgcagcgtgaccctgcagcccggcccagaagatgctgggaagccctgtggcatcgactttgaggtgaagagcttctgtgctgaaaatcctgaggagaccgtgtccaagagggactatgtgcggctggtggtgaggaaggtgcagtttgcccctcctgaggccggccctggccccagcgcccagaccatccgccgcttcctgctgagcgcccagcccctgcagctgcaggcctggatggaccgggaggtgcactaccatggagagcccatctctgtgaatgtgtccatcaacaactgcaccaacaaggtgatcaagaagatcaagatctctgtggaccagatcacagatgtggtgctgtacagcctggacaagtacaccaagacagtgttcatccaggagttcacagagaccgtggccgccaacagcagcttcagccagagctttgctgtgacccccatcctggccgccagctgccagaagaggggcctggccctggatggcaagctgaagcatgaggacaccaacctggccagcagcaccatcatccggcccggcatggacaaggagctgctgggcatcctggtgtcctacaaggtgcgggtgaacctgatggtgtcctgtggcggcatcctgggggacctgacagccagtgatgtgggcgtggagctgcccctggtgctgatccaccccaagcccagccacgccagcgccagcagtgaagatattgtgattgaggagttcaccaggaaaggagaggaggagagccagaaggctgtggaggccgagggagatgagggcagctag

SEQ ID NO: 144063 - DNA, 1080 bp, synthetic construct
  misc_feature 1..1080: note = Description of Artificial Sequence: Synthetic coding sequence
  source 1..1080: mol_type = other DNA
atgagcaaggtgttcaagaagaccagcagcaatggcaagctgagcatctacctgggcaagagggactttgtggaccacgtggacacagtggagcccattgatggagtggtgctggtggaccctgagtacctgaagtgcaggaagctgtttgtgatgctgacctgtgccttccgctatggaagagatgacctggaggtgattggcctgaccttcaggaaggacctgtatgtgcagaccctgcaggtggtgcctgctgagagcagcagcccccagggccccctgactgtgctgcaggagcggctgctgcacaagctgggggacaatgcctaccccttcaccctgcagatggtgaccaacctgccctgcagcgtgaccctgcagcccggcccagaagatgctgggaagccctgtggcatcgactttgaggtgaagagcttctgtgctgaaaatcctgaggagaccgtgtccaagagggactatgtgcggctggtggtgaggaaggtgcagtttgcccctcctgaggccggccctggccccagcgcccagaccatccgccgcttcctgctgagcgcccagcccctgcagctgcaggcctggatggaccgggaggtgcactaccatggagagcccatctctgtgaatgtgtccatcaacaactgcaccaacaaggtgatcaagaagatcaagatctctgtggaccagatcacagatgtggtgctgtacagcctggacaagtacaccaagacagtgttcatccaggagttcacagagaccgtggccgccaacagcagcttcagccagagctttgctgtgacccccatcctggccgccagctgccagaagaggggcctggccctggatggcaagctgaagcatgaggacaccaacctggccagcagcaccatcatccggcccggcatggacaaggagctgctgggcatcctggtgtcctacaaggtgcgggtgaacctgatggtgtcctgtggcggcatcctgggggacctgacagccagtgatgtgggcgtggagctgcccctggtgctgatccaccccaagcccagccatgaagctgccaggtag

SEQ ID NO: 144064 - DNA, 993 bp, synthetic construct
  misc_feature 1..993: note = Description of Artificial Sequence: Synthetic coding sequence
  source 1..993: mol_type = other DNA
atgggagagaagccaggcaccagggtcttcaagaagagcagccccaactgcaagctgactgtgtacctgggcaagagggactttgtggaccacctggacaaggtggaccctgtggatggagtggtgctggtggaccctgactacctgaaggacaggaaggtgtttgtgaccctgacctgtgccttccgctatggaagagaggacctggatgtgctgggcctgtccttcaggaaggacctcttcatcgccacctaccaggccttcccccctgtgcccaacccccccaggcctcccacccggctgcaggaccggctgctgaggaagctgggccagcacgcccaccccttcttcttcaccatcccccagaacctgccctgcagcgtgaccctgcagcccggcccagaagatactgggaaggcctgtggggtggactttgagatccgggccttctgtgccaagagcctggaggagaagagccacaagaggaacagcgtgcggctggtgatcaggaaggtgcagtttgcccctgagaagccaggcccccagcccagcgctgagaccaccaggcacttcctgatgtctgacaggagcctgcacctggaggccagcctggacaaggagctgtactaccatggagagcccctgaatgtgaatgtgcacgtgaccaacaacagcaccaagacagtgaagaagatcaaggtgtctgtgcggcagtatgctgacatctgcctcttcagcacagcccagtacaagtgccctgtggcccagctggagcaggatgaccagcgggagggcggctgccagcagggcggggccggcaaccctggggtgctgcagggccagggcgaggccggcggcgtgtccagaagaggctgcctgtgtggggccgccttctgcagctatgccccccaggccccccggccccaccccccaccccagacccctgtgagccgcagcggggaccgctgcccctgtggccaccagccccactag

SEQ ID NO: 144065 - DNA, 1245 bp, synthetic construct
  misc_feature 1..1245: note = Description of Artificial Sequence: Synthetic coding sequence
  source 1..1245: mol_type = other DNA
atggtgctgggcaaggtgaagagcctgaccatcagctttgactgcctgaatgacagcaatgtgcctgtgtacagcagcggggacacagtgtctggccgggtgaacctggaggtgactggagagatccgggtgaagagcctgaagatccacgcccggggccacgccaaggtgcgctggacagagagcagaaatgccggcagcaacacagcctacacccagaactacacagaggaggtggagtacttcaaccacaaggacatcctgattggacatgaaagagatgatgacaacagcgaggagggcttccacaccatccacagcggcagacatgaatatgccttctcctttgagctgccccagacccccctggccaccagctttgagggcagacatggctctgtgcgctactgggtgaaggccgagctgcaccggccctggctgctgcctgtgaagctgaagaaggagttcaccgtgtttgagcacatcgacatcaacacccccagcctgctgagcccccaggccggcaccaaggagaagaccctgtgctgctggttctgcaccagcggccccatcagcctgagcgccaagattgaaaggaagggctacaccccaggagagagcatccagatctttgctgagattgagaactgcagcagcaggatggtggtgcccaaggccgccatctaccagacccaggccttctacgccaagggcaagatgaaggaggtgaagcagctggtggccaacctgcggggggagagcctgagcagcggcaagacagagacctggaatggcaagctgctgaagatcccccctgtgagccccagcatcctggactgcagcatcatccgggtggagtacagcctgatggtgtatgtggacatccctggggccatggacctcttcctgaacctgcccctggtgattggcaccatccccctgcaccccttcggcagcaggaccagctctgtgagcagccagtgcagcatgaacatgaactggctgagcctgagcctgcctgagaggcctgaggccccacccagctatgcagaggtggtgacagaggagcagaggaggaacaacctggcccctgtgtctgcctgtgatgactttgagcgggccctgcagggccccctgtttgcctacatccaggagttccgcttcctgcccccacccctgtacagcgagattgaccccaacccagaccagagcgcagatgaccggcccagctgccccagcaggtag

SEQ ID NO: 144066 - DNA, 1233 bp, synthetic construct
  misc_feature 1..1233: note = Description of Artificial Sequence: Synthetic coding sequence
  source 1..1233: mol_type = other DNA
atgggagacaagggcaccagggtcttcaagaaggccagccccaacgggaagctgactgtgtacctgggcaagagggactttgtggaccacatcgacctggtggaccctgtggatggagtggtgctggtggaccctgagtacctgaaggagaggagagtgtatgtgaccctgacctgtgccttccgctatggccgggaggacctggatgtgctgggcctgaccttcaggaaggacctgtttgtggccaacgtgcagagcttccccccagcccctgaggacaagaagcccctgacccggctgcaggagcggctcatcaagaagctgggggagcacgcctaccccttcacctttgagatcccccccaacctgccctgcagcgtgaccctgcagcccggccctgaggacaccgggaaggcctgtggggtggactatgaggtgaaggccttctgtgccgagaacctggaggagaagatccacaagagaaattctgtgcggctggtgatcaggaaggtgcagtatgcccctgagcggcccggcccccagcccacagctgagaccacccggcagttcctgatgtctgacaagcccctgcacctggaggccagcctggacaaggagatctactaccacggggagcccatctctgtgaatgtgcacgtgaccaacaacaccaacaagacagtgaagaagatcaagatctctgtgcggcagtatgctgacatctgcctcttcaacacagcccagtacaagtgccctgtggccatggaggaggctgatgacacagtggcccccagcagcaccttctgcaaggtgtacaccctgacccccttcctggccaacaaccgggagaagaggggcctggccctggatggcaagctgaagcatgaggacaccaacctggccagcagcaccctgctgcgggagggcgccaaccgggagatcctgggcatcatcgtgtcctacaaggtgaaggtgaagctggtggtgtccagaggaggagatgtggccgtggagctgcccttcaccctgatgcaccccaagcccaaggaggagcccccccaccgggaggtgcctgaaaatgagacccctgtggacaccaacctgattgagctggacaccaatgatgatgacatcgtgtttgaagattttgcccggcagaggctgaagggcatgaaggatgacaaggaggaggaggaggatggcaccggcagcccccagctgaacaacagatag

SEQ ID NO: 144067 - DNA, 1257 bp, synthetic construct
  misc_feature 1..1257: note = Description of Artificial Sequence: Synthetic coding sequence
  source 1..1257: mol_type = other DNA
atgggagacaagggcaccagggtcttcaagaaggccagccccaacgggaagctgactgtgtacctgggcaagagggactttgtggaccacatcgacctggtggaccctgtggatggagtggtgctggtggaccctgagtacctgaaggagaggagagtgtatgtgaccctgacctgtgccttccgctatggccgggaggacctggatgtgctgggcctgaccttcaggaaggacctgtttgtggccaacgtgcagagcttccccccagcccctgaggacaagaagcccctgacccggctgcaggagcggctcatcaagaagctgggggagcacgcctaccccttcacctttgagatcccccccaacctgccctgcagcgtgaccctgcagcccggccctgaggacaccgggaaggcctgtggggtggactatgaggtgaaggccttctgtgccgagaacctggaggagaagatccacaagagaaattctgtgcggctggtgatcaggaaggtgcagtatgcccctgagcggcccggcccccagcccacagctgagaccacccggcagttcctgatgtctgacaagcccctgcacctggaggccagcctggacaaggagatctactaccacggggagcccatctctgtgaatgtgcacgtgaccaacaacaccaacaagacagtgaagaagatcaagatctctgtgcggcagtatgctgacatctgcctcttcaacacagcccagtacaagtgccctgtggccatggaggaggctgatgacacagtggcccccagcagcaccttctgcaaggtgtacaccctgacccccttcctggccaacaaccgggagaagaggggcctggccctggatggcaagctgaagcatgaggacaccaacctggccagcagcaccctgctgcgggagggcgccaaccgggagatcctgggcatcatcgtgtcctacaaggtgaaggtgaagctggtggtgtcccggggcggcctgctgcggggcctgtgcttcagtgatgtggccgtggagctgcccttcaccctgatgcaccccaagcccaaggaggagcccccccaccgggaggtgcctgaaaatgagacccctgtggacaccaacctgattgagctggacaccaatgatgatgacatcgtgtttgaagattttgcccggcagaggctgaagggcatgaaggatgacaaggaggaggaggaggatggcaccggcagcccccagctgaacaacagatag

SEQ ID NO: 144068 - DNA, 1257 bp, synthetic construct
  misc_feature 1..1257: note = Description of Artificial Sequence: Synthetic coding sequence
  source 1..1257: mol_type = other DNA
atgggagacaagggcaccagggtcttcaagaaggccagccccaacgggaagctgactgtgtacctgggcaagagggactttgtggaccacatcgacctggtggaccctgtggatggagtggtgctggtggaccctgagtacctgaaggagaggagagtgtatgtgaccctgacctgtgccttccgctatggccgggaggacctggatgtgctgggcctgaccttcaggaaggacctgtttgtggccaacgtgcagagcttccccccagcccctgaggacaagaagcccctgacccggctgcaggagcggctcatcaagaagctgggggagcacgcctaccccttcacctttgagatcccccccaacctgccctgcagcgtgaccctgcagcccggccctgaggacaccgggaaggcctgtggggtggactatgaggtgaaggccttctgtgccgagaacctggaggagaagatccacaagagaaattctgtgcggctggtgatcaggaaggtgcagtatgcccctgagcggcccggcccccagcccacagctgagaccacccggcagttcctgatgtctgacaagcccctgcacctggaggccagcctggacaaggagatctactaccacggggagcccatctctgtgaatgtgcacgtgaccaacaacaccaacaagacagtgaagaagatcaagatctctgtgcggcagtatgctgacatctgcctcttcaacacagcccagtacaagtgccctgtggccatggaggaggctgatgacacagtggcccccagcagcaccttctgcaaggtgtacaccctgacccccttcctggccaacaaccgggagaagaggggcctggccctggatggcaagctgaagcatgaggacaccaacctggccagcagcaccctgctgcgggagggcgccaaccgggagatcctgggcatcatcgtgtcctacaaggtgaaggtgaagctggtggtgtcccggggcggcctgctgggggacctggccagcagtgatgtggccgtggagctgcccttcaccctgatgcaccccaagcccaaggaggagcccccccaccgggaggtgcctgaaaatgagacccctgtggacaccaacctgattgagctggacaccaatgatgatgacatcgtgtttgaagattttgcccggcagaggctgaagggcatgaaggatgacaaggaggaggaggaggatggcaccggcagcccccagctgaacaacagatag

SEQ ID NO: 144069 - DNA, 1230 bp, synthetic construct
  misc_feature 1..1230: note = Description of Artificial Sequence: Synthetic coding sequence
  source 1..1230: mol_type = other DNA
atgggagagaagccaggcaccagggtcttcaagaagagcagccccaactgcaagctgactgtgtacctgggcaagagggactttgtggaccacctggacaaggtggaccctgtggatggagtggtgctggtggaccctgactacctgaaggacaggaaggtgtttgtgaccctgacctgtgccttccgctatggaagagaggacctggatgtgctgggcctgtccttcaggaaggacctcttcatcgccacctaccaggccttcccccctgtgcccaacccccccaggcctcccacccggctgcaggaccggctgctgaggaagctgggccagcacgcccaccccttcttcttcaccatcccccagaacctgccctgcagcgtgaccctgcagcccggcccagaagatactgggaaggcctgtggggtggactttgagatccgggccttctgtgccaagagcctggaggagaagagccacaagaggaacagcgtgcggctggtgatcaggaaggtgcagtttgcccctgagaagccaggcccccagcccagcgctgagaccaccaggcacttcctgatgtctgacaggagcctgcacctggaggccagcctggacaaggagctgtactaccatggagagcccctgaatgtgaatgtgcacgtgaccaacaacagcaccaagacagtgaagaagatcaaggtgtctgtgcggcagtatgctgacatctgcctcttcagcacagcccagtacaagtgccctgtggcccagctggagcaggatgaccaggtgagccccagcagcaccttctgcaaggtgtacaccatcacccccctgctgagtgacaaccgggagaagaggggcctggccctggatggcaagctgaagcatgaggacaccaacctggccagcagcaccatcgtgaaggagggcgccaacaaggaggtgctgggcatcctggtgtcctacagagtgaaggtgaagctggtggtgtccagaggaggagatgtgtctgtggagctgccctttgtgctgatgcaccccaagccccatgaccacatccccctgccccggccccagagcgctgcccctgagacagatgtgcctgtggacaccaacctgattgaatttgacaccaactatgccacagatgatgacatcgtgtttgaagattttgcccggctgcggctgaagggcatgaaggatgatgattatgatgaccagctgtgctag

SEQ ID NO: 144070 - DNA, 1185 bp, synthetic construct
  misc_feature 1..1185: note = Description of Artificial Sequence: Synthetic coding sequence
  source 1..1185: mol_type = other DNA
atgggagagaagccaggcaccagggtcttcaagaagagcagccccaactgcaagctgactgtgtacctgggcaagagggactttgtggaccacctggacaaggtggaccctgtggtgtttgtgaccctgacctgtgccttccgctatggccgggaggacctggatgtgctgggcctgtccttcaggaaggacctcttcatcgccacctaccaggccttcccccctgtgcccaaccccccccggccccccacccggctgcaggaccggctgctgaggaagctgggccagcacgcccaccccttcttcttcaccatcccccagaacctgccctgcagcgtgaccctgcagcccggccctgaggacaccgggaaggcctgtggggtggactttgagatccgggccttctgtgccaagagcctggaggagaagagccacaagagaaattctgtgcggctggtgatcaggaaggtgcagtttgcccctgagaagccaggcccccagcccagcgctgagaccaccaggcacttcctgatgtctgacaggagcctgcacctggaggccagcctggacaaggagctgtactaccacggggagcccctgaatgtgaatgtgcacgtgaccaacaacagcaccaagacagtgaagaagatcaaggtgtctgtgcggcagtatgctgacatctgcctcttcagcacagcccagtacaagtgccctgtggcccagctggagcaggatgaccaggtgagccccagcagcaccttctgcaaggtgtacaccatcacccccctgctgagtgacaaccgggagaagaggggcctggccctggatggcaagctgaagcatgaggacaccaacctggccagcagcaccatcgtgaaggagggcgccaacaaggaggtgctgggcatcctggtgtcctacagagtgaaggtgaagctggtggtgtccagaggaggagatgtgtctgtggagctgccctttgtgctgatgcaccccaagccccatgaccacatccccctgccccggccccagagcgctgcccctgagacagatgtgcctgtggacaccaacctgattgaatttgacaccaactatgccacagatgatgacatcgtgtttgaggactttgcccggctgcggctgaagggcatgaaggatgatgattatgatgaccagctgtgctag

SEQ ID NO: 144071 - DNA, 1266 bp, synthetic construct
  misc_feature 1..1266: note = Description of Artificial Sequence: Synthetic coding sequence
  source 1..1266: mol_type = other DNA
atgggagagaagccaggcaccagggtcttcaagaagagcagccccaactgcaagctgactgtgtacctgggcaagagggactttgtggaccacctggacaaggtggaccctgtggatggagtggtgctggtggaccctgactacctgaaggacaggaaggtgtttgtgaccctgacctgtgccttccgctatggaagagaggacctggatgtgctgggcctgtccttcaggaaggacctcttcatcgccacctaccaggccttcccccctgtgcccaacccccccaggcctcccacccggctgcaggaccggctgctgaggaagctgggccagcacgcccaccccttcttcttcaccatcccccagaacctgccctgcagcgtgaccctgcagcccggcccagaagatactgggaaggcctgtggggtggactttgagatccgggccttctgtgccaagagcctggaggagaagagccacaagaggaacagcgtgcggctggtgatcaggaaggtgcagtttgcccctgagaagccaggcccccagcccagcgctgagaccaccaggcacttcctgatgtctgacaggagcctgcacctggaggccagcctggacaaggagctgtactaccatggagagcccctgaatgtgaatgtgcacgtgaccaacaacagcaccaagacagtgaagaagatcaaggtgtctgtgcggcagtatgctgacatctgcctcttcagcacagcccagtacaagtgccctgtggcccagctggagcaggatgaccaggtgagccccagcagcaccttctgcaaggtgtacaccatcacccccctgctgagtgacaaccgggagaagaggggcctggccctggatggcaagctgaagcatgaggacaccaacctggccagcagcaccatcgtgaaggagggcgccaacaaggaggtgctgggcatcctggtgtcctacagagtgaaggtgaagctggtggtgtccagaggaggagatgtgtctgtggagctgccctttgtgctgatgcaccccaagccccatgaccacatccccctgccccggccccagagcgcccccacccccaccccacccctgcctgtgcccccagctgcccctgagacagatgtgcctgtggacaccaacctgattgaatttgacaccaactatgccacagatgatgacatcgtgtttgaagattttgcccggctgcggctgaagggcatgaaggatgatgattatgatgaccagctgtgctag

SEQ ID NO: 144072 - DNA, 1233 bp, synthetic construct
  misc_feature 1..1233: note = Description of Artificial Sequence: Synthetic coding sequence
  source 1..1233: mol_type = other DNA
gctgccaacagagctgggggcggccgggcccaccacggcggggagacccgggaccagctgactgtgtacctgggcaagagggactttgtggaccacctggacaaggtggaccctgtggatggagtggtgctggtggaccctgactacctgaaggacaggaaggtgtttgtgaccctgacctgtgccttccgctatggccgggaggacctggatgtgctgggcctgtccttcaggaaggacctcttcatcgccacctaccaggccttcccccctgtgcccaaccccccccggccccccacccggctgcaggaccggctgctgaggaagctgggccagcacgcccaccccttcttcttcaccatcccccagaacctgccctgcagcgtgaccctgcagcccggccctgaggacaccgggaaggcctgtggggtggactttgagatccgggccttctgtgccaagagcctggaggagaagagccacaagagaaattctgtgcggctggtgatcaggaaggtgcagtttgcccctgagaagccaggcccccagcccagcgctgagaccaccaggcacttcctgatgtctgacaggagcctgcacctggaggccagcctggacaaggagctgtactaccacggggagcccctgaatgtgaatgtgcacgtgaccaacaacagcaccaagacagtgaagaagatcaaggtgtctgtgcggcagtatgctgacatctgcctcttcagcacagcccagtacaagtgccctgtggcccagctggagcaggatgaccaggtgagccccagcagcaccttctgcaaggtgtacaccatcacccccctgctgagtgacaaccgggagaagaggggcctggccctggatggcaagctgaagcatgaggacaccaacctggccagcagcaccatcgtgaaggagggcgccaacaaggaggtgctgggcatcctggtgtcctacagagtgaaggtgaagctggtggtgtccagaggaggagatgtgtctgtggagctgccctttgtgctgatgcaccccaagccccatgaccacatccccctgccccggccccagagcgctgcccctgagacagatgtgcctgtggacaccaacctgattgaatttgacaccaactatgccacagatgatgacatcgtgtttgaggactttgcccggctgcggctgaagggcatgaaggatgatgattatgatgaccagctgtgctag

SEQ ID NO: 144073 - DNA, 1047 bp, synthetic construct
  misc_feature 1..1047: note = Description of Artificial Sequence: Synthetic coding sequence
  source 1..1047: mol_type = other DNA
atggctgctggggtggccggctggggcgtggaggccgaggagtttgaagatgccccagatgtggagcccctggagcccaccctgagcaacatcatcgagcagaggagcctgaagtggatctttgtgggcggcaaaggaggagtgggcaagaccacctgcagctgcagcctggccgtgcagctgagcaagggccgggagagcgtgctgatcatcagcacagatcctgcccacaacatcagtgatgcctttgaccagaagttcagcaaggtgcccaccaaggtgaagggctatgacaacctgtttgccatggagattgaccccagcctgggcgtggccgagctgcctgatgagttctttgaggaggacaacatgctgtccatgggcaagaagatgatgcaggaggccatgtctgccttccctggcattgatgaggccatgtcctatgcagaggtgatgaggctggtgaagggcatgaacttctctgtggtggtgtttgacacagcccccaccggccacaccctgcggctgctgaacttccccaccatcgtggagcggggcctgggccgcctgatgcagatcaagaaccagatcagccccttcatcagccagatgtgcaacatgctgggcctgggggacatgaatgctgaccagctggccagcaagctggaggagaccctgcctgtgatccgctctgtgtctgagcagttcaaggaccctgagcagaccaccttcatctgtgtgtgcatcgccgagttcctgagcctgtatgaaacagagcggctcatccaggagctggccaagtgcaagattgacacccacaacatcatcgtgaaccagctggtgtttcctgaccctgagaagccctgcaagatgtgtgaggcccggcacaagatccaggccaagtacctggaccagatggaggacctgtatgaggacttccacatcgtgaagctgcccctgctgccccatgaggtgagaggagctgacaaggtgaacaccttcagcgccctgctgctggagccctacaagccacccagcgcccagtag

SEQ ID NO: 144074 - DNA, 1047 bp, synthetic construct; identical to SEQ ID NO: 144073
  misc_feature 1..1047: note = Description of Artificial Sequence: Synthetic coding sequence
  source 1..1047: mol_type = other DNA

SEQ ID NO: 144075 - DNA, 1128 bp, synthetic construct
  misc_feature 1..1128: note = Description of Artificial Sequence: Synthetic coding sequence
  source 1..1128: mol_type = other DNA
atggccgccctgagagatgctgagatccagaaggatgtgcagacctactacggccaggtgctgaagaggtctgctgacctgcagaccaacggctgtgtgaccacagcccggcctgtgcccaagcacatccgggaggccctgcagaatgtgcatgaggaggtggccctgcgctactacggctgcggcctggtgattcctgagcacctggagaactgctggatcctggacctgggcagcggcagcggccgggactgctacgtgctgagccagctggtgggggagaagggccacgtgactggaattgacatgaccaagggccaggtggaggtggccgagaagtacctggactaccacatggagaagtatggcttccaggccagcaatgtgaccttcatccacggctacatcgagaagctgggggaggccggcatcaagaatgaaagccatgacatcgtggtgagcaactgtgtgatcaacctggtgcctgacaagcagcaggtgctgcaggaggcctacagagtgctgaagcatggaggagagctgtacttcagtgatgtgtacaccagcctggagctgcctgaggagatccgcacccacaaggtgctgtggggagaatgtctgggcggggccctgtactggaaggagctggccgtgctggcccagaagattggcttctgccccccccggctggtgacagccaacctgatcaccatccagaacaaggagctggagcgggtgattggagactgccgctttgtgtctgccaccttccgcctcttcaagcacagcaagacaggccccaccaagcgctgccaggtgatctacaacggcggcatcaccggccacgagaaggagctgatgtttgatgccaacttcaccttcaaggagggggagatcgtggaggtggatgaggagacagctgccatcctgaagaacagcagatttgcccaggacttcctgatccggcccatcggggagaagctgcccaccagcggcggctgcagcgccctggagctgaaggacatcatcacagaccccttcaagctggccgaggagagtgacagcatgaagagccgctgtgtgcctgatgctgctgggggctgctgcggcaccaagaagagctgctag

SEQ ID NO: 144076 - DNA, 816 bp, synthetic construct
  misc_feature 1..816: note = Description of Artificial Sequence: Synthetic coding sequence
  source 1..816: mol_type = other DNA
atgggaaatggaggccgcagcggcctgcagcagggcaaaggaaatgtggatggagtggccgccacccccacagctgccagcgccagctgccagtaccgctgcatcgagtgcaaccaggaggccaaggagctgtacagagactacaaccacggcgtgctgaagatcaccatctgcaagagctgccagaagcctgtggacaagtacattgaatatgaccctgtgatcatcctgatcaatgccatcctgtgcaaggcccaggcctaccgccacatcctcttcaacacccagatcaacatccacggcaagctgtgcatcttctgcctgctgtgtgaggcctacctgcgctggtggcagctgcaggacagcaaccagaacacagccccagatgacctgatccgctatgccaaggagtgggacttctacaggatgtttgccatcgccgccctggagcagacagcctacttcatcggcatcttcaccttcctgtgggtggagcggcccatgacagccaagaagaagcccaacttcatcctgctgctgaaggccctgctgctgagcagctatggcaagctgctgctgatcccagctgtgatctgggagcatgactacacctctgtgtgcctgaagctgatcaaggtgtttgtgctgaccagcaacttccaggccatccgggtgaccctgaacatcaacaggaagctgtccttcctggccgtgctgagcggcctgctgctggagagcatcatggtgtacttcttccagagcatggagtgggatgtgggcagtgactatgccatcttcaagagccaggacttctag

SEQ ID NO: 144077 - DNA, 807 bp, synthetic construct
  misc_feature 1..807: note = Description of Artificial Sequence: Synthetic coding sequence
  source 1..807: mol_type = other DNA
tgaggaagaagtggcctgcagcagggcaaaggaaatgtggatggagtggccgccacccccacagctgccagcgccagctgccagtaccgctgcatcgagtgcaaccaggaggccaaggagctgtacagagactacaaccacggcgtgctgaagatcaccatctgcaagagctgccagaagcctgtggacaagtacatcgagtatgaccccgtcatcatcctgatcaatgccatcctgtgcaaggcccaggcctaccgccacatcctcttcaacacccagatcaacatccacggcaagctgtgcatcttctgcctgctgtgtgaggcctacctgcgctggtggcagctgcaggacagcaaccagaacacagccccagatgacctgatccgctatgccaaggagtgggacttctacaggatgtttgccatcgccgccctggagcagacagcctacttcatcggcatcttcaccttcctgtgggtggagcggcccatgacagccaagaagaagcccaacttcatcctgctgctgaaggccctgctgctgagcagctatggcaagctgctgctgatcccagctgtgatctgggagcatgactacacctctgtgtgcctgaagctgatcaaggtgtttgtgctgaccagcaacttccaggccatccgggtgaccctgaacatcaacaggaagctgtccttcctggccgtgctgagcggcctgctgctggagagcatcatggtgtacttcttccagagcatggagtgggatgtgggcagtgactatgccatcttcaagagccaggacttctag

SEQ ID NO: 144078 - DNA, 2547 bp, synthetic construct
  misc_feature 1..2547: note = Description of Artificial Sequence: Synthetic coding sequence
  source 1..2547: mol_type = other DNA
atgaacagcagcagcgccaacatcacctacgccagcaggaagaggaggaagcctgtgcagaagacagtgaagcccatcccagctgagggcatcaagagcaaccccagcaagaggcaccgggaccggctgaacacagagctggaccggctggccagcctgctgcccttcccccaggatgtgatcaacaagctggacaagctgtctgtgctgcggctgtctgtgtcctacctgcgggccaagagcttctttgatgtggccctgaagagcagccccacagaaagaaatggaggccaggacaactgcagagctgccaacttccgggagggcctgaacctgcaggagggggagttcctgctgcaggccctgaatggatttgtgctggtggtgaccacagatgccctggtgttctacgccagcagcaccatccaggactacctgggcttccagcagagtgatgtgatccaccagagcgtgtatgagctgatccacacagaagatagagctgagttccagaggcagctgcactgggccctgaaccccagccagtgcacagagagcggccagggcatcgaggaggccaccggcctgccccagacagtggtgtgctacaacccagaccagatccccccagagaacagccccctgatggagcgctgcttcatctgccgcctgcgctgcctgctggacaacagcagcggcttcctggccatgaacttccagggcaagctgaagtacctgcacggccagaagaagaagggcaaggatggcagcatcctgcccccccagctggccctgtttgccatcgccacccccctgcagccccccagcatcctggagatccgcaccaagaacttcatcttccgcaccaagcacaagctggacttcacccccatcggctgtgatgccaagggccgcatcgtgctgggctacacagaagctgagctgtgcacccggggcagcggctaccagttcatccatgctgctgacatgctgtactgtgccgagagccacatccgcatgatcaagacaggagagagcggcatgattgtgttccggctgctgaccaagaacaaccgctggacctgggtgcagagcaatgcccggctgctgtacaagaatggccgcccagactacatcatcgtgacccagaggcccctgacagatgaggagggcacagagcacctgaggaagaggaacaccaagctgcccttcatgttcaccaccggggaggccgtgctgtatgaggccaccaaccccttccctgccatcatggaccccctgcccctgcggaccaagaatggcaccagcggcaaggacagcgccaccaccagcaccctgagcaaggacagcctgaaccccagcagcctgctggccgccatgatgcagcaggatgagagcatctacctgtacccagccagcagcaccagcagcacagccccctttgagaacaacttcttcaatgaatccatgaatgaatgtagaaactggcaggacaacacagcccccatgggaaatgacaccatcctgaagcatgagcagattgaccagccccaggatgtgaacagctttgctgggggccaccctggcctcttccaggacagcaagaacagcgacctgtacagcatcatgaagaacctgggcatcgactttgaggacatccgccacatgcagaatgagaagttcttcagaaatgacttctctggagaggtggacttccgggacatcgacctgacagatgagatcctgacctacgtgcaggacagcctgagcaagagccccttcatccccagcgactaccagcagcagcagagcctggccctgaacagcagctgcatggtgcaggagcacctgcacctggagcagcagcagcagcaccaccagaagcaggtggtggtggagccccagcagcagctgtgccagaagatgaagcacatgcaggtgaatggcatgtttgagaactggaacagcaaccagtttgtgcccttcaactgcccccagcaggacccccagcagtacaacgtgttcacagacctgcacggcatcagccaggagttcccctacaagtctgagatggacagcatgccctacacccagaacttcatcagctgcaaccagcctgtgctgccccagcacagcaaatgtacagagctggactaccccatgggcagctttgagcccagcccctaccccaccaccagcagcctggaggactttgtgacctgcctgcagctgcctgagaaccagaagcacggcctgaacccccagagcgccatcatcaccccccagacctgctacgccggggctgtgtccatgtaccagtgccagcctgagccccagcacacccacgtgggccagatgcagtacaaccctgtgctgcccggccagcaggccttcctgaacaagttccagaatggagtgctgaatgagacctacccagctgagctgaacaacatcaacaacacccagaccaccacccacctgcagcccctgcaccaccccagcgaggcccggcccttcccagacctgaccagcagcggcttcctgtag

SEQ ID NO: 144079 - DNA, 2547 bp, synthetic construct; identical to SEQ ID NO: 144078
  misc_feature 1..2547: note = Description of Artificial Sequence: Synthetic coding sequence
  source 1..2547: mol_type = other DNA

SEQ ID NO: 144080 - DNA, 993 bp, synthetic construct
  misc_feature 1..993: note = Description of Artificial Sequence: Synthetic coding sequence
  source 1..993: mol_type = other DNA
atggctgacatcatcgcccggctgcgggaggatggcatccagaagagggtcatccaggagggccgcggggagctgcctgacttccaggacggcaccaaggccaccttccactaccgcaccctgcacagtgatgatgagggcaccgtgctggatgacagccgggcccggggcaagcccatggagctgatcatcggcaagaagttcaagctgcctgtgtgggagaccatcgtgtgcaccatgagggagggggagatcgcccagttcctgtgtgacatcaagcacgtggtgctgtaccccctggtggccaagagcctgaggaacattgctgtgggcaaggaccccctggagggccagaggcactgctgcggcgtggcccagatgagggagcacagcagcctgggccacgccgacctggatgccctgcagcagaacccccagcccctcatcttccacatggagatgctgaaggtggagagccctggcacctaccagcaggacccctgggccatgacagatgaggagaaggccaaggctgtgcccctcatccaccaggagggcaacagactctaccgggagggccacgtgaaggaggccgccgccaagtactatgatgccatcgcctgcctgaagaacctgcagatgaaggagcagcccggcagccctgagtggatccagctggaccagcagatcacccccctgctgctgaactactgccagtgcaagctggtggtggaggagtactatgaggtgctggaccactgcagcagcatcctgaacaagtatgatgacaacgtgaaggcctacttcaagaggggcaaggcccacgccgctgtgtggaatgcccaggaggcccaggccgactttgccaaggtgctggagctggaccctgccctggcccctgtggtgtcccgggagctgcaggccctggaggcccgcatccggcagaaggatgaggaggacaaggcccgcttccggggcatcttcagccactag

SEQ ID NO: 144081 - DNA, 966 bp, synthetic construct
  misc_feature 1..966: note = Description of Artificial Sequence: Synthetic coding sequence
  source 1..966: mol_type = other DNA
atggatgctgccctgctgctgaatgtggagggcgtgaagaagaccatcctgcacggcggcactggagagctgcccaacttcatcaccggcagcagggtcatcttccacttccgcaccatgaagtgtgatgaggagaggacagtgattgatgacagccggcaggtgggccagcccatgcacatcatcatcggcaacatgttcaagctggaggtgtgggagatcctgctgacctccatgagggtgcatgaggtggccgagttctggtgtgacaccatcgtggatgcccccagcgactaccagcgggagacctggaacctgagcaaccacgagaagatgaaggctgtgcctgtgctgcatggagagggcaacagactcttcaagctgggccgctatgaggaggccagcagcaagtaccaggaggccatcatctgcctgaggaacctgcagaccaaggagaagccctgggaggtgcagtggctgaagctggagaagatgatcaacaccctcatcctgaactactgccagtgcctgctgaagaaggaggagtactatgaggtgctggagcacaccagtgacatcctgcggcaccaccctggcatcgtgaaggcctactacgtgcgggcccgggcccacgccgaggtgtggaatgaggccgaggccaaggctgacctgcagaaggtgctggagctggagcccagcatgcagaaggctgtgagaagagagctgcggctgctggagaacaggatggccgagaagcaggaggaggagcggctgcgctgcaggaacatgctgagccagggcgccacccagcccccagctgagcccccaacagagcccccagcccagagcagcacagagcccccagctgagcccccaacagcccccagcgctgagctgtctgctggccccccagctgagcccgccacagagcccccacccagccctggccacagcctgcagcactag

SEQ ID NO: 144082 - DNA, 975 bp, synthetic construct
  misc_feature 1..975: note = Description of Artificial Sequence: Synthetic coding sequence
  source 1..975: mol_type = other DNA
atggatgctgccctgctgctgaatgtggagggcgtgaagaagaccatcctgcacggcggcactggagagctgcccaacttcatcaccggcagccgccacactggagtgtaccccatcctgagccgcagcctgcggcagatggcccagggcaaggaccccacagagtggcacgtgcacacctgtggcctggccaacatgtttgcctaccacaccctgggctatgaggacctggatgagctgcagaaggagccccagcccctggtgtttgtgattgagctgctgcaggtggatgcccccagcgactaccagcgggagacctggaacctgagcaaccacgagaagatgaaggctgtgcctgtgctgcacggggagggcaacagactcttcaagctgggccgctatgaggaggccagcagcaagtaccaggaggccatcatctgcctgaggaacctgcagaccaaggagaagccctgggaggtgcagtggctgaagctggagaagatgatcaacaccctcatcctgaactactgccagtgcctgctgaagaaggaggagtactatgaggtgctggagcacaccagtgacatcctgcggcaccaccctggcatcgtgaaggcctactacgtgcgggcccgggcccatgctgaggtgtggaatgaagctgaggccaaggctgacctgcagaaggtgctggagctggagcccagcatgcagaaggctgtgcggcgggagctgcggctgctggagaacaggatggccgagaagcaggaggaggagcggctgcgctgcaggaacatgctgagccagggcgccacccagcccccagctgagcccccaacagagcccccagcccagagcagcacagagcccccagctgagcccccaacagcccccagcgctgagctgtctgctggccccccagctgagcccgccacagagcccccacccagccctggccacagcctgcagcactag

SEQ ID NO: 144083 - DNA, 1155 bp, synthetic construct
  misc_feature 1..1155: note = Description of Artificial Sequence: Synthetic coding sequence
  source 1..1155: mol_type = other DNA
atggatgctgccctgctgctgaatgtggagggcgtgaagaagaccatcctgcacggcggcactggagagctgcccaacttcatcaccggcagcagggtcatcttccacttccgcaccatgaagtgtgatgaggagaggacagtgattgatgacagccggcaggtgggccagcccatgcacatcatcatcggcaacatgttcaagctggaggtgtgggagatcctgctgacctccatgagggtgcatgaggtggccgagttctggtgtgacaccatccacactggagtgtaccccatcctgagccgcagcctgcggcagatggcccagggcaaggaccccacagagtggcacgtgcacacctgtggcctggccaacatgtttgcctaccacaccctgggctatgaggacctggatgagctgcagaaggagccccagcccctggtgtttgtgattgagctgctgcaggtggatgcccccagcgactaccagcgggagacctggaacctgagcaaccacgagaagatgaaggctgtgcctgtgctgcacggggagggcaacagactcttcaagctgggccgctatgaggaggccagcagcaagtaccaggaggccatcatctgcctgaggaacctgcagaccaaggagaagccctgggaggtgcagtggctgaagctggagaagatgatcaacaccctcatcctgaactactgccagtgcctgctgaagaaggaggagtactatgaggtgctggagcacaccagtgacatcctgcggcaccaccctggcatcgtgaaggcctactacgtgcgggcccgggcccatgctgaggtgtggaatgaagctgaggccaaggctgacctgcagaaggtgctggagctggagcccagcatgcagaaggctgtgcggcgggagctgcggctgctggagaacaggatggccgagaagcaggaggaggagcggctgcgctgcaggaacatgctgagccagggcgccacccagcccccagctgagcccccaacagagcccccagcccagagcagcacagagcccccagctgagcccccaacagcccccagcgctgagctgtctgctggccccccagctgagcccgccacagagcccccacccagccctggccacagcctgcagcactag

SEQ ID NO: 144084 - DNA, 981 bp, synthetic construct
  misc_feature 1..981: note = Description of Artificial Sequence: Synthetic coding sequence
  source 1..981: mol_type = other DNA
atggatgctgccctgctgctgaatgtggagggcgtgaagaagaccatcctgcacggcggcactggagagctgcccaacttcatcaccggcagcagggtcatcttccacttccgcaccatgaagtgtgatgaggagaggacagtgattgatgacagccggcaggtgggccagcccatgcacatcatcatcggcaacatgttcaagctggaggtgtgggagatcctgctgacctccatgagggtgcatgaggtggccgagttctggtgtgacaccatccacactggagtgtaccccatcctgagccgcagcctgcggcagatggcccagggcaaggaccccacagagtggcacgtgcacacctgtggcctggccaacatgtttgcctaccacaccctgggctatgaggacctggatgagctgcagaaggagccccagcccctggtgtttgtgattgagctgctgcaggtggatgcccccagcgactaccagcgggagacctggaacctgagcaaccacgagaagatgaaggctgtgcctgtgctgcacggggagggcaacagactcttcaagctgggccgctatgaggaggccagcagcaagtaccaggaggccatcatctgcctgaggaacctgcagaccaaggagaagccctgggaggtgcagtggctgaagctggagaagatgatcaacaccctcatcctgaactactgccagtgcctgctgaagaaggaggagtactatgaggtgctggagcacaccagtgacatcctgcggcaccaccctggcatcgtgaaggcctactacgtgcgggcccgggcccatgctgaggtgtggaatgaagctgaggccaaggctgacctgcagaaggtgctggagctggagcccagcatgcagaaggctgtgcggcgggagctgcggctgctggagaatgcctggaggaggagcagaagaagaagtggctgtgccgccggcacctgctag

SEQ ID NO: 144085 - DNA, 975 bp, synthetic construct; identical to SEQ ID NO: 144082
  misc_feature 1..975: note = Description of Artificial Sequence: Synthetic coding sequence
  source 1..975: mol_type = other DNA

SEQ ID NO: 144086 - DNA, 1251 bp, synthetic construct
  misc_feature 1..1251: note = Description of Artificial Sequence: Synthetic coding sequence
  source 1..1251: mol_type = other DNA
atggccgccaccacagccaaccctgagatgaccagtgatgtgcccagcctgggccctgccatcgccagcggcaacagcggccctggcatccagggcggcggggccatcgtgcagagggccatcaagagaagacctggcctggactttgatgatgatggagagggcaacagcaagttcctgcgctgtgatgatgaccagatgagcaatgacaaggagagatttgcccggagtgatgatgagcagagcagcgctgacaaggagcggctggcccgggagaaccacagcgagattgaaagaagaagaagaaacaagatgacagcctacatcacagagctgagtgacatggtgcccacctgcagcgccctggccaggaagccagacaagctgaccatcctgaggatggctgtgagccacatgaagagcctgcggggcactggaaacaccagcacagatggcagctacaagcccagcttcctgacagaccaggagctgaagcacctgatcctggaggccgcagatggcttcctgttcatcgtgtcctgtgaaacaggccgggtggtgtatgtgtctgacagcgtgacccctgtgctgaaccagccccagagcgagtggtttggcagcaccctgtatgaccaggtgcacccagatgatgtggacaagctgcgggagcagctgagcaccagtgaaaatgccctgaccggccgcatcctggacctgaagacaggaacagtgaagaaggagggccagcagagctccatgaggatgtgcatgggcagccgccgctccttcatctgcaggatgagatgtggcagcagctctgtggaccctgtgtctgtgaaccggctgagctttgtgaggaaccgctgcagaaatggcctgggctctgtgaaggatggagagccccactttgtggtggtgcactgcaccggctacatcaaggcctggcccccagctggggtgtccctgcctgatgatgatcctgaggccggccagggcagcaagttctgcctggtggccatcggccgcctgcaggtgaccagcagccccaactgcacagacatgagcaatgtgtgccagcccacagagttcatcagccgccacaacatcgagggcatcttcacctttgtggaccaccgctgtgtggccaccgtgggctaccagccccaggagctgctgggcaagaacatcgtggagttctgccaccctgaggaccagcagctgctgcgggacagcttccagcaggagctgtag

SEQ ID NO: 144087 - DNA, 2223 bp, synthetic construct
  misc_feature 1..2223: note = Description of Artificial Sequence: Synthetic coding sequence
  source 1..2223: mol_type = other DNA
atgtaccaccactgggtgcagcccctgcccctggagaccctggacctggagttcaaggtggaggagcccctgagccggggcctgctgagcggggaccaggccggcctgaagtacctgctgctggccttcctgcggctggactttgatgatgatggagagggcaacagcaagttcctgcgctgtgatgatgaccagatgagcaatgacaaggagagatttgcccgggagaaccacagcgagattgaaagaagaagaagaaacaagatgacagcctacatcacagagctgagtgacatggtgcccacctgcagcgccctggccaggaagccagacaagctgaccatcctgaggatggctgtgagccacatgaagagcctgcggggcactggaaacaccagcacagatggcagctacaagcccagcttcctgacagaccaggagctgaagcacctgatcctggaggccgcagatggcttcctgttcatcgtgtcctgtgaaacaggccgggtggtgtatgtgtctgacagcgtgacccctgtgctgaaccagccccagagcgagtggtttggcagcaccctgtatgaccaggtgcacccagatgatgtggacaagctgcgggagcagctgagcaccagtgaaaatgccctgaccggccgcatcctggacctgaagacaggaacagtgaagaaggagggccagcagagctccatgaggatgtgcatgggcagccgccgctccttcatctgcaggatgagatgtggcagcagctctgtggaccctgtgtctgtgaaccggctgagctttgtgaggaaccgctgcagaaatggcctgggctctgtgaaggatggagagccccactttgtggtggtgcactgcaccggctacatcaaggcctggcccccagctggggtgtccctgcctgatgatgatcctgaggccggccagggcagcaagttctgcctggtggccatcggccgcctgcaggtgaccagcagccccaactgcacagacatgagcaatgtgtgccagcccacagagttcatcagccgccacaacatcgagggcatcttcacctttgtggaccaccgctgtgtggccaccgtgggctaccagccccaggagctgctgggcaagaacatcgtggagttctgccaccctgaggaccagcagctgctgcgggacagcttccagcaggtggtgaagctgaagggccaggtgctgtctgtgatgttccgcttccgcagcaagaaccaggagtggctgtggatgaggaccagcagcttcaccttccagaacccctacagtgatgaaattgagtacatcatctgcaccaacaccaacgtgaagcccctgacctaccggcagcagcagcagcagacagagctggacatggtgcccggcagagatggcctggccagctacaaccacagccaggtggtgcagcctgtgaccaccaccggccctgagcacagcaagcccctggagaagagtgatggcctgtttgcccaggaccgggacccccgcttcagcgagatctaccacaacatcaatgctgaccagagcaagggcatcagcagcagcacagtgcctgccacccagcagctgttcagccagggcaacaccttcccccccacccccaggcctgctgagaacttcagaaattctggcctggcccctcctgtgaccatcgtgcagcccagcgccagcgctggccagatgctggcccagatcagccgccacagcaaccccacccagggcgccacccccacctggacccccaccaccaggagcggcttcagcgcccaggtggccacccaggccacagccaagaccaggaccagccagtttggagtgggcagcttccagacccccagcagcttcagctccatgagcctgcccggggcccccacagccagccctggagctgctgcctaccccagcctgaccaacagaggcagcaactttgcccctgagaccggccagacagctggccagttccagaccaggacagctgagggcgtgggcgtgtggccccagtggcagggccagcagccccaccacaggagcagcagcagcgagcagcacgtgcagcagcccccagcccagcagcccggccagcctgaggtgttccaggagatgctgtccatgctgggggaccagagcaacagctacaacaatgaggagttcccagacctgaccatgttcccccccttcagcgagtag

SEQ ID NO: 144088 - DNA, 1251 bp, synthetic construct; identical to SEQ ID NO: 144086
  misc_feature 1..1251: note = Description of Artificial Sequence: Synthetic coding sequence
  source 1..1251: mol_type = other DNA

SEQ ID NO: 144089 - DNA, 2325 bp, synthetic construct
  misc_feature 1..2325: note = Description of Artificial Sequence: Synthetic coding sequence
  source 1..2325: mol_type = other DNA
atggccgccaccacagccaaccctgagatgaccagtgatgtgcccagcctgggccctgccatcgccagcggcaacagcggccctggcatccagggcggcggggccatcgtgcagagggccatcaagagaagacctggcctggactttgatgatgatggagagggcaacagcaagttcctgcgctgtgatgatgaccagatgagcaatgacaaggagagatttgcccgggagaaccacagcgagattgaaagaagaagaagaaacaagatgacagcctacatcacagagctgagtgacatggtgcccacctgcagcgccctggccaggaagccagacaagctgaccatcctgaggatggctgtgagccacatgaagagcctgcggggcaccggcaacaccagcacagatggcagctacaagcccagcttcctgacagaccaggagctgaagcacctgatcctggaggccgcagatggcttcctgttcatcgtgtcctgtgagaccggccgggtggtgtatgtgtctgattctgtgacccctgtgctgaaccagccccagagcgagtggtttggcagcaccctgtatgaccaggtgcacccagatgatgtggacaagctgcgggagcagctgagcaccagtgaaaatgccctgaccggccgcatcctggacctgaagacaggcaccgtgaagaaggagggccagcagagctccatgaggatgtgcatgggcagcagaagaagcttcatctgcaggatgagatgtggcagcagctctgtggaccctgtgtctgtgaaccggctgagctttgtgaggaaccgctgcagaaatggcctgggctctgtgaaggatggagagccccactttgtggtggtgcactgcaccggctacatcaaggcctggcccccagctggggtgtccctgcctgatgatgatcctgaggccggccagggcagcaagttctgcctggtggccatcggccgcctgcaggtgaccagcagccccaactgcacagacatgagcaatgtgtgccagcccacagagttcatcagccgccacaacatcgagggcatcttcacctttgtggaccaccgctgtgtggccaccgtgggctaccagccccaggagctgctgggcaagaacatcgtggagttctgccaccctgaggaccagcagctgctgcgggacagcttccagcaggtggtgaagctgaagggccaggtgctgtctgtgatgttccgcttccgcagcaagaaccaggagtggctgtggatgaggaccagcagcttcaccttccagaacccctacagtgatgaaattgagtacatcatctgcaccaacaccaacgtgaagaacagcagccaggagccccggcccaccctgagcaacaccatccagaggccccagctgggccccacagccaacctgcccctggagatgggcagcggccagctggccccccggcagcagcagcagcagacagagctggacatggtgcccggcagagatggcctggccagctacaaccacagccaggtggtgcagcctgtgaccaccactggacctgagcacagcaagcccctggagaagagtgatggcctgtttgcccaggaccgggacccccgcttcagcgagatctaccacaacatcaatgctgaccagagcaagggcatcagcagcagcacagtgcctgccacccagcagctgttcagccagggcaacaccttcccccccacccccaggcctgctgagaacttcaggaacagcggcctggcccctcctgtgaccatcgtgcagcccagcgccagcgctggccagatgctggcccagatcagccgccacagcaaccccacccagggcgccacccccacctggacccccaccaccaggagcggcttcagcgcccagcaggtggccacccaggccacagccaagaccaggaccagccagtttggagtgggcagcttccagacccccagcagcttcagctccatgagcctgcccggggcccccacagccagccctggagctgctgcctaccccagcctgaccaacagaggcagcaactttgcccctgagaccggccagacagctggccagttccagaccaggacagctgagggcgtgggcgtgtggccccagtggcagggccagcagccccaccacaggagcagcagcagcgagcagcacgtgcagcagcccccagcccagcagcccggccagcctgaggtgttccaggagatgctgtccatgctgggggaccagagcaacagctacaacaatgaggagttcccagacctgaccatgttcccccccttcagcgagtag

SEQ ID NO: 144090 - DNA, 2328 bp, synthetic construct
  misc_feature 1..2328: note = Description of Artificial Sequence: Synthetic coding sequence
  source 1..2328: mol_type = other DNA
atgaccagtgatgtgcccagcctgggccctgccatcgccagcggcaacagcggccctggcatccagggcggcggggccatcgtgcagagggccatcaagaggcggcccggcctggactttgatgatgatggagagggcaacagcaagttcctgcgctgtgatgatgaccagatgagcaatgacaaggagagatttgcccggagtgatgatgagcagagcagcgctgacaaggagcggctggcccgggagaaccacagcgagattgaaagaagaagaagaaacaagatgacagcctacatcacagagctgagtgacatggtgcccacctgcagcgccctggccaggaagccagacaagctgaccatcctgaggatggctgtgagccacatgaagagcctgcggggcaccggcaacaccagcacagatggcagctacaagcccagcttcctgacagaccaggagctgaagcacctgatcctggaggccgcagatggcttcctgttcatcgtgtcctgtgagaccggccgggtggtgtatgtgtctgattctgtgacccctgtgctgaaccagccccagagcgagtggtttggcagcaccctgtatgaccaggtgcacccagatgatgtggacaagctgcgggagcagctgagcaccagtgaaaatgccctgaccggccgcatcctggacctgaagacaggcaccgtgaagaaggagggccagcagagctccatgaggatgtgcatgggcagcagaagaagcttcatctgcaggatgagatgtggcagcagctctgtggaccctgtgtctgtgaaccggctgagctttgtgaggaaccgctgcagaaatggcctgggctctgtgaaggatggagagccccactttgtggtggtgcactgcaccggctacatcaaggcctggcccccagcagatgatgatcctgaggccggccagggcagcaagttctgcctggtggccatcggccgcctgcaggtgaccagcagccccaactgcacagacatgagcaatgtgtgccagcccacagagttcatcagccgccacaacatcgagggcatcttcacctttgtggaccaccgctgtgtggccaccgtgggctaccagccccaggagctgctgggcaagaacatcgtggagttctgccaccctgaggaccagcagctgctgcgggacagcttccagcaggtggtgaagctgaagggccaggtgctgtctgtgatgttccgcttccgcagcaagaaccaggagtggctgtggatgaggaccagcagcttcaccttccagaacccctacagtgatgaaattgagtacatcatctgcaccaacaccaacgtgaagaacagcagccaggagccccggcccaccctgagcaacaccatccagaggccccagctgggccccacagccaacctgcccctggagatgggcagcggccagctggccccccggcagcagcagcagcagacagagctggacatggtgcccggcagagatggcctggccagctacaaccacagccaggtggtgcagcctgtgaccaccaccggccctgagcacagcaagcccctggagaagagtgatggcctgtttgcccaggaccgggacccccgcttcagcgagatctaccacaacatcaatgctgaccagagcaagggcatcagcagcagcacagtgcctgccacccagcagctgttcagccagggcaacaccttcccccccacccccaggcctgctgagaacttcagaaattctggcctggcccctcctgtgaccatcgtgcagcccagcgccagcgctggccagatgctggcccagatcagccgccacagcaaccccacccagggcgccacccccacctggacccccaccaccaggagcggcttcagcgcccagcaggtggccacccaggccacagccaagaccaggaccagccagtttggagtgggcagcttccagacccccagcagcttcagctccatgagcctgcccggggcccccacagccagccctggagctgctgcctaccccagcctgaccaacagaggcagcaactttgcccctgagaccggccagacagctggccagttccagaccaggacagctgagggcgtgggcgtgtggccccagtggcagggccagcagccccaccacaggagcagcagcagcgagcagcacgtgcagcagcccccagcccagcagcccggccagcctgaggtgttccaggagatgctgtccatgctgggggaccagagcaacagctacaacaatgaggagttcccagacctgaccatgtttcctcccttcagcgagtag

SEQ ID NO: 144091 - DNA, 1428 bp, synthetic construct
  misc_feature 1..1428: note = Description of Artificial Sequence: Synthetic coding sequence
  source 1..1428: mol_type = other DNA
atgtctgccacagctgctgccaggaagaggggcaagccagccagcggggccggggccggggccggggccggcaagagaagaaggaaggctgacagcgctggggaccggggcaagagcaagggcggcggcaagatgaatgaggagatcagcagtgacagcgagagcgagagcctggcccccaggaagccagaggaggaggaggaggaggagctggaggagacagcccaggagaagaagctgcggctggccaagctgtacctggagcagctgcggcagcaggaggaggagaaggccgaggcccgggcctttgaggaggaccaggtggccggccgcctgaaggaggatgtgctggagcagaggggccgcctgcagaagctggtggccaaggagatccaggccccagccagcgctgacatccgggtgctgcggggccaccagctgagcatcacctgcctggtggtgaccccagatgattctgccatcttctctgctgccaaggactgcagcatcatcaagtggagcgtggagagcggcaggaagctgcacgtgatcccccgggccaagaagggagctgagggcaagcccccaggccacagcagccacgtgctgtgcatggccatcagcagtgatggcaagtacctggccagcggggacaggagcaagctgatcctgatctgggaggcccagagctgccagcacctgtacaccttcaccggccacagagatgctgtgtctggcctggccttccggcggggcacccaccagctgtacagcaccagccatgacagatctgtgaaggtgtggaatgtggccgagaacagctatgtggagaccctgtttggccaccaggatgctgtggccgccctggatgccctgagccgggagtgctgcgtgacagctgggggcagagatggcaccgtgcgggtgtggaagatccctgaggagagccagctggtgttctacggccaccagggcagcattgactgcatccacctgatcaatgaggagcacatggtgtctggagcagatgatggctctgtggccctgtggggcctgagcaagaagaggcccctggccctgcagcgggaggcccacggcctgcggggggagcccggcctggagcagcccttctggatcagctctgtggccgccctgctgaacacagacctggtggccaccggcagccacagcagctgtgtgcggctgtggcagtgtggggagggcttccggcagctggacctgctgtgtgacatccccctggtgggcttcatcaacagcctgaagttcagcagcagcggggacttcctggtggccggcgtgggccaggagcaccggctgggccgctggtggaggatcaaggaggccaggaacagcgtgtgcatcatccccctgcggcgggtgcctgtgcccccagctgctggcagctag

SEQ ID NO: 144092 - DNA, 2154 bp, synthetic construct
  misc_feature 1..2154: note = Description of Artificial Sequence: Synthetic coding sequence
  source 1..2154: mol_type = other DNA
atggccaccccagctgctgtgaaccccccagagatggccagtgacatccctggctctgtgaccctgcctgtggcccccatggccgccaccggccaggtgaggatggccggggccatgcctgcccggggcggcaagaggaggagcggcatggactttgatgatgaagatggagagggccccagcaagttcagccgggagaaccacagcgagattgaaagaagaagaagaaacaagatgacccagtacatcacagagctgagtgacatggtgcccacctgcagcgccctggccaggaagccagacaagctgaccatcctgaggatggctgtgagccacatgaagtccatgaggggcactggaaacaagagcacagatggagcctacaagcccagcttcctgacagagcaggagctgaagcacctgatcctggaggccgcagatggcttcctgtttgtggtggccgctgagaccggccgggtcatctacgtgtctgacagcgtgacccctgtgctgaaccagccccagagcgagtggtttggcagcaccctgtatgagcaggtgcacccagatgatgtggagaagctgcgggagcagctgtgcaccagtgaaaattccatgacaggccgcatcctggacctgaagacaggaacagtgaagaaggagggccagcagagctccatgaggatgtgcatgggcagccgccgctccttcatctgcaggatgagatgtggaaatgcccccctggaccacctgcccctgaaccgcatcaccaccatgaggaagcgcttcagaaatggcctgggccctgtgaaggagggggaggcccagtatgctgtggtgcactgcaccggctacatcaaggcctggcccccagctggcatgaccatcccagaagaagatgctgatgtgggccagggcagcaagtactgcctggtggccatcggccgcctgcaggtgaccagcagccctgtgtgcatggacatgaatggcatgtctgtgcccacagagttcctgagccgccacaacagtgatggcatcatcacctttgtggacccccgctgcatcagcgtcatcggctaccagccccaggacctgctgggcaaggacatcctggagttctgccaccctgaggaccagagccacctgcgggagagcttccagcaggtggtgaagctgaagggccaggtgctgtctgtgatgtaccgcttccgcaccaagaaccgggagtggatgctgatccgcaccagcagcttcaccttccagaacccctacagtgatgaaattgagtacatcatctgcaccaacaccaacgtgaagcagctgcagcagcagcaggccgagctggaggtgcaccagagagatggcctgagcagctatgacctgagccaggtgcctgtgcccaacctgcctgctggggtgcatgaggccggcaagtctgtggagaaggcagatgccatcttcagccaggagcgggaccccaggtttgctgagatgtttgctggcatcagcgccagcgagaagaagatgatgagcagcgccagcgctgctggcacccagcagatctacagccagggcagccccttccccagcggccacagcggcaaggccttcagcagctctgtggtgcacgtgcctggggtgaatgacatccagagcagcagcagcacaggccagaacatgagccagatcagccggcagctgaaccagagccaggtggcctggacaggcagcaggcctcccttccctggccagcagatccccagccagagcagcaagacccagagcagccccttcggcatcggcaccagccacacctacccagctgaccccagcagctacagccccctgagcagccctgccaccagcagccccagcggaaatgcctacagcagcctggccaacagaacacctggctttgctgagagcggccagagcagcggccagttccagggccggcccagcgaggtgtggagccagtggcagagccagcaccacggccagcagagcggggagcagcacagccaccagcagcccggccagacagaggtgttccaggacatgctgcccatgcctggggaccccacccagggcaccggcaactacaacatcgaggactttgctgacctgggcatgtttcctcccttcagcgagtag

SEQ ID NO: 144093 - DNA, 2118 bp, synthetic construct
  misc_feature 1..2118: note = Description of Artificial Sequence: Synthetic coding sequence
  source 1..2118: mol_type = other DNA
atggccagtgacatccctggctctgtgaccctgcctgtggcccccatggccgccaccggccaggtgaggatggccggggccatgcctgcccggggcggcaagagaagaagtggcatggactttgatgatgaagatggagagggccccagcaagttcagccgggagaaccacagcgagattgaaagaagaagaagaaacaagatgacccagtacatcacagagctgagtgacatggtgcccacctgcagcgccctggccaggaagccagacaagctgaccatcctgaggatggctgtgagccacatgaagtccatgaggggcaccggcaacaagagcacagatggagcctacaagcccagcttcctgacagagcaggagctgaagcacctgatcctggaggccgcagatggcttcctgtttgtggtggccgctgagaccggccgggtcatctacgtgtctgattctgtgacccctgtgctgaaccagccccagagcgagtggtttggcagcaccctgtatgagcaggtgcacccagatgatgtggagaagctgcgggagcagctgtgcaccagcgagaacagcatgacaggccgcatcctggacctgaagacaggcaccgtgaagaaggagggccagcagagctccatgaggatgtgcatgggcagcagaagaagcttcatctgcaggatgagatgtggaaatgcccccctggaccacctgcccctgaaccgcatcaccaccatgaggaagcgcttcagaaatggcctgggccctgtgaaggagggggaggcccagtatgctgtggtgcactgcaccggctacatcaaggcctggcccccagctggcatgaccatccctgaggaggatgctgatgtgggccagggcagcaagtactgcctggtggccatcggccgcctgcaggtgaccagcagccctgtgtgcatggacatgaatggcatgtctgtgcccacagagttcctgagccgccacaacagtgatggcatcatcacctttgtggacccccgctgcatctctgtgattggctaccagccccaggacctgctgggcaaggacatcctggagttctgccaccctgaggaccagagccacctgcgggagagcttccagcaggtggtgaagctgaagggccaggtgctgtctgtgatgtaccgcttccgcaccaagaaccgggagtggatgctgatccgcaccagcagcttcaccttccagaacccctacagtgatgaaattgagtacatcatctgcaccaacaccaacgtgaagcagctgcagcagcagcaggccgagctggaggtgcaccagagagatggcctgagcagctatgacctgagccaggtgcctgtgcccaacctgcctgctggggtgcatgaagctgggaagtctgtggagaaggcagatgccatcttcagccaggagcgggaccccaggtttgctgagatgtttgctggcatcagcgccagcgagaagaagatgatgagcagcgccagcgctgctggcacccagcagatctacagccagggcagccccttccccagcggccacagcggcaaggccttcagcagctctgtggtgcacgtgcctggggtgaatgacatccagagcagcagcagcacaggccagaacatgagccagatcagccggcagctgaaccagagccaggtggcctggacaggcagccggccccccttccctggccagcagatccccagccagagcagcaagacccagagcagcccctttggaattggcaccagccacacctacccagctgaccccagcagctacagccccctgagcagccctgccaccagcagccccagcggaaatgcctacagcagcctggccaacagaacacctggctttgctgagagcggccagagcagcggccagttccagggccggcccagcgaggtgtggagccagtggcagagccagcaccacggccagcagagcggggagcagcacagccaccagcagcccggccagacagaggtgttccaggacatgctgcccatgcctggggaccccagaaatgagtggtggagcccccacagccggcagcacttccggcagcccatctcctatgccaggatgtag

SEQ ID NO: 144094 - DNA, 2121 bp, synthetic construct
  misc_feature 1..2121: note = Description of Artificial Sequence: Synthetic coding sequence
  source 1..2121: mol_type = other DNA
atggccagtgacatccctggctctgtgaccctgcctgtggcccccatggccgccaccggccaggtgaggatggccggggccatgcctgcccggggcggcaagagaagaagtggcatggactttgatgatgaagatggagagggccccagcaagttcagccgggagaaccacagcgagattgaaagaagaagaagaaacaagatgacccagtacatcacagagctgagtgacatggtgcccacctgcagcgccctggccaggaagccagacaagctgaccatcctgaggatggctgtgagccacatgaagtccatgaggggcaccggcaacaagagcacagatggagcctacaagcccagcttcctgacagagcaggagctgaagcacctgatcctggaggccgcagatggcttcctgtttgtggtggccgctgagaccggccgggtcatctacgtgtctgattctgtgacccctgtgctgaaccagccccagagcgagtggtttggcagcaccctgtatgagcaggtgcacccagatgatgtggagaagctgcgggagcagctgtgcaccagcgagaacagcatgacaggccgcatcctggacctgaagacaggcaccgtgaagaaggagggccagcagagctccatgaggatgtgcatgggcagcagaagaagcttcatctgcaggatgagatgtggaaatgcccccctggaccacctgcccctgaaccgcatcaccaccatgaggaagcgcttcagaaatggcctgggccctgtgaaggagggggaggcccagtatgctgtggtgcactgcaccggctacatcaaggcctggcccccagctggcatgaccatccctgaggaggatgctgatgtgggccagggcagcaagtactgcctggtggccatcggccgcctgcaggtgaccagcagccctgtgtgcatggacatgaatggcatgtctgtgcccacagagttcctgagccgccacaacagtgatggcatcatcacctttgtggacccccgctgcatctctgtgattggctaccagccccaggacctgctgggcaaggacatcctggagttctgccaccctgaggaccagagccacctgcgggagagcttccagcaggtggtgaagctgaagggccaggtgctgtctgtgatgtaccgcttccgcaccaagaaccgggagtggatgctgatccgcaccagcagcttcaccttccagaacccctacagtgatgaaattgagtacatcatctgcaccaacaccaacgtgaagcagctgcagcagcagcaggccgagctggaggtgcaccagagagatggcctgagcagctatgacctgagccaggtgcctgtgcccaacctgcctgctggggtgcatgaagctgggaagtctgtggagaaggcagatgccatcttcagccaggagcgggaccccaggtttgctgagatgtttgctggcatcagcgccagcgagaagaagatgatgagcagcgccagcgctgctggcacccagcagatctacagccagggcagccccttccccagcggccacagcggcaaggccttcagcagctctgtggtgcacgtgcctggggtgaatgacatccagagcagcagcagcacaggccagaacatgagccagatcagccggcagctgaaccagagccaggtggcctggacaggcagccggccccccttccctggccagcagatccccagccagagcagcaagacccagagcagcccctttggaattggcaccagccacacctacccagctgaccccagcagctacagccccctgagcagccctgccaccagcagccccagcggaaatgcctacagcagcctggccaacagaacacctggctttgctgagagcggccagagcagcggccagttccagggccggcccagcgaggtgtggagccagtggcagagccagcaccacggccagcagagcggggagcagcacagccaccagcagcccggccagacagaggtgttccaggacatgctgcccatgcctggggaccccacccagggcactggaaactacaacattgaagattttgctgacctgggcatgttcccccccttcagcgagtag

SEQ ID NO: 144095 - DNA, 2121 bp, synthetic construct; identical to SEQ ID NO: 144094
  misc_feature 1..2121: note = Description of Artificial Sequence: Synthetic coding sequence
  source 1..2121: mol_type = other DNA

SEQ ID NO: 144096 - DNA, 1701 bp, synthetic construct
  misc_feature 1..1701: note = Description of Artificial Sequence: Synthetic coding sequence
  source 1..1701: mol_type = other DNA
atggccaccccagctgctgtgaaccccccagagatggccagtgacatccctggctctgtgaccctgcctgtggcccccatggccgccaccggccaggtgaggatggccggggccatgcctgcccggggcggcaagaggaggagcggcatggactttgatgatgaagatggagagggccccagcaagttcagccgggagaaccacagcgagattgaaagaagaagaagaaacaagatgacccagtacatcacagagctgagtgacatggtgcccacctgcagcgccctggccaggaagccagacaagctgaccatcctgaggatggctgtgagccacatgaagtccatgaggggcactggaaacaagagcacagatggagcctacaagcccagcttcctgacagagcaggagctgaagcacctgatcctggaggccgcagatggcttcctgtttgtggtggccgctgagaccggccgggtcatctacgtgtctgacagcgtgacccctgtgctgaaccagccccagagcgagtggtttggcagcaccctgtatgagcaggtgcacccagatgatgtggagaagctgcgggagcagctgtgcaccagtgaaaattccatgacaggccgcatcctggacctgaagacaggaacagtgaagaaggagggccagcagagctccatgaggatgtgcatgggcagccgccgctccttcatctgcaggatgagatgtggaaatgcccccctggaccacctgcccctgaaccgcatcaccaccatgaggaagcgcttcagaaatggcctgggccctgtgaaggagggggaggcccagtatgctgtggtgcactgcaccggctacatcaaggcctggcccccagctggcatgaccatcccagaagaagatgctgatgtgggccagggcagcaagtactgcctggtggccatcggccgcctgcaggtgaccagcagccctgtgtgcatggacatgaatggcatgtctgtgcccacagagttcctgagccgccacaacagtgatggcatcatcacctttgtggacccccgctgcatcagcgtcatcggctaccagccccaggacctgctgggcaaggacatcctggagttctgccaccctgaggaccagagccacctgcgggagagcttccagcaggtggtgaagctgaagggccaggtgctgtctgtgatgtaccgcttccgcaccaagaaccgggagtggatgctgatccgcaccagcagcttcaccttccagaacccctacagtgatgaaattgagtacatcatctgcaccaacaccaacgtgaagcagctgcagcagcagcaggccgagctggaggtgcaccagagagatggcctgagcagctatgacctgagccaggtgcctgtgcccaacctgcctgctggggtgcatgaggccggcaagtctgtggagaaggcagatgccatcttcagccaggagcgggaccccaggtttgctgagatgtttgctggcatcagcgccagcgagaagaagatgatgagcagcgccagcgctgctggcacccagcagatctacagccagggcagccccttccccagcggccacagcggcaaggccttcagcagctctgtggtgcacgtgcctggggtgaatgacatccagagcagcagcagcacaggccagaacatgagccagatcagcggcagctag

SEQ ID NO: 144097 - DNA, 2160 bp, synthetic construct
  misc_feature 1..2160: note = Description of Artificial Sequence: Synthetic coding sequence
  source 1..2160: mol_type = other DNA
atgcccaggaccatgatccccccaggagagtgcacctacgccggcaggaagagaagaagacccctgcagaagcagaggcctgctgtgggcgctgagaagagcaaccccagcaagaggcaccgggaccggctgaatgctgagctggaccacctggccagcctgctgcccttccccccagacatcatcagcaagctggacaagctgtctgtgctgcggctgtctgtgtcctacctgcgggtgaagagcttcttccaggtggtgcaggagcagagcagccggcagcctgctgctggggcccccagccctggggacagctgccccctggccggcagcgctgtgctggagggccgcctgctgctggagagcctgaatggatttgccctggtggtgtctgctgagggcaccatcttctacgccagcgccaccatcgtggactacctgggcttccaccagacagatgtgatgcaccagaacatctatgactacatccacgtggatgaccggcaggacttctgccggcagctgcactgggccatggaccccccccaggtggtgtttggccagcccccacccctggagactggagatgatgccatcctgggccgcctgctgcgggcccaggagtggggcaccggcacccccacagagtacagcgccttcctgacccgctgcttcatctgccgggtgcgctgcctgctggacagcaccagcggcttcctggcccggggcagccaggcctggcagctgcggctgtgctgcccagagcccctgatgaccatgcagttccagggcaagctgaagttcctgtttggccagaagaagaaggcccccagcggggccatgctgcccccccggctgagcctcttctgcatcgccgcccctgtgctgctgcccagcgctgctgagatgaagatgaggtctgccctgctgcgggccaagcccagggctgacacagctgccacagcagatgccaaggtgaaggccaccaccagcctgtgtgagagcgagctgcacggcaagcccaactacagcgctggccgcagcagccgggagagcggcgtgctggtgctgcgggagcagacagatgctggccgctgggcccaggtgcctgcccgggccccctgcctgtgcctgcggggcggccctgacctggtgctggaccccaagggcggcagcggggaccgggaggaggagcagcacaggatgctgagccgggccagcggcgtgacaggccggcgggagaccccaggccccaccaagcccctgccctggacagctgggaagcacagtgaagatggagcccggccccggctgcagcccagcaagaatgacccccccagcctgcggcccatgccccggggcagctgcctgccctgcccctgtgtgcagggcaccttcaggaacagccccatcagccacccccccagccccagccccagcgcctacagcagcaggaccagccggcccatgagagatgtgggggaggaccaggtgcacccccccctgtgccacttcccccagaggagcctgcagcaccagctgccccagcccggggcccagagatttgccacccggggctaccccatggaggacatgaagctgcagggcgtgcccatgcctcctggggacctgtgtggccccaccctgctgctggatgtgtccatcaagatggagaaggacagcggctgtgagggcgctgctgatggctgtgtgcccagccaggtgtggctgggcgccagtgacaggagccacccagccaccttccccaccaggatgcacctgaagacagagccagacagccggcagcaggtgtacatcagccacctgggccatggagtgcggggggcccagccccacggccgggccacagctggccgcagccgggagctgacccccttccacccagcccactgtgcctgcctggagcccacagatggcctgccccagagcgagcccccccaccagctgtgtgcccggggccgcggggagcagagctgcacctgcagagctgctgaggccgcccctgtggtgaagcgggagcccctggacagcccccagtgggccacccacagccagggcatggtgcccggcatgctgcccaagagcgccctggccaccctggtgcccccccaggccagcggctgcaccttcctgccctag

SEQ ID NO: 144098 - DNA, 2106 bp, synthetic construct
  misc_feature 1..2106: note = Description of Artificial Sequence: Synthetic coding sequence
  source 1..2106: mol_type = other DNA
atgcccaggaccatgatccccccaggagagtgcacctacgccggcaggaagagaagaagacccctgcagaagcagaggcctgctgtgggcgctgagaagagcaaccccagcaagaggcaccgggaccggctgaatgctgagctggaccacctggccagcctgctgcccttccccccagacatcatcagcaagctggacaagctgtctgtgctgcggctgtctgtgtcctacctgcgggtgaagagcttcttccaggtggtgcaggagcagagcagccggcagcctgctgctggggcccccagccctggggacagctgccccctggccggcagcgctgtgctggagggccgcctgctgctggagagcctgaatggatttgccctggtggtgtctgctgagggcaccatcttctacgccagcgccaccatcgtggactacctgggcttccaccagacagatgtgatgcaccagaacatctatgactacatccacgtggatgaccggcaggacttctgccggcagctgcactgggccatggaccccccccaggtggtgtttggccagcccccacccctggagactggagatgatgccatcctgggccgcctgctgcgggcccaggagtggggcaccggcacccccacagagtacagcgccttcctgacccgctgcttcatctgccgggtgcgctgcctgctggacagcaccagcggcttcctgaccatgcagttccagggcaagctgaagttcctgtttggccagaagaagaaggcccccagcggggccatgctgcccccccggctgagcctcttctgcatcgccgcccctgtgctgctgcccagcgctgctgagatgaagatgaggtctgccctgctgcgggccaagcccagggctgacacagctgccacagcagatgccaaggtgaaggccaccaccagcctgtgtgagagcgagctgcacggcaagcccaactacagcgctggccgcagcagccgggagagcggcgtgctggtgctgcgggagcagacagatgctggccgctgggcccaggtgcctgcccgggccccctgcctgtgcctgcggggcggccctgacctggtgctggaccccaagggcggcagcggggaccgggaggaggagcagcacaggatgctgagccgggccagcggcgtgacaggccggcgggagaccccaggccccaccaagcccctgccctggacagctgggaagcacagtgaagatggagcccggccccggctgcagcccagcaagaatgacccccccagcctgcggcccatgccccggggcagctgcctgccctgcccctgtgtgcagggcaccttcaggaacagccccatcagccacccccccagccccagccccagcgcctacagcagcaggaccagccggcccatgagagatgtgggggaggaccaggtgcacccccccctgtgccacttcccccagaggagcctgcagcaccagctgccccagcccggggcccagagatttgccacccggggctaccccatggaggacatgaagctgcagggcgtgcccatgcctcctggggacctgtgtggccccaccctgctgctggatgtgtccatcaagatggagaaggacagcggctgtgagggcgctgctgatggctgtgtgcccagccaggtgtggctgggcgccagtgacaggagccacccagccaccttccccaccaggatgcacctgaagacagagccagacagccggcagcaggtgtacatcagccacctgggccatggagtgcggggggcccagccccacggccgggccacagctggccgcagccgggagctgacccccttccacccagcccactgtgcctgcctggagcccacagatggcctgccccagagcgagcccccccaccagctgtgtgcccggggccgcggggagcagagctgcacctgcagagctgctgaggccgcccctgtggtgaagcgggagcccctggacagcccccagtgggccacccacagccagggcatggtgcccggcatgctgcccaagagcgccctggccaccctggtgcccccccaggccagcggctgcaccttcctgccctag

SEQ ID NO: 144099 - DNA, 2205 bp, synthetic construct
  misc_feature 1..2205: note = Description of Artificial Sequence: Synthetic coding sequence
  source 1..2205: mol_type = other DNA
atgagcggctttgatgatcctggcatcttctacagcgacagctttggaggagatgcccaggctgatgagggccaggccaggaagagccagctgcagaggcgcttcaaggagttcctgcggcagtacagagtgggcacagacagaacaggcttcaccttcaagtacagagatgagctgaagaggcactacaacctgggggagtactggattgaggtggagatggaggacctggccagctttgatgaggacctggccgactacctgtacaagcagcctgctgagcacctgcagctgctggaggaggccgccaaggaggtggctgatgaggtgacccggccccggcccagcggggaggaggtgctgcaggacatccaggtgatgctgaagagtgatgccagccccagcagcatccgcagcctgaagagtgacatgatgagccacctggtgaagatccctggcatcatcatcgccgccagcgctgtgcgggccaaggccacccgcatcagcatccagtgccgcagctgcaggaacaccctgaccaacatcgccatgaggcctggcctggagggctacgccctgcccaggaagtgcaacacagaccaggccggccggcccaagtgccccctggacccctacttcatcatgccagacaagtgcaagtgtgtggacttccagaccctgaagctgcaggagctgcctgatgctgtgccccacggggagatgcccaggcacatgcagctgtactgtgaccgctacctgtgtgacaaggtggtgcccggcaacagagtgaccatcatgggcatctacagcatcaagaagtttggcctgaccaccagccggggccgggacagagtgggcgtgggcatccgcagcagctacatccgggtgctgggcatccaggtggacacagatggcagcggccgcagctttgctggagctgtgagcccccaggaggaggaggagttccggcggctggccgccctgcccaacgtgtatgaggtgatcagcaagagcatcgcccccagcatctttggaggaacagacatgaagaaggccatcgcctgcctgctgtttggaggcagcaggaagaggctgcctgatggcctgaccaggagaggagacatcaacctgctgatgctgggggaccctggaacagccaagagccagctgctgaagtttgtggagaagtgcagccccatcggcgtgtacaccagcggcaagggcagcagcgctgctggcctgacagcctctgtgatgagggaccccagcagcaggaacttcatcatggagggcggggccatggtgctggctgatggcggcgtggtgtgcattgatgaatttgacaagatgagagaagatgacagagtggccatccacgaggccatggagcagcagaccatcagcatcgccaaggccggcatcaccaccaccctgaacagccgctgcagcgtgctggccgccgccaacagcgtgtttggccgctgggatgagaccaagggggaggacaacatcgacttcatgcccaccatcctgagcagatttgacatgatcttcatcgtgaaggatgagcacaatgaggagagagatgtgatgctggccaagcacgtgatcaccctgcacgtgtctgccctgacccagacccaggccgtggagggggagattgacctggccaagctgaagaagttcatcgcctactgccgggtgaagtgtggcccccggctgtctgctgaggccgctgagaagctgaagaaccgctacatcatcatgaggtctggggcccggcagcacgagcgggacagcgaccggcgcagcagcatccccatcaccgtgcggcagctggaggccatcgtgagaattgctgaggccctgagcaagatgaagctgcagccctttgccacagaagcagatgtggaggaggccctgcggctcttccaggtgtccaccctggatgctgccctgagcggcaccctgagcggcgtggagggcttcaccagccaggaggaccaggagatgctgagcagaattgagaagcagctgaagagaagatttgccatcggcagccaggtgtctgagcacagcatcatcaaggacttcaccaagcagaagtacccagagcacgccatccacaaggtgctgcagctgatgctgcggcggggggagatccagcacaggatgcagaggaaggtgctgtaccgcctgaagtag

SEQ ID NO: 144100 - DNA, 1530 bp, synthetic construct
  misc_feature 1..1530: note = Description of Artificial Sequence: Synthetic coding sequence
  source 1..1530: mol_type = other DNA
atgtccatgggcgcccccaggagcctgctgctggccctggccgccggcctggccgtggcccggccccccaacatcgtgctgatctttgctgatgacctgggctatggagacctgggctgctacggccaccccagcagcaccacccccaacctggaccagctggccgccggcggcctgcgcttcacagacttctacgtgcctgtgtccctgtgcacccccagccgggccgccctgctgaccggccgcctgcctgtgaggatgggcatgtacccaggagtgctggtgcccagcagccggggcggcctgcccctggaggaggtgacagtggccgaggtgctggccgcccggggctacctgaccggcatggccggcaagtggcacctgggcgtgggccctgagggcgccttcctgcccccccaccagggcttccaccgcttcctgggcatcccctacagccatgaccagggcccctgccagaacctgacctgcttccccccagccaccccctgtgatggcggctgtgaccagggcctggtgcccatccccctgctggccaacctgtctgtggaggcccagcccccctggctgcccggcctggaggcccgctacatggcctttgcccatgacctgatggctgatgcccagaggcaggaccggcccttcttcctgtactatgccagccaccacacccactacccccagttcagcggccagagctttgctgagaggagcggccggggcccctttggagacagcctgatggagctggatgctgctgtgggcaccctgatgacagccatcggggacctgggcctgctggaggagaccctggtgatcttcaccgctgacaatggacctgagaccatgaggatgagccggggcggctgcagcggcctgctgcgctgtgggaagggcaccacctatgagggcggcgtgcgggagcccgccctggccttctggccaggccacatcgcccctggggtgacccatgagctggccagcagcctggacctgctgcccaccctggccgccctggccggggcccccctgcccaacgtgaccctggatggctttgacctgagccccctgctgctgggcaccgggaagagcccccggcagagcctcttcttctaccccagctacccagatgaggtgcggggcgtgtttgctgtgaggacaggcaagtacaaggcccacttcttcacccagggcagcgcccacagcgacaccacagctgaccctgcctgccacgccagcagcagcctgacagcccacgagccccccctgctgtatgacctgagcaaggaccctggagagaactacaacctgctgggcggcgtggccggggccaccccagaggtgctgcaggccctgaagcagctgcagctgctgaaggcccagctggatgctgctgtgaccttcggccccagccaggtggcccggggagaagatcctgccctgcagatctgctgccaccctggctgcacccccaggcctgcctgctgccactgcccagacccccacgcctag

SEQ ID NO: 144101 - DNA, 1530 bp, synthetic construct; identical to SEQ ID NO: 144100
  misc_feature 1..1530: note = Description of Artificial Sequence: Synthetic coding sequence
  source 1..1530: mol_type = other DNA

SEQ ID NO: 144102 - DNA, 1530 bp, synthetic construct; identical to SEQ ID NO: 144100
  misc_feature 1..1530: note = Description of Artificial Sequence: Synthetic coding sequence
  source 1..1530: mol_type = other DNA

SEQ ID NO: 144103 - DNA, 1272 bp, synthetic construct
  misc_feature 1..1272: note = Description of Artificial Sequence: Synthetic coding sequence
  source 1..1272: mol_type = other DNA
atgggcatgtacccaggagtgctggtgcccagcagccggggcggcctgcccctggaggaggtgacagtggccgaggtgctggccgcccggggctacctgaccggcatggccggcaagtggcacctgggcgtgggccctgagggcgccttcctgcccccccaccagggcttccaccgcttcctgggcatcccctacagccatgaccagggcccctgccagaacctgacctgcttccccccagccaccccctgtgatggcggctgtgaccagggcctggtgcccatccccctgctggccaacctgtctgtggaggcccagcccccctggctgcccggcctggaggcccgctacatggcctttgcccatgacctgatggctgatgcccagaggcaggaccggcccttcttcctgtactatgccagccaccacacccactacccccagttcagcggccagagctttgctgagaggagcggccggggcccctttggagacagcctgatggagctggatgctgctgtgggcaccctgatgacagccatcggggacctgggcctgctggaggagaccctggtgatcttcaccgctgacaatggacctgagaccatgaggatgagccggggcggctgcagcggcctgctgcgctgtgggaagggcaccacctatgagggcggcgtgcgggagcccgccctggccttctggccaggccacatcgcccctggggtgacccatgagctggccagcagcctggacctgctgcccaccctggccgccctggccggggcccccctgcccaacgtgaccctggatggctttgacctgagccccctgctgctgggcaccgggaagagcccccggcagagcctcttcttctaccccagctacccagatgaggtgcggggcgtgtttgctgtgaggacaggcaagtacaaggcccacttcttcacccagggcagcgcccacagcgacaccacagctgaccctgcctgccacgccagcagcagcctgacagcccacgagccccccctgctgtatgacctgagcaaggaccctggagagaactacaacctgctgggcggcgtggccggggccaccccagaggtgctgcaggccctgaagcagctgcagctgctgaaggcccagctggatgctgctgtgaccttcggccccagccaggtggcccggggagaagatcctgccctgcagatctgctgccaccctggctgcacccccaggcctgcctgctgccactgcccagacccccacgcctag

SEQ ID NO: 144104 - DNA, 1524 bp, synthetic construct
  misc_feature 1..1524: note = Description of Artificial Sequence: Synthetic coding sequence
  source 1..1524: mol_type = other DNA
atgggcgcccccaggagcctgctgctggccctggccgccggcctggccgtggcccggccccccaacatcgtgctgatctttgctgatgacctgggctatggagacctgggctgctacggccaccccagcagcaccacccccaacctggaccagctggccgccggcggcctgcgcttcacagacttctacgtgcctgtgtccctgtgcacccccagccgggccgccctgctgaccggccgcctgcctgtgaggatgggcatgtacccaggagtgctggtgcccagcagccggggcggcctgcccctggaggaggtgacagtggccgaggtgctggccgcccggggctacctgaccggcatggccggcaagtggcacctgggcgtgggccctgagggcgccttcctgcccccccaccagggcttccaccgcttcctgggcatcccctacagccatgaccagggcccctgccagaacctgacctgcttccccccagccaccccctgtgatggcggctgtgaccagggcctggtgcccatccccctgctggccaacctgtctgtggaggcccagcccccctggctgcccggcctggaggcccgctacatggcctttgcccatgacctgatggctgatgcccagaggcaggaccggcccttcttcctgtactatgccagccaccacacccactacccccagttcagcggccagagctttgctgagaggagcggccggggcccctttggagacagcctgatggagctggatgctgctgtgggcaccctgatgacagccatcggggacctgggcctgctggaggagaccctggtgatcttcaccgctgacaatggacctgagaccatgaggatgagccggggcggctgcagcggcctgctgcgctgtgggaagggcaccacctatgagggcggcgtgcgggagcccgccctggccttctggccaggccacatcgcccctggggtgacccatgagctggccagcagcctggacctgctgcccaccctggccgccctggccggggcccccctgcccaacgtgaccctggatggctttgacctgagccccctgctgctgggcaccgggaagagcccccggcagagcctcttcttctaccccagctacccagatgaggtgcggggcgtgtttgctgtgaggacaggcaagtacaaggcccacttcttcacccagggcagcgcccacagcgacaccacagctgaccctgcctgccacgccagcagcagcctgacagcccacgagccccccctgctgtatgacctgagcaaggaccctggagagaactacaacctgctgggcggcgtggccggggccaccccagaggtgctgcaggccctgaagcagctgcagctgctgaaggcccagctggatgctgctgtgaccttcggccccagccaggtggcccggggagaagatcctgccctgcagatctgctgccaccctggctgcacccccaggcctgcctgctgccactgcccagacccccacgcctag

SEQ ID NO: 144105 - DNA, 1524 bp, synthetic construct; identical to SEQ ID NO: 144104
  misc_feature 1..1524: note = Description of Artificial Sequence: Synthetic coding sequence
  source 1..1524: mol_type = other DNA

SEQ ID NO: 144106 - DNA, 1782 bp, synthetic construct
  misc_feature 1..1782: note = Description of Artificial Sequence: Synthetic coding sequence
  source 1..1782: mol_type = other DNA
atgaggtctgctgcccggcggggccgggccgccccagctgcccgggacagcctgcctgtgctgctcttcctgtgcctgctgctgaagacctgtgagcccaagacagccaatgccttcaagcccaacatcctgctgatcatggctgatgacctgggcactggagacctgggctgctacggcaacaacaccctgcggacccccaacatcgaccagctggccgaggagggcgtgcggctgacccagcacctggccgccgcccccctgtgcacccccagccgggccgccttcctgaccggccgccacagcttccgcagcggcatggatgccagcaatggctaccgggccctgcagtggaatgccggcagcggcggcctgcctgaaaatgagaccacctttgcccgcatcctgcagcagcacggctacgccaccggcctcatcggcaagtggcaccagggcgtgaactgtgccagcagaggagaccactgccaccaccccctgaaccacggctttgactacttctacggcatgcccttcaccctgaccaatgactgtgaccccggccggcccccagaggtggatgctgccctgcgggcccagctgtggggctacacccagttcctggccctgggcatcctgaccctggccgccggccagacctgtggcttcttctctgtgtctgcccgggctgtgacaggcatggccggcgtgggctgcctcttcttcatctcctggtacagcagctttggatttgtgcggcgctggaactgcatcctgatgaggaaccatgatgtgacagagcagcccatggtgctggagaagacagccagcctgatgctgaaggaggccgtgtcctacatcgagcggcacaagcacggccccttcctgctcttcctgagcctgctgcacgtgcacatccccctggtgaccaccagcgccttcctgggcaagagccagcacggcctgtatggagacaacgtggaggagatggactggctgattggcaaggtgctgaatgccattgaagataatggcctgaagaacagcaccttcacctacttcaccagtgaccatggaggccacctggaggccagagatggccacagccagctgggcggctggaatggcatctacaagggcggcaagggcatgggcggctgggagggcggcatccgggtgcccggcatcttccactggccaggagtgctgcctgctggccgggtcatcggggagcccaccagcctgatggatgtgttccccaccgtggtgcagctggtgggcggggaggtgccccaggacagagtgattgatggccacagcctggtgcccctgctgcagggcgctgaggcccggagcgcccacgagttcctgttccactactgcggccagcacctgcacgccgcccgctggcaccagaaggacagcggctctgtgtggaaggtgcactacaccaccccccagttccaccctgagggcgctggggcctgctacggccggggcgtgtgcccctgcagcggggagggcgtgacccaccacaggcctcccctgctgtttgacctgagccgggaccccagcgaggcccggcccctgaccccagattctgagcccctgtaccacgctgtgattgcccgggtgggcgctgctgtgtctgagcaccggcagaccctgagccctgtgccccagcagttctccatgagcaacatcctgtggaagccctggctgcagccctgctgcggccacttccccttctgcagctgccatgaagatggagatggcaccccctag

SEQ ID NO: 144107 - DNA, 1770 bp, synthetic construct
  misc_feature 1..1770: note = Description of Artificial Sequence: Synthetic coding sequence
  source 1..1770: mol_type = other DNA
atgctgcacctgcaccacagctgcctgtgcttccgctcctggctgcctgccatgctggccgtgctgctgagcctggcccccagcgccagcagtgacatcagcgccagccggcccaacatcctgctgctgatggctgatgacctgggcatcggggacatcggctgctacggcaacaacaccatgaggacccccaacatcgaccggctggctgaagatggagtgaagctgacccagcacatctctgctgccagcctgtgcacccccagcagagctgccttcctgaccggccgctaccctgtgcgcagcggcatggtgagcagcatcggctacagagtgctgcagtggacaggagccagcggcggcctgcccaccaatgagaccacctttgccaagatcctgaaggagaagggctacgccaccggcctgattggcaagtggcacctgggcctgaactgtgagagcgccagtgaccactgccaccaccccctgcaccacggctttgaccacttctacggcatgcccttcagcctgatgggagactgtgcccgctgggagctgtctgagaagagggtgaacctggagcagaagctgaacttcctgttccaggtgctggccctggtggccctgaccctggtggccggcaagctgacccacctgatccctgtgtcctggatgcctgtgatctggagcgccctgtctgctgtgctgctgctggccagcagctactttgtgggcgccctgattgtgcatgctgactgcttcctgatgaggaaccacaccatcacagagcagcccatgtgcttccagaggaccacccccctcatcctgcaggaggtggccagcttcctgaagaggaacaagcacggccccttcctgctgtttgtgtccttcctgcacgtgcacatccccctcatcaccatggagaacttcctgggcaagagcctgcacggcctgtatggagacaacgtggaggagatggactggatggtgggccgcatcctggacaccctggatgtggagggcctgagcaacagcaccctcatctacttcaccagtgaccacggcggcagcctggagaaccagctgggcaacacccagtatggaggctggaatggcatctacaagggcggcaagggcatgggcggctgggagggcggcatccgggtgcccggcatcttccgctggccaggagtgctgcctgctggccgggtgattggagagcccaccagcctgatggatgtgttccccaccgtggtgcggctggccggcggggaggtgccccaggacagagtgattgatggccaggacctgctgcccctgctgctgggcacagcccagcacagcgaccacgagttcctgatgcactactgtgagcgcttcctgcatgctgcccgctggcaccagagggaccggggcaccatgtggaaggtgcactttgtgacccctgtgttccagcctgagggcgctggggcctgctacggcaggaaggtgtgcccctgctttggagagaaggtggtgcaccacgacccccccctgctgtttgacctgagccgggaccccagcgagacccacatcctgaccccagccagcgagcccgtcttctaccaggtgatggagcgggtgcagcaggccgtgtgggagcaccagaggaccctgagccctgtgcccctgcagctggaccggctgggcaacatctggaggccctggctgcagccctgctgcggccccttccccctgtgctggtgcctgagagaagatgacccccagtag

SEQ ID NO: 144108 - DNA, 537 bp, synthetic construct
  misc_feature 1..537: note = Description of Artificial Sequence: Synthetic coding sequence
  source 1..537: mol_type = other DNA
atgctgcacctgcaccacagctgcctgtgcttccgctcctggctgcctgccatgctggccgtgctgctgagcctggcccccagcgccagcagtgacatcagcgccagccggcccaacatcctgctgctgatggctgatgacctgggcatcggggacatcggctgctacggcaacaacaccatgaggacccccaacatcgaccggctggctgaagatggagtgaagctgacccagcacatctctgctgccagcctgtgcacccccagcagagctgccttcctgaccggccgctaccctgtgcgcagcggcatggtgagcagcatcggctacagagtgctgcagtggacaggagccagcggcggcctgcccaccaatgagaccacctttgccaagatcctgaaggagaagggctacgccaccggcctgattggcaagtggcacctgggcctgaactgtgagagcgccagtgaccactgccaccaccccctgcaccacggctttgaccacttctacggcatgcccttcagcctgatgtag

SEQ ID NO: 144109 - DNA, 1635 bp, synthetic construct
  misc_feature 1..1635: note = Description of Artificial Sequence: Synthetic coding sequence
  source 1..1635: mol_type = other DNA
atgagcggcagccgggagcgggacaacatgctgcacctgcaccacagctggacccccaacatcgaccggctggccgaggatggagtgaagctgacccagcacatctctgctgccagcctgtgcacccccagccgggccgccttcctgaccggccgctaccctgtgcgcagcggcatggtgagcagcatcggctacagagtgctgcagtggacaggagccagcggcggcctgcccaccaatgagaccacctttgccaagatcctgaaggagaagggctacgccaccggcctcatcggcaagtggcacctgggcctgaactgtgagagcgccagtgaccactgccaccaccccctgcaccacggctttgaccacttctacggcatgcccttcagcctgatgggagactgtgcccgctgggagctgtctgagaagagggtgaacctggagcagaagctgaacttcctgttccaggtgctggccctggtggccctgaccctggtggccggcaagctgacccacctgatccctgtgtcctggatgcctgtgatctggagcgccctgtctgctgtgctgctgctggccagcagctactttgtgggcgccctgattgtgcacgccgactgcttcctgatgaggaaccacaccatcacagagcagcccatgtgcttccagaggaccacccccctcatcctgcaggaggtggccagcttcctgaagaggaacaagcacggccccttcctgctgtttgtgtccttcctgcacgtgcacatccccctcatcaccatggagaacttcctgggcaagagcctgcacggcctgtatggagacaacgtggaggagatggactggatggtgggccgcatcctggacaccctggatgtggagggcctgagcaacagcaccctcatctacttcaccagtgaccatggaggcagcctggagaaccagctgggcaacacccagtatggaggctggaatggcatctacaagggcggcaagggcatgggcggctgggagggcggcatccgggtgcccggcatcttccgctggccaggagtgctgcctgctggccgggtcatcggggagcccaccagcctgatggatgtgttccccaccgtggtgcggctggccggcggggaggtgccccaggacagagtgattgatggccaggacctgctgcccctgctgctgggcacagcccagcacagcgaccacgagttcctgatgcactactgtgagcgcttcctgcacgccgcccgctggcaccagagggaccggggcaccatgtggaaggtgcactttgtgacccctgtgttccagcctgagggcgctggggcctgctacggcaggaaggtgtgcccctgcttcggggagaaggtggtgcaccacgacccccccctgctgtttgacctgagccgggaccccagcgagacccacatcctgaccccagccagcgagcctgtgttctaccaggtgatggagcgggtgcagcaggccgtgtgggagcaccagaggaccctgagccctgtgcccctgcagctggaccggctgggcaacatctggaggccctggctgcagccctgctgcggccccttccccctgtgctggtgcctgcgggaggatgacccccagtag

SEQ ID NO: 144110 - DNA, 1845 bp, synthetic construct
  misc_feature 1..1845: note = Description of Artificial Sequence: Synthetic coding sequence
  source 1..1845: mol_type = other DNA
atgaggcctgtgatcaacagatgtgcccctggcagcctggacctgatgctgccccaggccgccagcgagggcatcgtgttccacagcctgcagatcagcctgtgcttccgctcctggctgcctgccatgctggccgtgctgctgagcctggcccccagcgccagcagtgacatcagcgccagccggcccaacatcctgctgctgatggctgatgacctgggcattggagacatcggctgctacggcaacaacaccatgaggacccccaacatcgaccggctggccgaggatggagtgaagctgacccagcacatctctgctgccagcctgtgcacccccagccgggccgccttcctgaccggccgctaccctgtgcgcagcggcatggtgagcagcatcggctacagagtgctgcagtggacaggagccagcggcggcctgcccaccaatgagaccacctttgccaagatcctgaaggagaagggctacgccaccggcctcatcggcaagtggcacctgggcctgaactgtgagagcgccagtgaccactgccaccaccccctgcaccacggctttgaccacttctacggcatgcccttcagcctgatgggagactgtgcccgctgggagctgtctgagaagagggtgaacctggagcagaagctgaacttcctgttccaggtgctggccctggtggccctgaccctggtggccggcaagctgacccacctgatccctgtgtcctggatgcctgtgatctggagcgccctgtctgctgtgctgctgctggccagcagctactttgtgggcgccctgattgtgcacgccgactgcttcctgatgaggaaccacaccatcacagagcagcccatgtgcttccagaggaccacccccctcatcctgcaggaggtggccagcttcctgaagaggaacaagcacggccccttcctgctgtttgtgtccttcctgcacgtgcacatccccctcatcaccatggagaacttcctgggcaagagcctgcacggcctgtatggagacaacgtggaggagatggactggatggtgggccgcatcctggacaccctggatgtggagggcctgagcaacagcaccctcatctacttcaccagtgaccatggaggcagcctggagaaccagctgggcaacacccagtatggaggctggaatggcatctacaagggcggcaagggcatgggcggctgggagggcggcatccgggtgcccggcatcttccgctggccaggagtgctgcctgctggccgggtcatcggggagcccaccagcctgatggatgtgttccccaccgtggtgcggctggccggcggggaggtgccccaggacagagtgattgatggccaggacctgctgcccctgctgctgggcacagcccagcacagcgaccacgagttcctgatgcactactgtgagcgcttcctgcacgccgcccgctggcaccagagggaccggggcaccatgtggaaggtgcactttgtgacccctgtgttccagcctgagggcgctggggcctgctacggcaggaaggtgtgcccctgcttcggggagaaggtggtgcaccacgacccccccctgctgtttgacctgagccgggaccccagcgagacccacatcctgaccccagccagcgagcctgtgttctaccaggtgatggagcgggtgcagcaggccgtgtgggagcaccagaggaccctgagccctgtgcccctgcagctggaccggctgggcaacatctggaggccctggctgcagccctgctgcggccccttccccctgtgctggtgcctgcgggaggatgacccccagtag

SEQ ID NO: 144111 - DNA, 1773 bp, synthetic construct
  misc_feature 1..1773: note = Description of Artificial Sequence: Synthetic coding sequence
  source 1..1773: mol_type = other DNA
atgaggccccggcggcccctggtgttcatgagcctggtgtgtgccctgctgaacacctgccaggcccaccgggtgcatgatgacaagcccaacatcgtgctgatcatggtggatgacctgggcatcggggacctgggctgctatggaaatgacaccatgaggaccccccacatcgaccggctggcccgggagggcgtgcggctgacccagcacatctctgctgccagcctgtgcagccccagccgcagcgccttcctgaccggccgctaccccatccgcagcggcatggtgagcagcggcaacagaagagtcatccagaacctggccgtgcctgctggcctgcccctgaatgagaccaccctggccgccctgctgaagaagcagggctacagcacaggcctgattggcaagtggcaccagggcctgaactgtgacagcagaagtgaccagtgccaccacccctacaactacggctttgactactactacggcatgcccttcaccctggtggacagctgctggccagaccccagcaggaacacagagctggcctttgagagccagctgtggctgtgtgtgcagctggtggccatcgccatcctgaccctgaccttcggcaagctgagcggctgggtgtctgtgccctggctgctgatcttctccatgatcctcttcatcttcctgctgggctacgcctggttcagcagccacaccagccccctgtactgggactgcctgctgatgaggggccacgagatcacagagcagcccatgaaggccgagagagctggcagcatcatggtgaaggaggccatctccttcctggagcggcacagcaaggagaccttcctgctcttcttctccttcctgcacgtgcacacccccctgcccaccacagatgacttcaccggcaccagcaagcacggcctgtatggagacaacgtggaggagatggacagcatggtgggcaagatcctggatgccattgatgactttggcctgaggaacaacaccctggtgtacttcaccagtgaccacggcggccacctggaggcccggcggggccacgcccagctgggcggctggaatggcatctacaagggcggcaagggcatgggcggctgggagggcggcatccgggtgcccggcatcgtgcgctggccaggcaaggtgcctgctggccgcctcatcaaggagcccaccagcctgatggacatcctgcccaccgtggcctctgtgtctgggggcagcctgccccaggacagagtgattgatggccgggacctgatgcccctgctgcagggcaatgtgcgccacagcgagcacgagttcctgttccactactgcggcagctacctgcatgctgtgcgctggatccccaaggatgacagcggctctgtgtggaaggcccactacgtgacccctgtgttccagcccccagccagcggcggctgctacgtgaccagcctgtgccgctgcttcggggagcaggtgacctaccacaacccccccctgctgtttgacctgagccgggaccccagcgagagcacccccctgaccccagccacagagcccctgcatgactttgtgatcaagaaggtggccaatgccctgaaggagcaccaggagaccatcgtgcctgtgacctaccagctgtctgagctgaaccagggccgcacctggctgaagccctgctgcggggtcttccccttctgcctgtgtgacaaggaggaggaggtgtcccagccccggggccccaatgagaagaggtag

SEQ ID NO: 144112 - DNA, 1773 bp, synthetic construct; identical to SEQ ID NO: 144111
  misc_feature 1..1773: note = Description of Artificial Sequence: Synthetic coding sequence
  source 1..1773: mol_type = other DNA

SEQ ID NO: 144113 - DNA, 1773 bp, synthetic construct; identical to SEQ ID NO: 144111
  misc_feature 1..1773: note = Description of Artificial Sequence: Synthetic coding sequence
  source 1..1773: mol_type = other DNA

SEQ ID NO: 144114 - DNA, 1689 bp, synthetic construct
  misc_feature 1..1689: note = Description of Artificial Sequence: Synthetic coding sequence
  source 1..1689: mol_type = other DNA
atgaccagaaatgcccggcccaacatcgtgctgctgatggctgatgacctgggcgtgggggacctgtgctgctacggcaacaacagcgtgtccacccccaacatcgaccggctggccagcgagggcgtgcggctgacccagcacctggccgccgcctccatgtgcacccccagccgggccgccttcctgaccggccgctaccccatccgcagcggcatggtgtctgcctacaacctgaacagagccttcacctggctgggcggcagcggcggcctgcccaccaatgagaccacctttgccaagctgctgcagcaccggggctacagaacaggcctgattggcaagtggcacctgggcctgagctgtgccagcagaaatgaccactgctaccaccccctgaaccacggcttccactacttctatggagtgcccttcggcctgctgagtgactgccaggccagcaagaccccagagctgcaccgctggctgcgcatcaagctgtggatcagcacagtggccctggccctggtgcccttcctgctgctgatccccaagtttgcccgctggttctctgtgccctggaaggtgatctttgtgtttgccctgctggccttcctgttcttcacctcctggtacagcagctatggcttcacccggcgctggaactgcatcctgatgagaaatcatgagatcatccagcagcccatgaaggaggagaaggtggccagcctgatgctgaaggaggccctggccttcatcgagcgctacaagcgggagcccttcctgctcttcttctccttcctgcacgtgcacacccccctcatcagcaagaagaagtttgtgggccgcagcaaatatggccgctatggagacaacgtggaggagatggactggatggtgggcaagatcctggatgccctggaccaggagcggctggccaaccacaccctggtgtacttcaccagtgacaatggaggccacctggagcccctggatggagctgtgcagctgggcggctggaatggcatctacaagggcggcaagggcatgggcggctgggagggcggcatccgggtgcccggcatcttccgctggcccagcgtgctggaggccggccgggtcatcaatgagcccaccagcctgatggacatctaccccaccctgagctacatcggcggcggcatcctgagccaggacagagtgattgatggccagaacctgatgcccctgctggagggccgggccagccacagcgaccacgagttcctgttccactactgcggcgtgtacctgcacacagtgcgctggcaccagaaggactgtgccaccgtgtggaaggcccactacgtgacccccaagttctacccagagggcactggagcctgctacggcagcggcatctgcagctgcagcggagatgtgacctaccatgacccccccctgctgtttgacatcagccgggaccccagcgaggccctgcccctgaacccagacaatgagcccctgtttgattctgtcatcaagaagatggaggccgccatccgggagcacaggaggaccctgacccctgtgccccagcagttctctgtgttcaacaccatctggaagccctggctgcagccctgctgcggcaccttccccttctgtggctgtgacaaggaggatgacatcctgcccatggccccctag

SEQ ID NO: 144115 - DNA, 1710 bp, synthetic construct
  misc_feature 1..1710: note = Description of Artificial Sequence: Synthetic coding sequence
  source 1..1710: mol_type = other DNA
atgcacaccctgaccggcttcagcctggtgtccctgctgagctttggctacctgtcctgggactgggccaagcccagctttgtggctgatggccctggagaggccggggagcagcccagcgctgccccaccccagcccccccacatcatcttcatcctgacagatgaccagggctaccatgatgtgggctaccacggcagtgacatcgagacccccaccctggaccggctggccgccaagggcgtgaagctggagaactactacatccagcccatctgcacccccagccgcagccagctgctgaccggccgctaccagatccacacaggcctgcagcacagcatcatccggccccagcagcccaactgcctgcccctggaccaggtgaccctgccccagaagctgcaggaggccggctacagcacccacatggtgggcaagtggcacctgggcttctacaggaaggagtgcctgcccacccggcggggctttgacaccttcctgggcagcctgactggaaatgtggactactacacctatgacaactgtgatggccctggggtgtgtggctttgacctgcacgagggagaaaatgtggcctggggcctgagcggccagtacagcaccatgctgtatgcccagagggccagccacatcctggccagccacagcccccagaggcccctcttcctgtatgtggccttccaggccgtgcacacccccctgcagagcccccgggagtacctgtaccgctaccgcaccatgggaaatgtggcccggaggaaatatgctgccatggtgacctgcatggatgaagctgtgaggaacatcacctgggccctgaagagatatggcttctacaacaacagcgtcatcatcttcagcagtgacaatggaggccagaccttcagcggcggcagcaactggcccctgcggggcaggaagggcacctactgggagggcggcgtgcggggcctgggctttgtgcacagccccctgctgaagaggaagcagaggaccagccgggccctgatgcacatcacagactggtaccccaccctggtgggcctggccggcggcaccaccagcgctgctgatggcctggatggctatgatgtgtggccagccatcagcgagggccgggccagccccaggacagagatcctgcacaacatcgaccccctgtacaaccacgcccagcacggcagcctggagggcggcttcggcatctggaacacagctgtgcaggccgccatccgggtgggggagtggaagctgctgaccggggaccccggctatggagactggatccccccccagaccctggccaccttccctggctcctggtggaacctggagaggatggcctctgtgcggcaggccgtgtggctgttcaacatctctgctgacccctatgaaagagaggacctggccggccagaggccagatgtggtgaggaccctgctggcccggctggccgagtacaacagaacagccatccctgtgcgctacccagctgagaacccccgggcccacccagacttcaacggcggggcctggggcccctgggccagtgatgaggaggaggaggaggaggagggccgggcccggagcttcagccggggccgcaggaagaagaagtgcaagatctgcaagctgcgctccttcttcaggaagctgaacacccggctgatgagccagaggatctag

SEQ ID NO: 144116 - DNA, 261 bp, synthetic construct
  misc_feature 1..261: note = Description of Artificial Sequence: Synthetic coding sequence
  source 1..261: mol_type = other DNA
atggtgggcaagtggcacctgggcttctacagaaaagaatgtctgcccacccggcggggctttgacaccttcctgggcagcctgactggaaatgtggactactacacctatgacaactgtgatggccctggggtgtgtggctttgacctgcatgaaggagaaaatgtggcctggggcctgagcggccagtacagcaccatgctgtatgcccagagggccagccacatcctggccagccacagcccccagaggcccctgtag

SEQ ID NO: 144117 - DNA, 1281 bp, synthetic construct
  misc_feature 1..1281: note = Description of Artificial Sequence: Synthetic coding sequence
  source 1..1281: mol_type = other DNA
atggtgggcaagtggcacctgggcttctacagaaaagaatgtctgcccacccggcggggctttgacaccttcctgggcagcctgactggaaatgtggactactacacctatgacaactgtgatggccctggggtgtgtggctttgacctgcatgaaggagaaaatgtggcctggggcctgagcggccagtacagcaccatgctgtatgcccagagggccagccacatcctggccagccacagcccccagaggcccctcttcctgtatgtggccttccaggccgtgcacacccccctgcagagcccccgggagtacctgtaccgctaccgcaccatgggaaatgtggcccggaggaaatatgctgccatggtgacctgcatggatgaggccgtgaggaacatcacctgggccctgaagagatatggcttctacaacaacagcgtcatcatcttcagcagtgacaatggaggccagaccttcagcggcggcagcaactggcccctgcggggcaggaagggcacctactgggagggcggcgtgcggggcctgggctttgtgcacagccccctgctgaagaggaagcagaggaccagccgggccctgatgcacatcacagactggtaccccaccctggtgggcctggccggcggcaccaccagcgctgctgatggcctggatggctatgatgtgtggccagccatcagcgagggccgggccagccccaggacagagatcctgcacaacatcgaccccctgtacaaccacgcccagcacggcagcctggagggcggcttcggcatctggaacacagctgtgcaggccgccatccgggtgggggagtggaagctgctgactggagaccccggctacggggactggatccccccccagaccctggccaccttccctggctcctggtggaacctggagaggatggcctctgtgcggcaggccgtgtggctgttcaacatctctgctgacccctatgagcgggaggacctggccggccagaggccagatgtggtgaggaccctgctggcccggctggccgagtacaacagaacagccatccctgtgcgctacccagctgagaacccccgggcccacccagacttcaatggaggagcctggggcccctgggccagtgatgaggaggaggaggaggaggagggccgggcccgctccttcagccggggccgcaggaagaagaagtgcaagatctgcaagctgcggagcttcttcaggaagctgaacacccggctgatgagccagaggatctag

SEQ ID NO: 144118 - DNA, 1800 bp, synthetic construct
  misc_feature 1..1800: note = Description of Artificial Sequence: Synthetic coding sequence
  source 1..1800: mol_type = other DNA
atggccccccggggctgtgccggccaccccccaccacccagcccccaggcctgtgtgtgccctgggaagatgctggccatgggcgccctggccggcttctggatcctgtgcctgctgacctacggctacctgtcctggggccaggccctggaggaggaggaggagggcgccctgctggcccaggccggggagaagctggagcccagcaccaccagcaccagccagccccacctgatcttcatcctggctgatgaccagggcttcagagatgtgggctaccacggcagcgagatcaagacccccaccctggacaagctggccgctgagggcgtgaagctggagaactactacgtgcagcccatctgcacccccagccgcagccagttcatcaccgggaagtaccagatccacacaggcctgcagcacagcatcatccggcccacccagcccaactgcctgcccctggacaatgccaccctgccccagaagctgaaggaggtgggctacagcacccacatggtgggcaagtggcacctgggcttctacagaaaagaatgcatgcccacccggcggggctttgacaccttcttcggcagcctgctgggcagcggggactactacacccactacaagtgtgacagccctggcatgtgtggctatgacctgtatgaaaatgacaatgctgcctgggactatgacaatggcatctacagcacccagatgtacacccagagggtgcagcagatcctggccagccacaaccccaccaagcccatcttcctgtacatcgcctaccaggccgtgcacagccccctgcaggcccctggccgctactttgagcactaccgcagcatcatcaacatcaacagaagaagatatgctgccatgctgagctgcctggatgaggccatcaacaacgtgaccctggccctgaagacctacggcttctacaacaacagcatcatcatctacagcagtgacaatggaggccagcccacagctgggggcagcaactggcccctgcggggcagcaagggcacctactgggagggcggcatccgggctgtgggctttgtgcacagccccctgctgaagaacaagggcaccgtgtgcaaggagctggtgcacatcacagactggtaccccaccctcatcagcctggccgagggccagattgatgaggacatccagctggatggctatgacatctgggagaccatcagcgagggcctgcggagcccccgggtggacatcctgcacaacatcgaccccatctacaccaaggccaagaatggctcctgggccgccggctacggcatctggaacacagccatccagagcgccatccgggtgcagcactggaagctgctgaccggcaaccctggctacagcgactgggtgcccccccagagcttcagcaacctgggccccaaccgctggcacaatgaaagaatcaccctgagcacaggcaagtctgtgtggctgttcaacatcacagctgacccctatgagcgggtggacctgagcaaccgctacccaggcatcgtgaagaagctgctgcggcggctgagccagttcaacaagacagctgtgcctgtgcgctacccacccaaggaccccaggagcaacccccggctgaatggaggagtgtggggcccctggtacaaggaggagaccaagaagaagaagcccagcaagaaccaggccgagaagaagcagaagaagagcaagaagaagaagaagaagcagcagaaggctgtgtctggcagcacctgccacagcggcgtgacctgtggctag

SEQ ID NO: 144119 - DNA, 1791 bp, synthetic construct
  misc_feature 1..1791: note = Description of Artificial Sequence: Synthetic coding sequence
  source 1..1791: mol_type = other DNA
atggccccccggggctgtgccggccaccccccaccacccagcccccaggcctgtgtgtgccctgggaagatgctggccatgggcgccctggccggcttctggatcctgtgcctgctgacctacggctacctgtcctggggccaggccctggaggaggaggaggagggcgccctgctggcccaggccggggagaagctggagcccagcaccaccagcaccagccagccccacctgatcttcatcctggctgatgaccagggcttcagagatgtgggctaccacggcagcgagatcaagacccccaccctggacaagctggccgctgagggcgtgaagctggagaactactacgtgcagcccatctgcacccccagccgcagccagttcatcaccgggaagtaccagatccacacaggcctgcagcacagcatcatccggcccacccagcccaactgcctgcccctggacaatgccaccctgccccagaagctgaaggaggtgggctacagcacccacatggtgggcaagtggcacctgggcttctacagaaaagaatgcatgcccacccggcggggctttgacaccttcttcggcagcctgctgggcagcggggactactacacccactacaagtgtgacagccctggcatgtgtggctatgacctgtatgaaaatgacaatgctgcctgggactatgacaatggcatctacagcacccagatgtacacccagagggtgcagcagatcctggccagccacaaccccaccaagcccatcttcctgtacatcgcctaccaggccgtgcacagccccctgcaggcccctggccgctactttgagcactaccgcagcatcatcaacatcaacagaagaagatatgctgccatgctgagctgcctggatgaggccatcaacaacgtgaccctggccctgaagacctacggcttctacaacaacagcatcatcatctacagcagtgacaatggaggccagcccacagctgggggcagcaactggcccctgcggggcagcaagggcacctactgggagggcggcatccgggctgtgggctttgtgcacagccccctgctgaagaacaagggcaccgtgtgcaaggagctggtgcacatcacagactggtaccccaccctcatcagcctggccgagggccagattgatgaggacatccagctggatggctatgacatctgggagaccatcagcgagggcctgcggagcccccgggtggacatcctgcacaacatcgaccccatctacaccaaggccaagaatggctcctgggccgccggctacggcatctggaacacagccatccagagcgccatccgggtgcagcactggaagctgctgaccggcaaccctggctacagcgactgggtgcccccccagagcttcagcaacctgggccccaaccgctggcacaatgaaagaatcaccctgagcacaggcaagtctgtgtggctgttcaacatcacagctgacccctatgagcgggtggacctgagcaaccgctacccaggcatcgtgaagaagctgctgcggcggctgagccagttcaacaagacagctgtgcctgtgcgctacccacccaaggaccccaggagcaacccccggctgaatggaggagtgtggggcccctggtacaaggaggagaccaagaagaagaagcccagcaagaaccaggccgagaagaagcagaagaagagcaagaagaagaagaagaagcagcagaaggctgtgtctgggaagccagccaacctggccaggtag

SEQ ID NO: 144120 - DNA, 507 bp, synthetic construct
  misc_feature 1..507: note = Description of Artificial Sequence: Synthetic coding sequence
  source 1..507: mol_type = other DNA
atggcccctggccagcaggccatgggcagcggcaccctgcagagcagccagcccagcgagtgcagcacaggcctgctgactggaaatcctggctacagcgactgggtgcccccccagagcttcagcaacctgggccccaaccgctggcacaatgaaagaatcaccctgagcacaggcaagtctgtgtggctgttcaacatcacagctgacccctatgaaagagtggacctgagcaaccgctacccaggcatcgtgaagaagctgctgcggcggctgagccagttcaacaagacagctgtgcctgtgcgctacccacccaaggaccccaggagcaacccccggctgaatggaggagtgtggggcccctggtacaaggaggagaccaagaagaagaagcccagcaagaaccaggccgagaagaagcagaagaagagcaagaagaagaagaagaagcagcagaaggctgtgtctggcagcacctgccacagcggcgtgacctgtggctag

SEQ ID NO: 144121 - DNA, 1611 bp, synthetic construct
  misc_feature 1..1611: note = Description of Artificial Sequence: Synthetic coding sequence
  source 1..1611: mol_type = other DNA
atgctgctgctgtgggtgtctgtggtggccgccctggccctggccgtgctggcccctggagctggggagcagaggcggcgggccgccaaggccccaaatgtggtgctggtggtgtctgacagctttgatggccgcctgaccttccaccctggcagccaggtggtgaagctgcccttcatcaacttcatgaagacccggggcaccagcttcctgaatgcctacaccaacagccccatctgctgccccagcagagctgccatgtggagcggcctcttcacccacctgacagagagctggaacaacttcaagggcctggaccccaactacaccacctggatggatgtgatggagagacatggctaccgcacccagaagtttgggaagctggactacaccagcggccaccacagcatcagcaacagagtggaggcctggaccagagatgtggccttcctgctgcggcaggagggccggcccatggtgaacctgatccggaacagaaccaaggtgcgggtgatggagcgggactggcagaacacagacaaggctgtgaactggctgaggaaggaggccatcaactacacagagcccttcgtcatctacctgggcctgaacctgccccacccctaccccagccccagcagtggagaaaattttggcagcagcaccttccacaccagcctgtactggctggagaaggtgtcccatgatgccatcaagatccccaagtggagccccctgtctgagatgcaccctgtggactactacagcagctacaccaagaactgcaccggccgcttcaccaagaaggagatcaagaacatccgggccttctactatgccatgtgtgccgagacagatgccatgctgggggagatcatcctggccctgcaccagctggacctgctgcagaagaccatcgtcatctacagcagtgaccacggggagctggccatggagcaccggcagttctacaagatgtccatgtatgaggccagcgcccacgtgcccctgctgatgatgggccctggcatcaaggccggcctgcaggtgtccaatgtggtgtccctggtggacatctaccccaccatgctggacattgctggcatccccctgccccagaacctgagcggctacagcctgctgcccctgagcagcgagaccttcaagaatgagcacaaggtgaagaacctgcaccccccctggatcctgtctgagttccacggctgcaatgtgaatgccagcacctacatgctgcggaccaaccactggaagtacatcgcctacagtgatggagccagcatcctgccccagctgtttgacctgagcagtgaccctgatgagctgaccaacgtggccgtgaagtttcctgagatcacctacagcctggaccagaagctgcacagcatcatcaactaccccaaggtgtctgcctctgtgcaccagtacaacaaggagcagttcatcaagtggaagcagagcatcggccagaactacagcaatgtgattgccaacctgcgctggcaccaggactggcagaaggagcccaggaaatatgaaaatgccatcgaccagtggctgaagacccacatgaaccccagggctgtgtag

SEQ ID NO: 144122 - DNA, 561 bp, synthetic construct
  misc_feature 1..561: note = Description of Artificial Sequence: Synthetic coding sequence
  source 1..561: mol_type = other DNA
atgctgctgctgtgggtgtctgtggtggccgccctggccctggccgtgctggcccctggagctggggagcagaggcggcgggccgccaaggccccaaatgtggtgctggtggtgtctgacagctttgatggccgcctgaccttccaccctggcagccaggtggtgaagctgcccttcatcaacttcatgaagacccggggcaccagcttcctgaatgcctacaccaacagccccatctgctgccccagcagagctgccatgtggagcggcctcttcacccacctgacagagagctggaacaacttcaagggcctggaccccaactacaccacctggatggatgtgatggagagacatggctaccgcacccagaagtttgggaagctggactacaccagcggccaccacagcatcagcaacagagtggaggcctggaccagagatgtggccttcctgctgcggcaggagggccggcccatggtgaacctgatccggaacagaaccaaggtgcgggtgatggagcgggactggcagaacacagacaaggctgtgactggatag

SEQ ID NO: 144123 - DNA, 1275 bp, synthetic construct
  misc_feature 1..1275: note = Description of Artificial Sequence: Synthetic coding sequence
  source 1..1275: mol_type = other DNA
atgtggggctgctgcgtgtgtggggccctgtttgagggccagaggctgcggctgctgcgggcccctggagatggcctgagcagccccttcaccgtggtgtccaggaagtggcacctgggccaccacggcagctaccaccccaacttccggggctttgactactacttcggcatcccctacagccatgacatgggctgcacagacaccccaggctacaaccaccccccctgcccagcctgcccccagggagatggccccagcaggaacctgcagagggactgctacacagatgtggccctgcccctgtatgagaacctgaacatcgtggagcagcctgtgaacctgagcagcctggcccagaagtatgcagagaaggccacccagttcatccagagggccagcaccagcggccggcccttcctgctgtatgtggccctggcccacatgcacgtgcccctgcctgtgacccagctgcctgctgccccccggggccgcagcctgtatggagctggcctgtgggagatggacagcctggtgggccagatcaaggacaaggtggaccacacagtgaaggagaacaccttcctgtggttcaccggggacaatggcccctgggcccagaagtgtgagctggccggctctgtgggccccttcaccggcttctggcagacccggcagggcggcagccctgccaagcagaccacctgggagggcggccaccgggtgcctgccctggcctactggccaggccgggtgcctgtgaatgtgaccagcacagccctgctgtctgtgctggacatcttccccaccgtggtggccctggcccaggccagcctgccccagggcagaagatttgatggagtggatgtgtctgaggtgctgtttggccgcagccagcccggccaccgggtgctcttccaccccaacagcggggctgctggggagtttggagccctgcagacagtgcggctggagcgctacaaggccttctacatcactggaggagcccgggcctgtgatggcagcactggacctgagctgcagcacaagttccccctcatcttcaacctggaggatgacacagctgaggccgtgcccctggagcggggcggcgctgagtaccaggccgtgctgcctgaggtgaggaaggtgctggctgatgtgctgcaggacatcgccaatgacaacatcagcagcgctgactacacccaggaccccagcgtgaccccctgctgcaacccctaccagatcgcctgccgctgccaggccgcctag

SEQ ID NO: 144124 - DNA, 1578 bp, synthetic construct
  misc_feature 1..1578: note = Description of Artificial Sequence: Synthetic coding sequence
  source 1..1578: mol_type = other DNA
atgggctggctgttcctgaaggtgctgctggccggcgtgtccttcagcggcttcctgtaccccctggtggacttctgcatcagcggcaagacccggggccagaagcccaacttcgtcatcatcctggctgatgacatgggctggggagacctgggcgccaactgggccgagaccaaggacacagccaacctggacaagatggccagcgagggcatgagatttgtggacttccacgccgccgccagcacctgcagccccagccgggccagcctgctgaccggccgcctgggcctgagaaatggagtgaccaggaactttgctgtgacctctgtgggcggcctgcccctgaatgagaccaccctggccgaggtgctgcagcaggccggctacgtgacaggcatcatcggcaagtggcacctgggccaccacggcagctaccaccccaacttccggggctttgactactacttcggcatcccctacagccatgacatgggctgcacagacaccccaggctacaaccaccccccctgcccagcctgcccccagggagatggccccagcaggaacctgcagagggactgctacacagatgtggccctgcccctgtatgagaacctgaacatcgtggagcagcctgtgaacctgagcagcctggcccagaagtatgcagagaaggccacccagttcatccagagggccagcaccagcggccggcccttcctgctgtatgtggccctggcccacatgcacgtgcccctgcctgtgacccagctgcctgctgccccccggggccgcagcctgtatggagctggcctgtgggagatggacagcctggtgggccagatcaaggacaaggtggaccacacagtgaaggagaacaccttcctgtggttcaccggggacaatggcccctgggcccagaagtgtgagctggccggctctgtgggccccttcaccggcttctggcagacccggcagggcggcagccctgccaagcagaccacctgggagggcggccaccgggtgcctgccctggcctactggccaggccgggtgcctgtgaatgtgaccagcacagccctgctgtctgtgctggacatcttccccaccgtggtggccctggcccaggccagcctgccccagggccgccgctttgatggagtggatgtgtctgaggtgctgtttggccgcagccagcccggccaccgggtgctcttccaccccaacagcggggccgccggggagtttggagccctgcagacagtgcggctggagcgctacaaggccttctacatcaccggcggggcccgggcctgtgatggcagcacaggccctgagctgcagcacaagttccccctcatcttcaacctggaggatgacacagctgaggccgtgcccctggagcggggcggcgctgagtaccaggccgtgctgcctgaggtgaggaaggtgctggctgatgtgctgcaggacatcgccaatgacaacatcagcagcgctgactacacccaggaccccagcgtgaccccctgctgcaacccctaccagatcgcctgccgctgccaggccgcctag

SEQ ID NO: 144125 - DNA, 747 bp, synthetic construct
  misc_feature 1..747: note = Description of Artificial Sequence: Synthetic coding sequence
  source 1..747: mol_type = other DNA
atgaccaagaccagcacctgcatctaccacttcctggtgctgtcctggtacaccttcctgaactactacatcagccaggagggcaaggatgaggtgaagcccaagatcctggccaatggagcccgctggaagtacatgaccctgctgaacctgctgaagaacagaacagctggctttgacatctaccagcccggcagcttccggcagctgctgcagaccatcttctacggcgtgacctgcctggatgatgtgctgaagaggaccaagggcggcaaggacatcaagttcctgacagccttccgggacctgctcttcaccaccctggccttccctgtgtccacctttgtgttcctggccttctggatcctcttcctgtacaacagagacctgatctaccccaaggtgctggacaccgtcatccctgtgtggctgaaccacgccatgcacaccttcatcttccccatcaccctggccgaggtggtgctgcggccccacagctaccccagcaagaagacaggcctgaccctgctggccgccgccagcatcgcctacatcagccgcatcctgtggctgtactttgaaacaggcacctgggtgtaccctgtgtttgccaagctgagcctgctgggcctggccgccttcttcagcctgtcctatgtgttcatcgccagcatctacctgctgggggagaagctgaaccactggaagtggggagacatgaggcagcccaggaagaagaggaagtag

SEQ ID NO: 144126 - DNA, 609 bp, synthetic construct
  misc_feature 1..609: note = Description of Artificial Sequence: Synthetic coding sequence
  source 1..609: mol_type = other DNA
atggccaaggtgtctgtgctgaatgtggccgtgctggagaaccccagccccttccacagccccttccgctttgagatcagctttgaatgttctgaggccctggctgatgacctggagtggaagatcatctacgtgggcagcgctgagagcgaggagtttgaccagatcctggacagcgtgctggtgggccctgtgcctgctggccgccacatgtttgtgttccaggctgatgcccccaaccccagcctcatccctgagacagatgctgtgggcgtgacagtggtgctgatcacctgcacctaccacggccaggagttcatccgggtgggctactacgtgaacaatgagtacctgaaccctgagctgcgggagaacccccccatgaagccagacttcagccagctgcagaggaacatcctggccagcaacccccgggtgacccgcttccacatcaactgggacaacaacatggaccggctggaggccatcgagacccaggaccccagcctgggctgcggcctgcccctgaactgcacccccatcaagggcctgggcctgcccggctgcatccctggcctgctgcctgagaacagcatggactgcatctag

SEQ ID NO: 144127 - DNA, 1506 bp, synthetic construct
  misc_feature 1..1506: note = Description of Artificial Sequence: Synthetic coding sequence
  source 1..1506: mol_type = other DNA
atggacacccaggccggctctgtggatgaagaaaatggccggcagctgggggaggtggagctgcagtgtggcatctgcaccaagtggttcaccgctgacacctttggaattgacaccagcagctgcctgcccttcatgaccaactacagcttccactgcaatgtgtgccaccacagcggcaacacctacttcctgaggaagcaggccaacctgaaggagatgtgcctgagcgccctggccaacctgacctggcagagcaggacccaggatgagcaccccaagaccatgttcagcaaggacaaggacatcatccccttcatcgacaagtactgggagtgcatgaccacccggcagaggcctgggaagatgacctggcccaacaacatcgtgaagaccatgagcaaggagagagatgtgttcctggtgaaggagcacccagaccccggcagcaaggaccctgaggaggactaccccaagtttggcctgctggaccaggacctgagcaacatcggccctgcctatgacaaccagaagcagagcagcgctgtgtccaccagcggcaacctgaatggaggcattgctgctggcagcagcggcaagggccgcggggccaagaggaagcagcaggacggcggcaccaccggcaccaccaagaaggcccggagtgaccccctcttcagcgcccagaggctgcccccccacggctaccccctggagcaccccttcaacaaggatggctaccgctacatcctggccgagccagacccccacgccccagaccctgagaagctggagctggactgctgggccggcaagcccatccctggggacctgtaccgggcctgcctgtatgaaagagtgctgctggccctgcatgaccgggccccccagctgaagatcagtgatgaccggctgactgtggtgggggagaagggctacagcatggtgcgggccagccacggcgtgaggaagggggcctggtactttgagatcaccgtggatgagatgcccccagacacagctgcccggctgggctggagccagcccctgggcaacctgcaggcccccctgggctatgacaagttctcctacagctggaggagcaagaagggcaccaagttccaccagagcatcggcaagcactacagcagcggctacggccagggagatgtgctgggcttctacatcaacctgcctgaggacacagaaacagccaagagcctgcctgacacctacaaggacaaggccctgatcaagttcaagagctacctgtactttgaggagaaggactttgtggacaaggccgagaagagcctgaagcagaccccccacagcgaggtgtccatcaactttggcccctgcttcaagtacccacccaaggacctgacctaccggcccatgtctgacatgggctggggcgctgtggtggagcacaccctggctgatgtgctgtaccacgtggagacagaggtggatggccgccgcagccccccctgggagccctag

SEQ ID NO: 144128 - DNA, 1887 bp, synthetic construct
  misc_feature 1..1887: note = Description of Artificial Sequence: Synthetic coding sequence
  source 1..1887: mol_type = other DNA
atggctgctgctggggccggccctggccaggaggccggggccggccctggccctggagctgtggccaatgccactggagctgaggagggggagatgaagcctgtggccgccggggccgccgcccctcctggagagggcatctctgctgcccccaccgtggagcccagcagtggagaggccgagggcggggaggccaacctggtggatgtgtctgggggcctggagacagagagcagcaatggcaaggacaccctggagggcgctggggacaccagcgaggtgatggacacccaggccggctctgtggatgaagaaaatggccggcagctgggggaggtggagctgcagtgtggcatctgcaccaagtggttcaccgctgacacctttggaattgacaccagcagctgcctgcccttcatgaccaactacagcttccactgcaatgtgtgccaccacagcggcaacacctacttcctgaggaagcaggccaacctgaaggagatgtgcctgagcgccctggccaacctgacctggcagagcaggacccaggatgagcaccccaagaccatgttcagcaaggacaaggacatcatccccttcatcgacaagtactgggagtgcatgaccacccggcagaggcctgggaagatgacctggcccaacaacatcgtgaagaccatgagcaaggagagagatgtgttcctggtgaaggagcacccagaccccggcagcaaggaccctgaggaggactaccccaagtttggcctgctggaccaggacctgagcaacatcggccctgcctatgacaaccagaagcagagcagcgctgtgtccaccagcggcaacctgaatggaggcattgctgctggcagcagcggcaagggccgcggggccaagaggaagcagcaggacggcggcaccaccggcaccaccaagaaggcccggagtgaccccctcttcagcgcccagaggctgcccccccacggctaccccctggagcaccccttcaacaaggatggctaccgctacatcctggccgagccagacccccacgccccagaccctgagaagctggagctggactgctgggccggcaagcccatccctggggacctgtaccgggcctgcctgtatgaaagagtgctgctggccctgcatgaccgggccccccagctgaagatcagtgatgaccggctgactgtggtgggggagaagggctacagcatggtgcgggccagccacggcgtgaggaagggggcctggtactttgagatcaccgtggatgagatgcccccagacacagctgcccggctgggctggagccagcccctgggcaacctgcaggcccccctgggctatgacaagttctcctacagctggaggagcaagaagggcaccaagttccaccagagcatcggcaagcactacagcagcggctacggccagggagatgtgctgggcttctacatcaacctgcctgaggacacagaaacagccaagagcctgcctgacacctacaaggacaaggccctgatcaagttcaagagctacctgtactttgaggagaaggactttgtggacaaggccgagaagagcctgaagcagaccccccacagcgagatcatcttctacaagaatggagtgaaccagggcgtggcctacaaggacatctttgagggcgtgtacttccctgccatcagcctgtacaagagctgcaccgtgtccatcaactttggcccctgcttcaagtacccacccaaggacctgacctaccggcccatgtctgacatgggctggggcgctgtggtggagcacaccctggctgatgtgctgtaccacgtggagacagaggtggatggaagaagaagccccccctgggagccctag

SEQ ID NO: 144129 - DNA, 1605 bp, synthetic construct
  misc_feature 1..1605: note = Description of Artificial Sequence: Synthetic coding sequence
  source 1..1605: mol_type = other DNA
atggacacccaggccggctctgtggatgaagaaaatggccggcagctgggggaggtggagctgcagtgtggcatctgcaccaagtggttcaccgctgacacctttggaattgacaccagcagctgcctgcccttcatgaccaactacagcttccactgcaatgtgtgccaccacagcggcaacacctacttcctgaggaagcaggccaacctgaaggagatgtgcctgagcgccctggccaacctgacctggcagagcaggacccaggatgagcaccccaagaccatgttcagcaaggacaaggacatcatccccttcatcgacaagtactgggagtgcatgaccacccggcagaggcctgggaagatgacctggcccaacaacatcgtgaagaccatgagcaaggagagagatgtgttcctggtgaaggagcacccagaccccggcagcaaggaccctgaggaggactaccccaagtttggcctgctggaccaggacctgagcaacatcggccctgcctatgacaaccagaagcagagcagcgctgtgtccaccagcggcaacctgaatggaggcattgctgctggcagcagcggcaagggccgcggggccaagaggaagcagcaggacggcggcaccaccggcaccaccaagaaggcccggagtgaccccctcttcagcgcccagaggctgcccccccacggctaccccctggagcaccccttcaacaaggatggctaccgctacatcctggccgagccagacccccacgccccagaccctgagaagctggagctggactgctgggccggcaagcccatccctggggacctgtaccgggcctgcctgtatgaaagagtgctgctggccctgcatgaccgggccccccagctgaagatcagtgatgaccggctgactgtggtgggggagaagggctacagcatggtgcgggccagccacggcgtgaggaagggggcctggtactttgagatcaccgtggatgagatgcccccagacacagctgcccggctgggctggagccagcccctgggcaacctgcaggcccccctgggctatgacaagttctcctacagctggaggagcaagaagggcaccaagttccaccagagcatcggcaagcactacagcagcggctacggccagggagatgtgctgggcttctacatcaacctgcctgaggacacagaaacagccaagagcctgcctgacacctacaaggacaaggccctgatcaagttcaagagctacctgtactttgaggagaaggactttgtggacaaggccgagaagagcctgaagcagaccccccacagcgagatcatcttctacaagaatggagtgaaccagggcgtggcctacaaggacatctttgagggcgtgtacttccctgccatcagcctgtacaagagctgcaccgtgtccatcaactttggcccctgcttcaagtacccacccaaggacctgacctaccggcccatgtctgacatgggctggggcgctgtggtggagcacaccctggctgatgtgctgtaccacgtggagacagaggtggatggaagaagaagccccccctgggagccctag

SEQ ID NO: 144130 - DNA, 1506 bp, synthetic construct; identical to SEQ ID NO: 144127
  misc_feature 1..1506: note = Description of Artificial Sequence: Synthetic coding sequence
  source 1..1506: mol_type = other DNA

SEQ ID NO: 144131 - DNA, 1470 bp, synthetic construct
  misc_feature 1..1470: note = Description of Artificial Sequence: Synthetic coding sequence
  source 1..1470: mol_type = other DNA
atgaccaactacagcttccactgcaatgtgtgccaccacagcggcaacacctacttcctgaggaagcaggccaacctgaaggagatgtgcctgagcgccctggccaacctgacctggcagagcaggacccaggatgagcaccccaagaccatgttcagcaaggacaaggacatcatccccttcatcgacaagtactgggagtgcatgaccacccggcagaggcctgggaagatgacctggcccaacaacatcgtgaagaccatgagcaaggagagagatgtgttcctggtgaaggagcacccagaccccggcagcaaggaccctgaggaggactaccccaagtttggcctgctggaccaggacctgagcaacatcggccctgcctatgacaaccagaagcagagcagcgctgtgtccaccagcggcaacctgaatggaggcattgctgctggcagcagcggcaagggccgcggggccaagaggaagcagcaggacggcggcaccaccggcaccaccaagaaggcccggagtgaccccctcttcagcgcccagaggctgccccctcatggctaccccctggagcaccccttcaacaaggatggctaccgctacatcctggccgagccagacccccacgccccagaccctgagaagctggagctggactgctgggccggcaagcccatccctggggacctgtaccgggcctgcctgtatgagcgggtgctgctggccctgcatgaccgggccccccagctgaagatcagtgatgaccggctgactgtggtgggggagaagggctacagcatggtgcgggccagccatggagtgaggaaaggagcctggtactttgagatcaccgtggatgagatgcccccagacacagctgcccggctgggctggagccagcccctgggcaacctgcaggcccccctgggctatgacaagttctcctacagctggaggagcaagaagggcaccaagttccaccagagcatcggcaagcactacagcagcggctacggccagggagatgtgctgggcttctacatcaacctgcctgaggacacagaaacagccaagagcctgcctgacacctacaaggacaaggccctgatcaagttcaagagctacctgtactttgaggagaaggactttgtggacaaggccgagaagagcctgaagcagaccccccacagcgagatcatcttctacaagaatggagtgaaccagggcgtggcctacaaggacatctttgaaggagtgtacttccctgccatcagcctgtacaagagctgcaccgtgtccatcaactttggcccctgcttcaagtacccacccaaggacctgacctaccggcccatgtctgacatgggctggggcgctgtggtggagcacaccctggctgatgtgctgtaccacgtggagacagaggtggatggccgccgcagccccccctgggagccctag

SEQ ID NO: 144132 - DNA, 876 bp, synthetic construct
  misc_feature 1..876: note = Description of Artificial Sequence: Synthetic coding sequence
  source 1..876: mol_type = other DNA
atgaccaaggagtaccaggacctgcagcacctggacaatgaggagagtgaccaccaccagctgaggaaaggacctcctccaccccagcccctgctgcagaggctgtgcagcggcccccggctgctgctgctgagcctgggcctgagcctgctgctgctggtggtggtgtgtgtgattggcagccagaacagccagctgcaggaggagctgcggggcctgcgggagaccttcagcaacttcaccgccagcacagaggcccaggtgaagggcctgagcacccagggcggcaatgtgggcaggaagatgaagagcctggagagccagctggagaagcagcagaaggacctgtctgaggaccacagcagcctgctgctgcacgtgaagcagtttgtgtctgacctgcggagcctgagctgccagatggccgccctgcagggcaatggaagtgagaggacctgctgccctgtgaactgggtggagcacgagaggagctgctactggttcagccgcagcggcaaggcctgggcagatgctgacaactactgccgcctggaggatgcccacctggtggtggtgacctcctgggaggagcagaagtttgtgcagcaccacatcggccctgtgaacacctggatgggcctgcatgaccagaatggcccctggaagtgggtggatggaacagattatgaaacaggcttcaagaactggaggcctgagcagccagatgactggtacggccacggcctgggcggcggggaggactgtgcccacttcacagatgatggccgctggaatgatgatgtgtgccagaggccctaccgctgggtgtgtgaaacagagctggacaaggccagccaggagccccccctgctgtag

SEQ ID NO: 144133 - DNA, 759 bp, synthetic construct
  misc_feature 1..759: note = Description of Artificial Sequence: Synthetic coding sequence
  source 1..759: mol_type = other DNA
atgaccaaggagtaccaggacctgcagcacctggacaatgaggagagtgaccaccaccagctgaggaaggacagccagctgcaggaggagctgcggggcctgcgggagaccttcagcaacttcaccgccagcacagaggcccaggtgaagggcctgagcacccagggcggcaatgtgggcaggaagatgaagagcctggagagccagctggagaagcagcagaaggacctgtctgaggaccacagcagcctgctgctgcacgtgaagcagtttgtgtctgacctgcggagcctgagctgccagatggccgccctgcagggcaatggcagcgagaggacctgctgccctgtgaactgggtggagcacgagaggagctgctactggttcagccgcagcggcaaggcctgggcagatgctgacaactactgccgcctggaggatgcccacctggtggtggtgacctcctgggaggagcagaagtttgtgcagcaccacatcggccctgtgaacacctggatgggcctgcatgaccagaatggcccctggaagtgggtggatggaacagattatgagaccggcttcaagaactggaggcctgagcagccagatgactggtacggccacggcctgggcggcggggaggactgtgcccacttcacagatgatggccgctggaatgatgatgtgtgccagaggccctaccgctgggtgtgtgaaacagagctggacaaggccagccaggagccccccctgctgtag

SEQ ID NO: 144134 - DNA, 759 bp, synthetic construct; identical to SEQ ID NO: 144133
  misc_feature 1..759: note = Description of Artificial Sequence: Synthetic coding sequence
  source 1..759: mol_type = other DNA

SEQ ID NO: 144135 - DNA, 5679 bp, synthetic construct
  misc_feature 1..5679: note = Description of Artificial Sequence: Synthetic coding sequence
  source 1..5679: mol_type = other DNA
atggccaacagaagagtgggccggggctgctgggaggtgagccccacagagcggcggcccccagctggcctgcggggccctgctgctgaggaggaggccagcagcccccctgtgctgagcctgagccacttctgccgcagccccttcctgtgctttggagatgtgctgctgggcgccagcaggaccctgagcctggccctggacaaccccaatgaggaggtggccgaggtgaagatcagccacttccctgctgctgacctgggcttctctgtgtcccagcgctgctttgtgctgcagcccaaggagaagatcgtcatctctgtgaactggacccccctgaaggagggccgggtgcgggagatcatgaccttcctggtgaatgatgtgctgaagcaccaggccatcctgctgggcaatgctgaggagcagaagaagaagaagaggagcctgtgggacaccatcaagaagaagaagatcagcgccagcaccagccacaacagaagagtgagcaacatccagaatgtgaacaagaccttctctgtgtcccagaaggtggacagagtgcgcagccccctgcaggcctgtgagaacctggccatgaatgaaggaggccccccaacagagaacaacagcctcatcctggaggagaacaagatccccatcagccccatcagccctgccttcaatgaatgccacggggccacctgcctgcccctgtctgtgcggcgcagcaccacctacagcagcctgcacgccagcgagaaccgggagctgctgaatgtgcacagcgccaacgtgtccaaggtgtccttcaatgagaaggctgtgacagagaccagcttcaacagcgtgaatgtgaatggccagagaggagagaacagcaagctgagcctgacccccaactgcagcagcaccctgaacatcacccagagccagatccacttcctgagcccagacagctttgtgaacaacagccacggggccaacaatgagctggagctggtgacctgcctgagcagtgacatgttcatgaaggacaacagccagcctgtgcacctggagagcaccatcgcccacgagatctaccagaagatcctgagcccagacagcttcatcaaggacaactacggcctgaaccaggacctggagagcgagagcgtgaaccccatcctgagccccaaccagttcctgaaggacaacatggcctacatgtgcaccagccagcagacctgcaaggtgcccctgagcaatgaaaacagccaggtgccccagagccctgaggactggaggaagtctgaggtgagcccccgcatccctgagtgccagggcagcaagagccccaaggccatctttgaggagctggtggagatgaagagcaactactacagcttcatcaagcagaacaaccccaagttctctgctgtgcaggacatcagcagccacagccacaacaagcagcccaagagaagacccatcctgagcgccaccgtgaccaagaggaaggccacctgcacccgggagaaccagacagagatcaacaagcccaaggccaagcgctgcctgaacagcgctgtgggggagcacgagaaggtgatcaacaaccagaaggagaaggaggacttccacagctacctgcccatcatcgaccccatcctgagcaagagcaagagctacaagaatgaggtgacccccagcagcaccacagcctctgtggccaggaagaggaagagtgatggctccatggaggatgccaacgtgcgggtggccatcacagagcacacagaggtgcgggagatcaagaggatccacttcagccccagcgagcccaagaccagcgctgtgaagaagaccaagaatgtgaccacccccatcagcaagaggatcagcaaccgggagaagctgaacctgaagaagaagacagacctgagcatcttccgcacccccatcagcaagaccaacaagaggaccaagcccatcatcgctgtggcccagagcagcctgaccttcatcaagcccctgaagacagacatccccaggcaccccatgccctttgctgccaagaacatgttttatgatgagcgctggaaggagaagcaggagcagggcttcacctggtggctgaacttcatcctgaccccagatgacttcaccgtgaagaccaacatcagcgaggtgaatgctgccaccctgctgctgggcatcgagaaccagcacaagatctctgtgccccgggcccccaccaaggaggagatgagcctgcgggcctacacagcccgctgccgcctgaaccggctgcggcgggccgcctgccgcctcttcaccagcgagaagatggtgaaggccatcaagaagctggagattgaaattgaggcccggcggctgattgtgaggaaggacagacacctgtggaaggatgtgggggagcggcagaaggtgctgaactggctgctgagctacaaccccctgtggctgcgcatcggcctggagaccacctacggggagctgatcagcctggaggacaacagtgatgtgacaggcctggccatgttcatcctgaaccggctgctgtggaacccagacattgctgctgagtaccgccaccccaccgtgccccacctgtacagagatggccacgaggaggccctgagcaagttcaccctgaagaagctgctgctgctggtgtgcttcctggactatgccaagatcagccggctgattgaccatgacccctgcctcttctgcaaggatgctgagttcaaggccagcaaggagatcctgctggccttcagccgggacttcctgtctggagagggggacctgagccgccacctgggcctgctgggcctgcctgtgaaccacgtgcagaccccatttgatgaatttgattttgctgtgaccaacctggccgtggacctgcagtgtggggtgcggctggtgaggaccatggagctgctgacccagaactgggacctgagcaagaagctgcgcatcccagccatcagccggctgcagaagatgcacaacgtggacatcgtgctgcaggtgctgaagagccggggcatcgagctgagtgatgaacatggcaacaccatcctgagcaaggacatcgtggacagacaccgggagaagaccctgcggctgctgtggaagatcgcctttgccttccaggtggacatcagcctgaacctggaccagctgaaggaggagatcgccttcctgaagcacaccaagagcatcaagaagaccatcagcctgctgagctgccacagtgatgacctgatcaacaagaagaagggcaagagggacagcggcagctttgagcagtacagcgagaacatcaagctgctgatggactgggtgaatgctgtgtgtgccttctacaacaagaaggtggagaacttcaccgtgtccttcagtgatggccgggtgctgtgctacctgatccaccactaccacccctgctacgtgccctttgatgccatctgccagaggaccacccagacagtggagtgcacccagacaggctctgtggtgctgaacagcagcagcgagagtgatgacagcagcctggacatgagcctgaaggcctttgaccacgagaacaccagcgagctgtacaaggagctgctggagaatgagaagaagaacttccacctggtgcgctctgctgtgcgggacctgggcggcatcccagccatgatcaaccacagcgacatgagcaacaccatcccagatgagaaggtggtgatcacctacctgtccttcctgtgtgcccggctgctggacctgaggaaggagatccgggccgcccggctcatccagaccacctggaggaagtacaagctgaagacagacctgaagaggcaccaggagcgggagaaggccgcccgcatcatccagctggccgtcatcaacttcctggccaagcagaggctgaggaagagggtgaatgctgccctggtgatccagaagtactggaggagagtgctggcccagaggaagctgctgatgctgaagaaggagaagctggagaaggtgcagaacaaggccgccagcctcatccaggccatgtggaggcgctaccgggccaagaagtacctgtgcaaggtgaaggccgcctgcaagatccaggcctggtaccgctgctggagggcccacaaggagtacctggccatcctgaaggctgtgaagatcatccagggctgcttctacaccaagctggagaggacccgcttcctgaatgtgcgggccagcgccatcatcatccagaggaagtggagggccatcctgcctgccaagatcgcccacgagcacttcctgatgatcaagaggcacagagctgcctgcctgatccaggcccactaccggggctacaagggccggcaggtgttcctgcggcagaagtctgctgccctgatcatccagaagtacatccgggcccgggaggccggcaagcatgagcgcatcaagtacatcgagttcaagaagagcaccgtcatcctgcaggccctggtgcggggctggctggtgaggaagcgcttcctggagcagagggccaagatccggctgctgcacttcaccgctgctgcctactaccacctgaatgctgtgcgcatccagagggcctacaagctgtacctggccgtgaagaatgccaacaagcaggtgaacagcgtcatctgcatccagcgctggttccgggcccggctgcaggagaagcgcttcatccagaagtaccacagcatcaagaagattgaacatgagggccaggagtgcctgagccagaggaacagagctgccagcgtcatccagaaggctgtgcgccacttcctgctgaggaagaagcaggagaagttcaccagcggcatcatcaagatccaggccctgtggaggggctacagctggaggaagaagaatgactgcaccaagatcaaggccatccggctgagcctgcaggtggtgaaccgggagatccgggaggagaacaagctgtacaagaggacagccctggccctgcactacctgctgacctacaagcacctgagcgccatcctggaggccctgaagcacctggaggtggtgacccggctgagccccctgtgctgtgagaacatggcccagagcggggccatcagcaagatctttgtgctgatccgcagctgcaacagaagcatcccctgcatggaggtgatccgctatgctgtgcaggtgctgctgaatgtgtccaaatatgagaagaccaccagcgctgtgtatgatgtggagaactgcatcgacatcctgctggagctgctgcagatctaccgggagaagccaggcaacaaggtggccgacaagggcggcagcatcttcaccaagacctgctgcctgctggccatcctgctgaagaccaccaacagagccagtgatgtgcgcagccgcagcaaggtggtggaccgcatctacagcctgtacaagctgacagcccacaagcacaagatgaacacagagcgcatcctgtacaagcagaagaagaacagcagcatcagcatccccttcatccctgagacccctgtgaggacccgcatcgtgtcccggctgaagccagactgggtgctgcggcgggacaacatggaggagatcaccaaccccctgcaggccatccagatggtgatggacaccctgggcatcccctactag

SEQ ID NO: 144136 - DNA, 4170 bp, synthetic construct
  misc_feature 1..4170: note = Description of Artificial Sequence: Synthetic coding sequence
  source 1..4170: mol_type = other DNA
atggccaacagaagagtgggccggggctgctgggaggtgagccccacagagcggcggcccccagctggcctgcggggccctgctgctgaggaggaggccagcagcccccctgtgctgagcctgagccacttctgccgcagccccttcctgtgctttggagatgtgctgctgggcgccagcaggaccctgagcctggccctggacaaccccaatgaggaggtggccgaggtgaagatcagccacttccctgctgctgacctgggcttctctgtgtcccagcgctgctttgtgctgcagcccaaggagaagatcgtcatctctgtgaactggacccccctgaaggagggccgggtgcgggagatcatgaccttcctggtgaatgatgtgctgaagcaccaggccatcctgctgggcaatgctgaggagcagaagaagaagaagaggagcctgtgggacaccatcaagaagaagaagatcagcgccagcaccagccacaacagaagagtgagcaacatccagaatgtgaacaagaccttctctgtgtcccagaaggtggaccggcgctaccggcagcagacctacttcaacaagctgaagaagatcaccaagacagtgcagcagcgctactgggccatgaaggagaggaacatccagttccagcgctacaacaagctgcggcacagcgtcatctacatccaggccatcttccggggcaagaaggcccggcggcacctgaagatgatgcacatcgccgccaccctcatccagaggcgcttccgcaccctgatgatgagaagacgcttcctgagcctgaagaagacagccatcctgatccagaggaagtaccgggcccacctgtgcaccaagcaccacctgcagttcctgcaggtgcagaatgctgtgatcaagatccagagcagctaccgccgctggatgatcaggaagaggatgagggagatgcacagagctgccaccttcatccagagcaccttcaggatgcaccggctgcacatgagataccaggccctgaagcaggcctctgtggtgatccagcagcagtaccaggccaacagagctgccaagctgcagaggcagcactacctgcggcagaggcacagcgctgtgatcctgcaggccgccttccggggcatgaagaccaggaggcacctgaagtccatgcacagcagcgccaccctcatccagagccgcttccgcagcctgctggtgagaagacgcttcatcagcctgaagaaggccaccatctttgtgcagaggaagtaccgggccaccatctgtgccaagcacaagctgtaccagttcctgcacctgaggaaggccgccatcaccatccagagcagctacagaaggctgatggtgaagaagaagctgcaggagatgcagagagctgctgtgctgatccaggccaccttcaggatgtaccgcacctacatcaccttccagacctggaagcacgccagcatcctgatccagcagcactaccgcacctacagagctgccaagctgcagcgggagaactacatccggcagtggcacagcgctgtggtgatccaggccgcctacaagggcatgaaggcccggcagctgctgcgggagaagcacaaggccagcatcgtcatccagagcacctacaggatgtaccggcagtactgcttctaccagaagctgcagtgggccaccaagatcatccaggagaagtaccgggccaacaagaagaagcagaaggtgttccagcacaatgagctgaagaaggagacctgtgtgcaggccggcttccaggacatgaacatcaagaagcagatccaggagcagcaccaggccgccatcatcatccagaagcactgcaaggccttcaagatcaggaagcactacctgcacctgcgggccaccgtggtgtccatccagaggcgctacaggaagctgacagctgtgaggacccaggccgtcatctgcatccagagctactaccggggcttcaaggtgaggaaggacatccagaacatgcacagagctgccaccctcatccagagcttctacaggatgcaccgggccaaggtggactatgagaccaagaagacagccatcgtggtgatccagaactactaccgcctgtatgtgcgggtgaagacagagaggaagaacttcctggccgtgcagaagtctgtgaggaccatccaggccgccttccggggcatgaaggtgcggcagaagctgaagaatgtgtctgaggagaagatggccgccatcgtgaaccagagcgccctgtgctgctaccgcagcaagacccagtatgaggccgtgcagagcgagggcgtgatgatccaggagtggtacaaggccagcggcctggcctgcagccaggaggccgagtaccacagccagagcagagctgctgtgaccatccagaaggccttctgcaggatggtgaccaggaagctggagacccagaagtgtgccgccctgcgcatccagttcttcctgcagatggctgtgtacagaagaagatttgtgcagcagaagagagctgccatcaccctgcagcactacttccgcacctggcagaccaggaagcagttcctgctgtacaggaaggctgctgtggtgctgcagaaccactaccgggccttcctgagcgccaagcaccagaggcaggtgtacctgcagatccgcagcagcgtcatcatcatccaggcccggagcaagggcttcatccagaagaggaagttccaggagatcaagaacagcaccatcaagatccaggccatgtggaggcgctaccgggccaagaagtacctgtgcaaggtgaaggccgcctgcaagatccaggcctggtaccgctgctggagggcccacaaggagtacctggccatcctgaaggctgtgaagatcatccagggctgcttctacaccaagctggagaggacccgcttcctgaatgtgcgggccagcgccatcatcatccagaggaagtggagggccatcctgcctgccaagatcgcccacgagcacttcctgatgatcaagaggcaccgggccgcctgcctgatccaggcccactaccggggctacaagggccggcaggtgttcctgcggcagaagtctgctgccctgatcatccagaagtacatccgggcccgggaggccggcaagcatgagcgcatcaagtacatcgagttcaagaagagcaccgtcatcctgcaggccctggtgcggggctggctggtgaggaagcgcttcctggagcagagggccaagatccggctgctgcacttcaccgctgctgcctactaccacctgaatgctgtgcgcatccagagggcctacaagctgtacctggccgtgaagaatgccaacaagcaggtgaacagcgtcatctgcatccagcgctggttccgggcccggctgcaggagaagcgcttcatccagaagtaccacagcatcaagaagattgagcacgagggccaggagtgcctgagccagaggaacagagctgccagcgtcatccagaaggctgtgcgccacttcctgctgaggaagaagcaggagaagttcaccagcggcatcatcaagatccaggccctgtggaggggctacagctggaggaagaagaatgactgcaccaagatcaaggccatccggctgagcctgcaggtggtgaaccgggagatccgggaggagaacaagctgtacaagaggacagccctggccctgcactacctgctgacctacaagcacctgagcgccatcctggaggccctgaagcacctggaggtggtgacccggctgagccccctgtgctgtgagaacatggcccagagcggggccatcagcaagatctttgtgctgatccgcagctgcaacagaagcatcccctgcatggaggtgatccgctatgctgtgcaggtgctgctgaatgtgtccaaatatgagaagaccaccagcgctgtgtatgatgtggagaactgcatcgacatcctgctggagctgctgcagatctaccgggagaagccaggcaacaaggtggccgacaagggcggcagcatcttcaccaagacctgctgcctgctggccatcctgctgaagaccaccaacagagcctctgtgtccatcagccagctgcccttcttcaagatcatcttcctgtggagctag

SEQ ID NO: 144137 - DNA, 3429 bp, synthetic construct
  misc_feature 1..3429: note = Description of Artificial Sequence: Synthetic coding sequence
  source 1..3429: mol_type = other DNA
atgagcctgcgggcctacacagcccgctgccgcctgaaccggctgcggcgggccgcctgccgcctcttcaccagcgagaagatggtgaaggccatcaagaagctggagattgaaattgaggcccggcggctgattgtgaggaaggacagacacctgtggaaggatgtgggggagcggcagaaggtgctgaactggctgctgagctacaaccccctgtggctgcgcatcggcctggagaccacctacggggagctgatcagcctggaggacaacagtgatgtgacaggcctggccatgttcatcctgaaccggctgctgtggaacccagacattgctgctgagtaccgccaccccaccgtgccccacctgtacagagatggccacgaggaggccctgagcaagttcaccctgaagaagctgctgctgctggtgtgcttcctggactatgccaagatcagccggctgattgaccatgacccctgcctcttctgcaaggatgctgagttcaaggccagcaaggagatcctgctggccttcagccgggacttcctgtctggagagggggacctgagccgccacctgggcctgctgggcctgcctgtgaaccacgtgcagaccccatttgatgaatttgattttgctgtgaccaacctggccgtggacctgcagtgtggggtgcggctggtgaggaccatggagctgctgacccagaactgggacctgagcaagaagctgcgcatcccagccatcagccggctgcagaagatgcacaacgtggacatcgtgctgcaggtgctgaagagccggggcatcgagctgagtgatgaacatggcaacaccatcctgagcaaggacatcgtggacagacaccgggagaagaccctgcggctgctgtggaagatcgcctttgccttccaggtggacatcagcctgaacctggaccagctgaaggaggagatcgccttcctgaagcacaccaagagcatcaagaagaccatcagcctgctgagctgccacagtgatgacctgatcaacaagaagaagggcaagagggacagcggcagctttgagcagtacagcgagaacatcaagctgctgatggactgggtgaatgctgtgtgtgccttctacaacaagaaggtggagaacttcaccgtgtccttcagtgatggccgggtgctgtgctacctgatccaccactaccacccctgctacgtgccctttgatgccatctgccagaggaccacccagacagtggagtgcacccagacaggctctgtggtgctgaacagcagcagcgagagtgatgacagcagcctggacatgagcctgaaggcctttgaccacgagaacaccagcgagctgtacaaggagctgctggagaatgagaagaagaacttccacctggtgcgctctgctgtgcgggacctgggcggcatcccagccatgatcaaccacagcgacatgagcaacaccatcccagatgagaaggtggtgatcacctacctgtccttcctgtgtgcccggctgctggacctgaggaaggagatccgggccgcccggctcatccagaccacctggaggaagtacaagctgaagacagacctgaagaggcaccaggagcgggagaaggccgcccgcatcatccagctggccgtcatcaacttcctggccaagcagaggctgaggaagagggtgaatgctgccctggtgatccagaagtactggaggagagtgctggcccagaggaagctgctgatgctgaagaaggagaagctggagaaggtgcagaacaaggccgccagcctcatccaggccatgtggaggcgctaccgggccaagaagtacctgtgcaaggtgaaggccgcctgcaagatccaggcctggtaccgctgctggagggcccacaaggagtacctggccatcctgaaggctgtgaagatcatccagggctgcttctacaccaagctggagaggacccgcttcctgaatgtgcgggccagcgccatcatcatccagaggaagtggagggccatcctgcctgccaagatcgcccacgagcacttcctgatgatcaagaggcacagagctgcctgcctgatccaggcccactaccggggctacaagggccggcaggtgttcctgcggcagaagtctgctgccctgatcatccagaagtacatccgggcccgggaggccggcaagcatgagcgcatcaagtacatcgagttcaagaagagcaccgtcatcctgcaggccctggtgcggggctggctggtgaggaagcgcttcctggagcagagggccaagatccggctgctgcacttcaccgctgctgcctactaccacctgaatgctgtgcgcatccagagggcctacaagctgtacctggccgtgaagaatgccaacaagcaggtgaacagcgtcatctgcatccagcgctggttccgggcccggctgcaggagaagcgcttcatccagaagtaccacagcatcaagaagattgaacatgagggccaggagtgcctgagccagaggaacagagctgccagcgtcatccagaaggctgtgcgccacttcctgctgaggaagaagcaggagaagttcaccagcggcatcatcaagatccaggccctgtggaggggctacagctggaggaagaagaatgactgcaccaagatcaaggccatccggctgagcctgcaggtggtgaaccgggagatccgggaggagaacaagctgtacaagaggacagccctggccctgcactacctgctgacctacaagcacctgagcgccatcctggaggccctgaagcacctggaggtggtgacccggctgagccccctgtgctgtgagaacatggcccagagcggggccatcagcaagatctttgtgctgatccgcagctgcaacagaagcatcccctgcatggaggtgatccgctatgctgtgcaggtgctgctgaatgtgtccaaatatgagaagaccaccagcgctgtgtatgatgtggagaactgcatcgacatcctgctggagctgctgcagatctaccgggagaagccaggcaacaaggtggccgacaagggcggcagcatcttcaccaagacctgctgcctgctggccatcctgctgaagaccaccaacagagccagtgatgtgcgcagccgcagcaaggtggtggaccgcatctacagcctgtacaagctgacagcccacaagcacaagatgaacacagagcgcatcctgtacaagcagaagaagaacagcagcatcagcatccccttcatccctgagacccctgtgaggacccgcatcgtgtcccggctgaagccagactgggtgctgcggcgggacaacatggaggagatcaccaaccccctgcaggccatccagatggtgatggacaccctgggcatcccctactag

SEQ ID NO: 144138 - DNA, 10434 bp, synthetic construct
  misc_feature 1..10434: note = Description of Artificial Sequence: Synthetic coding sequence
  source 1..10434: mol_type = other DNA
atggccaacagaagagtgggccggggctgctgggaggtgagccccacagagcggcggcccccagctggcctgcggggccctgctgctgaggaggaggccagcagcccccctgtgctgagcctgagccacttctgccgcagccccttcctgtgctttggagatgtgctgctgggcgccagcaggaccctgagcctggccctggacaaccccaatgaggaggtggccgaggtgaagatcagccacttccctgctgctgacctgggcttctctgtgtcccagcgctgctttgtgctgcagcccaaggagaagatcgtcatctctgtgaactggacccccctgaaggagggccgggtgcgggagatcatgaccttcctggtgaatgatgtgctgaagcaccaggccatcctgctgggcaatgctgaggagcagaagaagaagaagaggagcctgtgggacaccatcaagaagaagaagatcagcgccagcaccagccacaacagaagagtgagcaacatccagaatgtgaacaagaccttctctgtgtcccagaaggtggacagagtgcgcagccccctgcaggcctgtgagaacctggccatgaatgaaggaggccccccaacagagaacaacagcctcatcctggaggagaacaagatccccatcagccccatcagccctgccttcaatgaatgccacggggccacctgcctgcccctgtctgtgcggcgcagcaccacctacagcagcctgcacgccagcgagaaccgggagctgctgaatgtgcacagcgccaacgtgtccaaggtgtccttcaatgagaaggctgtgacagagaccagcttcaacagcgtgaatgtgaatggccagagaggagagaacagcaagctgagcctgacccccaactgcagcagcaccctgaacatcacccagagccagatccacttcctgagcccagacagctttgtgaacaacagccacggggccaacaatgagctggagctggtgacctgcctgagcagtgacatgttcatgaaggacaacagccagcctgtgcacctggagagcaccatcgcccacgagatctaccagaagatcctgagcccagacagcttcatcaaggacaactacggcctgaaccaggacctggagagcgagagcgtgaaccccatcctgagccccaaccagttcctgaaggacaacatggcctacatgtgcaccagccagcagacctgcaaggtgcccctgagcaatgaaaacagccaggtgccccagagccctgaggactggaggaagtctgaggtgagcccccgcatccctgagtgccagggcagcaagagccccaaggccatctttgaggagctggtggagatgaagagcaactactacagcttcatcaagcagaacaaccccaagttctctgctgtgcaggacatcagcagccacagccacaacaagcagcccaagagaagacccatcctgagcgccaccgtgaccaagaggaaggccacctgcacccgggagaaccagacagagatcaacaagcccaaggccaagcgctgcctgaacagcgctgtgggggagcacgagaaggtgatcaacaaccagaaggagaaggaggacttccacagctacctgcccatcatcgaccccatcctgagcaagagcaagagctacaagaatgaggtgacccccagcagcaccacagcctctgtggccaggaagaggaagagtgatggctccatggaggatgccaacgtgcgggtggccatcacagagcacacagaggtgcgggagatcaagaggatccacttcagccccagcgagcccaagaccagcgctgtgaagaagaccaagaatgtgaccacccccatcagcaagaggatcagcaaccgggagaagctgaacctgaagaagaagacagacctgagcatcttccgcacccccatcagcaagaccaacaagaggaccaagcccatcatcgctgtggcccagagcagcctgaccttcatcaagcccctgaagacagacatccccaggcaccccatgccctttgctgccaagaacatgttttatgatgagcgctggaaggagaagcaggagcagggcttcacctggtggctgaacttcatcctgaccccagatgacttcaccgtgaagaccaacatcagcgaggtgaatgctgccaccctgctgctgggcatcgagaaccagcacaagatctctgtgccccgggcccccaccaaggaggagatgagcctgcgggcctacacagcccgctgccgcctgaaccggctgcggcgggccgcctgccgcctcttcaccagcgagaagatggtgaaggccatcaagaagctggagattgaaattgaggcccggcggctgattgtgaggaaggacagacacctgtggaaggatgtgggggagcggcagaaggtgctgaactggctgctgagctacaaccccctgtggctgcgcatcggcctggagaccacctacggggagctgatcagcctggaggacaacagtgatgtgacaggcctggccatgttcatcctgaaccggctgctgtggaacccagacattgctgctgagtaccgccaccccaccgtgccccacctgtacagagatggccacgaggaggccctgagcaagttcaccctgaagaagctgctgctgctggtgtgcttcctggactatgccaagatcagccggctgattgaccatgacccctgcctcttctgcaaggatgctgagttcaaggccagcaaggagatcctgctggccttcagccgggacttcctgtctggagagggggacctgagccgccacctgggcctgctgggcctgcctgtgaaccacgtgcagaccccatttgatgaatttgattttgctgtgaccaacctggccgtggacctgcagtgtggggtgcggctggtgaggaccatggagctgctgacccagaactgggacctgagcaagaagctgcgcatcccagccatcagccggctgcagaagatgcacaacgtggacatcgtgctgcaggtgctgaagagccggggcatcgagctgagtgatgaacatggcaacaccatcctgagcaaggacatcgtggacagacaccgggagaagaccctgcggctgctgtggaagatcgcctttgccttccaggtggacatcagcctgaacctggaccagctgaaggaggagatcgccttcctgaagcacaccaagagcatcaagaagaccatcagcctgctgagctgccacagtgatgacctgatcaacaagaagaagggcaagagggacagcggcagctttgagcagtacagcgagaacatcaagctgctgatggactgggtgaatgctgtgtgtgccttctacaacaagaaggtggagaacttcaccgtgtccttcagtgatggccgggtgctgtgctacctgatccaccactaccacccctgctacgtgccctttgatgccatctgccagaggaccacccagacagtggagtgcacccagacaggctctgtggtgctgaacagcagcagcgagagtgatgacagcagcctggacatgagcctgaaggcctttgaccacgagaacaccagcgagctgtacaaggagctgctggagaatgagaagaagaacttccacctggtgcgctctgctgtgcgggacctgggcggcatcccagccatgatcaaccacagcgacatgagcaacaccatcccagatgagaaggtggtgatcacctacctgtccttcctgtgtgcccggctgctggacctgaggaaggagatccgggccgcccggctcatccagaccacctggaggaagtacaagctgaagacagacctgaagaggcaccaggagcgggagaaggccgcccgcatcatccagctggccgtcatcaacttcctggccaagcagaggctgaggaagagggtgaatgctgccctggtgatccagaagtactggaggagagtgctggcccagaggaagctgctgatgctgaagaaggagaagctggagaaggtgcagaacaaggccgccagcctcatccagggctactggaggcgctacagcacccggcagcgcttcctgaagctgaagtactacagcatcatcctgcagagccgcatccgcatgatcatcgctgtgaccagctacaagcgctacctgtgggccaccgtgaccatccagaggcactggagggcctacctgcggaggaagcaggaccagcagagatatgagatgctgaagagcagcaccctcatcatccagagcatgttcaggaagtggaagcagaggaagatgcagagccaggtgaaggccaccgtcatcctgcagagggccttccgggagtggcacctgaggaagcaggccaaggaggagaacagcgccatcatcatccagagctggtacaggatgcacaaggagctgaggaagtacatctacatccgcagctgtgtggtgatcatccagaagcgcttccgctgcttccaggcccagaagctgtacaagaggaggaaggagagcatcctgaccatccagaagtactacaaggcctacctgaagggcaagattgaaagaaccaactacctgcagaagagagctgctgccatccagctgcaggccgccttccggcggctgaaggcccacaacctgtgccggcagatccgggccgcctgcgtcatccagagctactggaggatgaggcaggacagagtgcgcttcctgaacctgaagaagaccatcatcaagttccaggcccacgtgaggaagcaccagcagaggcagaagtacaagaagatgaagaaggctgctgtgatcatccagacccacttccgggcctacatctttgccatgaaggtgctggccagctaccagaagaccaggtctgctgtgattgtgctgcagagcgcctaccggggcatgcaggccaggaagatgtacatccacatcctgaccagcgtcatcaagatccagagctactaccgggcctacgtgtccaagaaggagttcctgagcctgaagaatgccaccatcaagctgcagagcacagtgaagatgaagcagaccaggaagcagtacctgcacctgcgggccgccgccctcttcatccagcagtgctaccgcagcaagaagattgctgcccagaagcgggaggagtacatgcagatgagggagagctgcatcaagctgcaggcctttgtgcggggctacctggtgaggaagcagatgaggctgcagaggaaggccgtcatcagcctgcagagctacttcaggatgaggaaggcccggcagtactacctgaagatgtacaaggccatcatcgtcatccagaactactaccacgcctacaaggcccaggtgaaccagaggaagaacttcctgcaggtgaagaaggccgccacctgcctgcaggccgcctaccggggctacaaggtgcggcagctgatcaagcagcagagcattgctgccctgaagatccagagcgccttccggggctacaacaagagggtgaagtaccagagcgtgctgcagagcatcatcaagatccagcgctggtaccgggcctacaagaccctgcatgacaccaggacccacttcctgaagaccaaggctgctgtgatcagcctgcagagcgcctaccggggctggaaggtgaggaagcagatcagaagagagcaccaggccgccctgaagatccagagcgccttcaggatggccaaggcccagaagcagttccgcctcttcaagacagctgccctggtgatccagcagaacttccgggcctggacagctggcaggaagcagtgcatggagtacatcgagctgcggcatgctgtgctggtgctgcagagcatgtggaagggcaagaccctgcggcggcagctgcagaggcagcacaagtgtgccatcatcatccagagctactacaggatgcacgtgcagcagaagaagtggaagatcatgaagaaggccgccctgctgatccagaagtactaccgggcctacagcatcggccgggagcagaaccacctgtacctgaagaccaaggctgctgtggtgaccctgcagagcgcctaccggggcatgaaggtgaggaagaggatcaaggactgcaacaaggctgctgtgaccatccagagcaagtaccgggcctacaagaccaagaagaagtatgccacctaccgggccagcgccatcatcatccagcgctggtaccggggcatcaagatcaccaaccaccagcacaaggagtacctgaacctgaagaagacagccatcaagatccagagcgtgtaccggggcatccgggtgcggcggcacatccagcacatgcacagagctgccaccttcatcaaggccatgttcaagatgcaccagagccgcatctcctaccacaccatgaggaaggccgccatcgtcatccaggtgcgctgccgggcctactaccagggcaagatgcagcgggagaagtacctgaccatcctgaaggctgtgaaggtgctgcaggccagcttccggggcgtgcgggtgcggaggaccctgaggaagatgcagacagctgccaccctcatccagagcaactaccgccgctaccggcagcagacctacttcaacaagctgaagaagatcaccaagacagtgcagcagcgctactgggccatgaaggagaggaacatccagttccagcgctacaacaagctgcggcacagcgtcatctacatccaggccatcttccggggcaagaaggcccggcggcacctgaagatgatgcacatcgccgccaccctcatccagaggcgcttccgcaccctgatgatgagaagacgcttcctgagcctgaagaagacagccatcctgatccagaggaagtaccgggcccacctgtgcaccaagcaccacctgcagttcctgcaggtgcagaatgctgtgatcaagatccagagcagctaccgccgctggatgatcaggaagaggatgagggagatgcacagagctgccaccttcatccagagcaccttcaggatgcaccggctgcacatgagataccaggccctgaagcaggcctctgtggtgatccagcagcagtaccaggccaacagagctgccaagctgcagaggcagcactacctgcggcagaggcacagcgctgtgatcctgcaggccgccttccggggcatgaagaccaggaggcacctgaagtccatgcacagcagcgccaccctcatccagagccgcttccgcagcctgctggtgagaagacgcttcatcagcctgaagaaggccaccatctttgtgcagaggaagtaccgggccaccatctgtgccaagcacaagctgtaccagttcctgcacctgaggaaggccgccatcaccatccagagcagctacagaaggctgatggtgaagaagaagctgcaggagatgcagagagctgctgtgctgatccaggccaccttcaggatgtaccgcacctacatcaccttccagacctggaagcacgccagcatcctgatccagcagcactaccgcacctacagagctgccaagctgcagcgggagaactacatccggcagtggcacagcgctgtggtgatccaggccgcctacaagggcatgaaggcccggcagctgctgcgggagaagcacaaggccagcatcgtcatccagagcacctacaggatgtaccggcagtactgcttctaccagaagctgcagtgggccaccaagatcatccaggagaagtaccgggccaacaagaagaagcagaaggtgttccagcacaatgagctgaagaaggagacctgtgtgcaggccggcttccaggacatgaacatcaagaagcagatccaggagcagcaccaggccgccatcatcatccagaagcactgcaaggccttcaagatcaggaagcactacctgcacctgcgggccaccgtggtgtccatccagaggcgctacaggaagctgacagctgtgaggacccaggccgtcatctgcatccagagctactaccggggcttcaaggtgaggaaggacatccagaacatgcacagagctgccaccctcatccagagcttctacaggatgcaccgggccaaggtggactatgagaccaagaagacagccatcgtggtgatccagaactactaccgcctgtatgtgcgggtgaagacagagaggaagaacttcctggccgtgcagaagtctgtgaggaccatccaggccgccttccggggcatgaaggtgcggcagaagctgaagaatgtgtctgaggagaagatggccgccatcgtgaaccagagcgccctgtgctgctaccgcagcaagacccagtatgaggccgtgcagagcgagggcgtgatgatccaggagtggtacaaggccagcggcctggcctgcagccaggaggccgagtaccacagccagagcagagctgctgtgaccatccagaaggccttctgcaggatggtgaccaggaagctggagacccagaagtgtgccgccctgcgcatccagttcttcctgcagatggctgtgtacagaagaagatttgtgcagcagaagagagctgccatcaccctgcagcactacttccgcacctggcagaccaggaagcagttcctgctgtacaggaaggctgctgtggtgctgcagaaccactaccgggccttcctgagcgccaagcaccagaggcaggtgtacctgcagatccgcagcagcgtcatcatcatccaggcccggagcaagggcttcatccagaagaggaagttccaggagatcaagaacagcaccatcaagatccaggccatgtggaggcgctaccgggccaagaagtacctgtgcaaggtgaaggccgcctgcaagatccaggcctggtaccgctgctggagggcccacaaggagtacctggccatcctgaaggctgtgaagatcatccagggctgcttctacaccaagctggagaggacccgcttcctgaatgtgcgggccagcgccatcatcatccagaggaagtggagggccatcctgcctgccaagatcgcccacgagcacttcctgatgatcaagaggcaccgggccgcctgcctgatccaggcccactaccggggctacaagggccggcaggtgttcctgcggcagaagtctgctgccctgatcatccagaagtacatccgggcccgggaggccggcaagcatgagcgcatcaagtacatcgagttcaagaagagcaccgtcatcctgcaggccctggtgcggggctggctggtgaggaagcgcttcctggagcagagggccaagatccggctgctgcacttcaccgctgctgcctactaccacctgaatgctgtgcgcatccagagggcctacaagctgtacctggccgtgaagaatgccaacaagcaggtgaacagcgtcatctgcatccagcgctggttccgggcccggctgcaggagaagcgcttcatccagaagtaccacagcatcaagaagattgagcacgagggccaggagtgcctgagccagaggaacagagctgccagcgtcatccagaaggctgtgcgccacttcctgctgaggaagaagcaggagaagttcaccagcggcatcatcaagatccaggccctgtggaggggctacagctggaggaagaagaatgactgcaccaagatcaaggccatccggctgagcctgcaggtggtgaaccgggagatccgggaggagaacaagctgtacaagaggacagccctggccctgcactacctgctgacctacaagcacctgagcgccatcctggaggccctgaagcacctggaggtggtgacccggctgagccccctgtgctgtgagaacatggcccagagcggggccatcagcaagatctttgtgctgatccgcagctgcaacagaagcatcccctgcatggaggtgatccgctatgctgtgcaggtgctgctgaatgtgtccaaatatgagaagaccaccagcgctgtgtatgatgtggagaactgcatcgacatcctgctggagctgctgcagatctaccgggagaagccaggcaacaaggtggccgacaagggcggcagcatcttcaccaagacctgctgcctgctggccatcctgctgaagaccaccaacagagccagtgatgtgcgcagccgcagcaaggtggtggaccgcatctacagcctgtacaagctgacagcccacaagcacaagatgaacacagagcgcatcctgtacaagcagaagaagaacagcagcatcagcatccccttcatccctgagacccctgtgaggaccagaattgtgtcccggctgaagccagactgggtgctgcggcgggacaacatggaggagatcaccaaccccctgcaggccatccagatggtgatggacaccctgggcatcccctactag

SEQ ID NO: 144139 - DNA, 1686 bp, synthetic construct
  misc_feature 1..1686: note = Description of Artificial Sequence: Synthetic coding sequence
  source 1..1686: mol_type = other DNA
atgtgtggcatctgggccctgtttggaagtgatgactgcctgtctgtgcagtgcctgagcgccatgaagatcgcccaccggggcccagatgccttccgctttgaaaatgtgaatggctacaccaactgctgcttcggcttccaccggctggccgtggtggaccccctgtttggcatgcagcccatccgggtgaagaagtacccctacctgtggctgtgctacaatggagagatctacaaccacaagaagatgcagcagcactttgaatttgagtaccagaccaaggtggatggagagatcatcctgcacctgtatgacaagggcggcatcgagcagaccatctgcatgctggatggagtgtttgcctttgtgctgctggacacagccaacaagaaggtgttcctgggccgggacacctacggcgtgcggcccctcttcaaggccatgacagaagatggcttcctggccgtgtgcagcgaggccaagggcctggtgaccctgaagcacagcgccacccccttcctgaaggtggagcccttcctgcccggccactatgaggtgctggacctgaagcccaacgggaaggtggcctctgtggagatggtgaagtaccaccactgcagagatgtgcccctgcacgccctgtatgacaacgtggagaagctgtttcctggctttgaaattgagaccgtgaagaacaacctgcgcatcctcttcaacaatgctgtgaagaagaggctgatgacagacagaagaattggctgcctgctgagcggcggcctggacagcagcctggtggccgccaccctgctgaagcagctgaaggaggcccaggtgcagtaccccctgcagacctttgccatcggcatggaggacagcccagacctgctggccgccaggaaggtggccgaccacatcggcagcgagcactatgaggtgctcttcaacagcgaggagggcatccaggccctggatgaagtcatcttcagcctggagacctatgacatcaccaccgtgcgggcctctgtgggcatgtacctgatcagcaagtacatcaggaagaacacagacagcgtggtgatcttctctggagagggcagtgatgagctgacccagggctacatctacttccacaaggcccccagccctgagaaggccgaggaggagagcgagcggctgctgcgggagctgtacctgtttgatgtgctgcgggctgacaggaccacagctgcccacggcctggagctgcgggtgcccttcctggaccaccgcttcagcagctactacctgagcctgcccccagagatgaggatccccaagaatggaattgagaagcacctgctgcgggagacctttgaggacagcaacctgatccccaaggagatcctgtggaggcccaaggaggccttcagtgatggcatcacctctgtgaagaacagctggttcaagatcctgcaggagtatgtggagcaccaggtggatgatgccatgatggccaatgctgcccagaagttccccttcaacacccccaagaccaaggagggctactactaccggcaggtgtttgagcggcactacccaggccgggctgactggctgagccactactggatgcccaagtggatcaatgccacagaccccagcgcccggaccctgacccactacaagtctgctgtgaaggcctag

SEQ ID NO: 144140 - DNA, 1686 bp, synthetic construct; identical to SEQ ID NO: 144139
  misc_feature 1..1686: note = Description of Artificial Sequence: Synthetic coding sequence
  source 1..1686: mol_type = other DNA

SEQ ID NO: 144141 - DNA, 1686 bp, synthetic construct; identical to SEQ ID NO: 144139
  misc_feature 1..1686: note = Description of Artificial Sequence: Synthetic coding sequence
  source 1..1686: mol_type = other DNA

SEQ ID NO: 144142 - DNA, 87 bp, synthetic construct
  misc_feature 1..87: note = Description of Artificial Sequence: Synthetic coding sequence
  source 1..87: mol_type = other DNA
atgtgtggcatctgggccctgtttggaagtgatgactgcctgtctgtgcagtgcctgagcgccatgaagatcgcccaccggggctag

SEQ ID NO: 144143 - DNA, 489 bp, synthetic construct
  misc_feature 1..489: note = Description of Artificial Sequence: Synthetic coding sequence
  source 1..489: mol_type = other DNA
atgtgtggcatctgggccctgtttggaagtgatgactgcctgtctgtgcagtgcctgagcgccatgaagatcgcccaccggggcccagatgccttccgctttgaaaatgtgaatggctacaccaactgctgcttcggcttccaccggctggccgtggtggaccccctgtttggcatgcagcccatccgggtgaagaagtacccctacctgtggctgtgctacaatggagagatctacaaccacaagaagatgcagcagcactttgaatttgagtaccagaccaaggtggatggagagatcatcctgcacctgtatgacaagggcggcatcgagcagaccatctgcatgctggatggagtgtttgcctttgtgctgctggacacagccaacaagaaggtgttcctgggccgggacacctacggcgtgcggcccctcttcaaggccatgacagaagatggcttcctggccgtgtgcagcgaggccaagtag

SEQ ID NO: 144144 - DNA, 648 bp, synthetic construct
  misc_feature 1..648: note = Description of Artificial Sequence: Synthetic coding sequence
  source 1..648: mol_type = other DNA
atgtgtggcatctgggccctgtttggaagtgatgactgcctgtctgtgcagtgcctgagcgccatgaagatcgcccaccggggcccagatgccttccgctttgaaaatgtgaatggctacaccaactgctgcttcggcttccaccggctggccgtggtggaccccctgtttggcatgcagcccatccgggtgaagaagtacccctacctgtggctgtgctacaatggagagatctacaaccacaagaagatgcagcagcactttgaatttgagtaccagaccaaggtggatggagagatcatcctgcacctgtatgacaagggcggcatcgagcagaccatctgcatgctggatggagtgtttgcctttgtgctgctggacacagccaacaagaaggtgttcctgggccgggacacctacggcgtgcggcccctcttcaaggccatgacagaagatggcttcctggccgtgtgcagcgaggccaagggcctggtgaccctgaagcacagcgccacccccttcctgaaggtggagcccttcctgcccggccactatgaggtgctggacctgaagcccaacgggaaggtggcctctgtggagatggtgaagtaccaccactgcagagatgtgcccctgcacgccctgtag

SEQ ID NO: 144145 - DNA, 360 bp, synthetic construct
  misc_feature 1..360: note = Description of Artificial Sequence: Synthetic coding sequence
  source 1..360: mol_type = other DNA
atgtgtggcatctgggccctgtttggaagtgatgactgcctgtctgtgcagtgcctgagcgccatgaagatcgcccaccggggcccagatgccttccgctttgaaaatgtgaatggctacaccaactgctgcttcggcttccaccggctggccgtggtggaccccctgtttggcatgcagcccatccgggtgaagaagtacccctacctgtggctgtgctacaatggagagatctacaaccacaagaagatgcagcagcactttgaatttgagtaccagaccaaggtggatggagagatcatcctgcacctgtatgacaagggcggcatcgagcagaccatctgcatgctggatggatag

SEQ ID NO: 144146 - DNA, 102 bp, synthetic construct
  misc_feature 1..102: note = Description of Artificial Sequence: Synthetic coding sequence
  source 1..102: mol_type = other DNA
atgtgtggcatctgggccctgtttggaagtgatgactgcctgtctgtgcagtgcctgagcgccatgaagatcgcccaccggggcccagatgccttcagatag

SEQ ID NO: 144147 - DNA, 192 bp, synthetic construct
  misc_feature 1..192: note = Description of Artificial Sequence: Synthetic coding sequence
  source 1..192: mol_type = other DNA
atgaagatcgcccaccggggcccagatgccttccgctttgaaaatgtgaatggctacaccaactgctgcttcggcttccaccggctggccgtggtggaccccctgtttggcatgcagcccatccgggtgaagaagtacccctacctgtggctgtgctacaacggggagatctacaaccacaagaaggtgtag

SEQ ID NO: 144148 - DNA, 1437 bp, synthetic construct
  misc_feature 1..1437: note = Description of Artificial Sequence: Synthetic coding sequence
  source 1..1437: mol_type = other DNA
atgcagcagcactttgaatttgagtaccagaccaaggtggatggagagatcatcctgcacctgtatgacaagggcggcatcgagcagaccatctgcatgctggatggagtgtttgcctttgtgctgctggacacagccaacaagaaggtgttcctgggccgggacacctatggagtgcggcccctcttcaaggccatgacagaagatggcttcctggccgtgtgcagcgaggccaagggcctggtgaccctgaagcacagcgccacccccttcctgaaggtggagcccttcctgcccggccactatgaggtgctggacctgaagcccaacgggaaggtggcctctgtggagatggtgaagtaccaccactgcagagatgtgcccctgcacgccctgtatgacaacgtggagaagctgtttcctggctttgaaattgaaacagtgaagaacaacctgcgcatcctcttcaacaatgctgtgaagaagaggctgatgacagaccggcgcatcggctgcctgctgagcggcggcctggacagcagcctggtggccgccaccctgctgaagcagctgaaggaggcccaggtgcagtaccccctgcagacctttgccatcggcatggaggacagcccagacctgctggccgccaggaaggtggccgaccacatcggcagcgagcactatgaggtgctcttcaacagcgaggagggcatccaggccctggatgaggtgatcttcagcctggagacctatgacatcaccaccgtgcgggcctctgtgggcatgtacctgatcagcaagtacatcaggaagaacacagattctgtggtgatcttcagcggggagggcagtgatgagctgacccagggctacatctacttccacaaggcccccagccctgagaaggccgaggaggagagcgagcggctgctgcgggagctgtacctgtttgatgtgctgcgggctgacaggaccacagctgcccacggcctggagctgcgggtgcccttcctggaccaccgcttcagcagctactacctgagcctgcccccagagatgaggatccccaagaatggcatcgagaagcacctgctgcgggagacctttgaggacagcaacctgatccccaaggagatcctgtggaggcccaaggaggccttcagtgatggcatcacctctgtgaagaacagctggttcaagatcctgcaggagtatgtggagcaccaggtggatgatgccatgatggccaatgctgcccagaagttccccttcaacacccccaagaccaaggagggctactactaccggcaggtgtttgagcggcactacccaggccgggctgactggctgagccactactggatgcccaagtggatcaatgccacagaccccagcgcccggaccctgacccactacaagtctgctgtgaaggcctag

SEQ ID NO: 144149 - DNA, 1623 bp, synthetic construct
  misc_feature 1..1623: note = Description of Artificial Sequence: Synthetic coding sequence
  source 1..1623: mol_type = other DNA
atgaagatcgcccaccggggcccagatgccttccgctttgaaaatgtgaatggctacaccaactgctgcttcggcttccaccggctggccgtggtggaccccctgtttggcatgcagcccatccgggtgaagaagtacccctacctgtggctgtgctacaacggggagatctacaaccacaagaagatgcagcagcactttgaatttgagtaccagaccaaggtggatggagagatcatcctgcacctgtatgacaagggcggcatcgagcagaccatctgcatgctggatggagtgtttgcctttgtgctgctggacacagccaacaagaaggtgttcctgggccgggacacctatggagtgcggcccctcttcaaggccatgacagaagatggcttcctggccgtgtgcagcgaggccaagggcctggtgaccctgaagcacagcgccacccccttcctgaaggtggagcccttcctgcccggccactatgaggtgctggacctgaagcccaacgggaaggtggcctctgtggagatggtgaagtaccaccactgcagagatgtgcccctgcacgccctgtatgacaacgtggagaagctgtttcctggctttgaaattgaaacagtgaagaacaacctgcgcatcctcttcaacaatgctgtgaagaagaggctgatgacagaccggcgcatcggctgcctgctgagcggcggcctggacagcagcctggtggccgccaccctgctgaagcagctgaaggaggcccaggtgcagtaccccctgcagacctttgccatcggcatggaggacagcccagacctgctggccgccaggaaggtggccgaccacatcggcagcgagcactatgaggtgctcttcaacagcgaggagggcatccaggccctggatgaggtgatcttcagcctggagacctatgacatcaccaccgtgcgggcctctgtgggcatgtacctgatcagcaagtacatcaggaagaacacagattctgtggtgatcttcagcggggagggcagtgatgagctgacccagggctacatctacttccacaaggcccccagccctgagaaggccgaggaggagagcgagcggctgctgcgggagctgtacctgtttgatgtgctgcgggctgacaggaccacagctgcccacggcctggagctgcgggtgcccttcctggaccaccgcttcagcagctactacctgagcctgcccccagagatgaggatccccaagaatggcatcgagaagcacctgctgcgggagacctttgaggacagcaacctgatccccaaggagatcctgtggaggcccaaggaggccttcagtgatggcatcacctctgtgaagaacagctggttcaagatcctgcaggagtatgtggagcaccaggtggatgatgccatgatggccaatgctgcccagaagttccccttcaacacccccaagaccaaggagggctactactaccggcaggtgtttgagcggcactacccaggccgggctgactggctgagccactactggatgcccaagtggatcaatgccacagaccccagcgcccggaccctgacccactacaagtctgctgtgaaggcctag

SEQ ID NO: 144150 - DNA, 1437 bp, synthetic construct; identical to SEQ ID NO: 144148
  misc_feature 1..1437: note = Description of Artificial Sequence: Synthetic coding sequence
  source 1..1437: mol_type = other DNA

SEQ ID NO: 144151 - DNA, 1395 bp, synthetic construct
  misc_feature 1..1395: note = Description of Artificial Sequence: Synthetic coding sequence
  source 1..1395: mol_type = other DNA
atggccgccagctgcctggtgctgctggccctgtgcctgctgctgcccctgctgctgctgggcggctggaagcgctggaggcggggccgggccgcccggcacgtggtggccgtggtgctgggagatgtgggccgcagccccaggatgcagtaccacgccctgagcctggccatgcacggcttctctgtgaccctgctgggcttctgcaacagcaagccccatgatgagctgctgcagaacaaccgcatccagatcgtgggcctgacagagctgcagagcctggccgtgggccccagggtcttccagtatggagtgaaggtggtgctgcaggccatgtacctgctgtggaagctgatgtggagggagcccggggcctacatcttcctgcagaaccccccaggcctgcccagcattgctgtgtgctggtttgtgggctgcctgtgtggcagcaagctggtgattgactggcacaactacggctacagcatcatgggcctggtgcacggccccaaccaccccctggtgctgctggccaagtggtatgagaagttcttcggccgcctgagccacctgaacctgtgtgtgaccaatgccatgagggaggacctggccgacaactggcacatccgggctgtgacagtgtatgacaagccagccagcttcttcaaggagacccccctggacctgcagcacaggctcttcatgaagctgggctccatgcacagccccttccgggcccggtctgagccagaagatcctgtgacagagaggtctgccttcacagaaagagatgctggcagcggcctggtgacccggctgcgggagaggcctgccctgctggtgagcagcacctcctggacagaagatgaggacttcagcatcctgctggccgccctggagaagtttgagcagctgaccctggatggccacaacctgcccagcctggtgtgtgtgatcaccgggaagggccccctgcgggagtactacagccgcctcatccaccagaagcacttccagcacatccaggtgtgcaccccctggctggaggccgaggactaccccctgctgctgggcagcgctgacctgggcgtgtgcctgcacaccagcagcagcggcctggacctgcccatgaaggtggtggacatgtttggctgctgcctgcctgtgtgtgctgtgaacttcaagtgcctgcacgagctggtgaagcatgaagaaaatggcctggtgtttgaagattctgaggagctggccgcccagctgcagatgctgttcagcaacttcccagaccctgctgggaagctgaaccagttcaggaagaacctgcgggagagccagcagctgcgctgggatgagagctgggtgcagacagtgctgcccctggtgatggacacctag

SEQ ID NO: 144152 - DNA, 1062 bp, synthetic construct
  misc_feature 1..1062: note = Description of Artificial Sequence: Synthetic coding sequence
  source 1..1062: mol_type = other DNA
atgtacctgctgtggaagctgatgtggagggagcccggggcctacatcttcctgcagaaccccccaggcctgcccagcattgctgtgtgctggtttgtgggctgcctgtgtggcagcaagctggtgattgactggcacaactacggctacagcatcatgggcctggtgcacggccccaaccaccccctggtgctgctggccaagtggtatgagaagttcttcggccgcctgagccacctgaacctgtgtgtgaccaatgccatgagggaggacctggccgacaactggcacatccgggctgtgacagtgtatgacaagccagccagcttcttcaaggagacccccctggacctgcagcacaggctcttcatgaagctgggctccatgcacagccccttccgggcccggtctgagcctgaggaccctgtgacagagaggtctgccttcacagaaagagatgctggcagcggcctggtgacccggctgcgggagaggcctgccctgctggtgagcagcacctcctggacagaagatgaggacttcagcatcctgctggccgccctggagaagtttgagcagctgaccctggatggccacaacctgcccagcctggtgtgtgtgatcaccgggaagggccccctgcgggagtactacagccgcctcatccaccagaagcacttccagcacatccaggtgtgcaccccctggctggaggccgaggactaccccctgctgctgggcagcgctgacctgggcgtgtgcctgcacaccagcagcagcggcctggacctgcccatgaaggtggtggacatgtttggctgctgcctgcctgtgtgtgctgtgaacttcaagtgcctgcacgagctggtgaagcatgaggagaatggcctggtgtttgaggacagcgaggagctggccgcccagctgcagatgctgttcagcaacttcccagaccctgctgggaagctgaaccagttcaggaagaacctgcgggagagccagcagctgcgctgggatgagagctgggtgcagacagtgctgcccctggtgatggacacctag

SEQ ID NO: 144153 - DNA, 1422 bp, synthetic construct
  misc_feature 1..1422: note = Description of Artificial Sequence: Synthetic coding sequence
  source 1..1422: mol_type = other DNA
atggcccagctggagggctactacttctctgctgccctgagctgcaccttcctggtgtcctgcctgctcttcagcgccttcagccgggccctgcgggagccctacatggatgagatcttccacctgccccaggcccagcgctactgtgagggccacttcagcctgagccagtgggaccccatgatcaccaccctgcccggcctgtacctggtgtccattggagtcatcaagccagccatctggatcttcggctggagcgagcacgtggtgtgcagcatcggcatgctgcgctttgtgaacctgctcttctctgtgggcaacttctacctgctgtacctgctcttctgcaaggtgcagcccaggaacaaggccgccagcagcatccagagggtgctgagcaccctgaccctggccgtgttccccaccctgtacttcttcaacttcctgtactacacagaggccggctccatgttcttcaccctgtttgcctacctgatgtgcctgtatggcaaccacaagaccagcgccttcctgggcttctgtggcttcatgttccggcagaccaacatcatctgggccgtgttctgtgctggaaatgtgattgcccagaagctgacagaggcctggaagacagagctgcagaagaaggaggaccggctgccccccatcaagggcccctttgctgagttcaggaagatcctgcagttcctgctggcctacagcatgtccttcaagaacctgtccatgctgctgctgctgacctggccctacatcctgctgggcttcctgttctgtgcctttgtggtggtgaatggaggcatcgtcatcggggacaggagcagccatgaggcctgcctgcacttcccccagctgttctacttcttctccttcaccctcttcttctccttcccccacctgctgagccccagcaagatcaagaccttcctgagcctggtgtggaagaggcgcatcctcttctttgtggtgaccctggtgtctgtgttcctggtgtggaagttcacctacgcccacaagtacctgctggccgacaacagacactacaccttctacgtgtggaagagggtcttccagagatatgagaccgtgaagtacctgctggtgcctgcctacatctttgctggctggagcattgctgacagcctgaagagcaagagcatcttctggaacctgatgttcttcatctgcctcttcaccgtgattgtgccccagaagctgctggagttccgctacttcatcctgccctacgtgatctaccgcctgaacatccccctgccccccaccagccgcctcatctgtgagctgagctgctatgctgtggtgaacttcatcaccttcttcatcttcctgaacaagaccttccagtggcccaacagccaggacatccagcgcttcatgtggtag

SEQ ID NO: 144154 - DNA, 1479 bp, synthetic construct
  misc_feature 1..1479: note = Description of Artificial Sequence: Synthetic coding sequence
  source 1..1479: mol_type = other DNA
atggctgctggggagaggtcctggtgcctgtgcaagctgctgcgcttcttctacagcctcttcttccctggcctcatcgtgtgtggcaccctgtgtgtgtgcctggtgattgtgctgtggggcatccggctgctgctgcagaggaagaagaagctggtgtccaccagcaagaatggcaagaaccagatggtgattgccttcttccacccctactgcaatgctgggggcggcggggagcgggtgctgtggtgtgccctgcgggccctgcagaagaagtacccagaggccgtgtatgtggtgtacacaggagatgtgaatgtgaatggccagcagatcctggagggcgccttccgccgcttcaacatccgcctcatccaccctgtgcagtttgtgttcctgaggaagcgctacctggtggaggacagcctgtacccccacttcaccctgctgggccagagcctgggcagcatcttcctgggctgggaggccctgatgcagtgtgtgcctgatgtgtacatcgacagcatgggctacgccttcaccctgcccctcttcaagtacatcggcggctgccaggtgggcagctatgtgcactaccccaccatcagcacagacatgctgtctgtggtgaagaaccagaacatcggcttcaacaatgctgccttcatcaccaggaaccccttcctgagcaaggtgaagctgatctactactacctgtttgccttcatctacggcctggtgggcagctgcagtgatgtggtgatggtgaacagctcctggaccctgaaccacatcctgagcctgtggaaggtgggcaactgcaccaacatcgtgtacccaccctgtgatgtgcagaccttcctggacatccccctgcacgagaagaagatgaccccaggccacctgctggtgtctgtgggccagttccggcctgagaagaaccaccccctgcagatccgggcctttgccaagctgctgaacaagaagatggtggagagcccccccagcctgaagctggtgctgattggaggctgcaggaacaaggatgatgagctgcgggtgaaccagctgcggcggctgtctgaggacctgggcgtgcaggagtatgtggagttcaagatcaacatcccctttgatgagctgaagaactacctgtctgaggccaccatcggcctgcacaccatgtggaatgagcacttcggcatcggcgtggtggagtgcatggccgccggcaccatcatcctggcccacaacagcggcggccccaagctggacatcgtggtgccccatgaaggagacatcaccggcttcctggccgagagtgaagaagattatgcagagaccatcgcccacatcctgtccatgtctgctgagaagaggctgcagatcaggaagagcgcccgggcctctgtgagccgcttcagtgaccaggagtttgaggtgaccttcctgagctctgtggagaagctgttcaagtag

SEQ ID NO: 144155 - DNA, 111 bp, synthetic construct
  misc_feature 1..111: note = Description of Artificial Sequence: Synthetic coding sequence
  source 1..111: mol_type = other DNA
atggctgctggggagaggtcctggtgcctgtgcaagctgctgcggagctgtggggtgtatggctcctggcacaactacccctgcacccagtttggaggccccaaggcctag

SEQ ID NO: 144156 - DNA, 1467 bp, synthetic construct
  misc_feature 1..1467: note = Description of Artificial Sequence: Synthetic coding sequence
  source 1..1467: mol_type = other DNA
atggccggcaagggcagcagtggaagaagacccctgctgctgggcctgctggtggccgtggccaccgtgcacctggtgatctgcccctacaccaaggtggaggagagcttcaacctgcaggccacccatgacctgctgtaccactggcaggacctggagcagtatgaccacctggagttccctggggtggtgcccaggaccttcctgggccctgtggtgattgctgtgttcagcagccctgctgtgtatgtgctgagcctgctggagatgagcaagttctacagccagctgattgtgcggggcgtgctgggcctgggcgtcatcttcggcctgtggaccctgcagaaggaggtgagaagacactttggagccatggtggccaccatgttctgctgggtgacagccatgcagttccacctgatgttctactgcaccaggaccctgcccaacgtgctggccctgcctgtggtgctgctggccctggccgcctggctgcggcatgagtgggcccgcttcatctggctgagcgcctttgccatcatcgtgttccgggtggagctgtgcctcttcctgggcctgctgctgctgctggccctgggcaacaggaaggtgtctgtggtgcgggccctgcggcatgctgtgcctgctggcatcctgtgcctgggcctgactgtggccgtggacagctacttctggaggcagctgacctggccagagggcaaggtgctgtggtacaacacagtgctgaacaagagcagcaactggggcaccagccccctgctgtggtacttctacagcgccctgccccggggcctgggctgcagcctgctcttcatccccctgggcctggtggacaggaggacccacgcccccaccgtgctggccctgggcttcatggccctgtacagcctgctgccccacaaggagctgcgcttcatcatctatgccttccccatgctgaacatcacagctgcccggggctgcagctacctgctgaacaactacaagaagtcctggctgtacaaggccggcagcctgctggtgattggccacctggtggtgaatgctgcctacagcgccacagccctgtatgtgagccacttcaactacccaggaggagtggccatgcagaggctgcaccagctggtgcccccccagacagatgtgctgctgcacattgatgtggccgccgcccagacaggagtgagccgcttcctgcaggtgaacagcgcctggaggtatgacaagcgggaggatgtgcagcccggcaccggcatgctggcctacacccacatcctgatggaggccgcccctggcctgctggccctgtacagagacacccaccgggtgctggcctctgtggtgggcaccaccggggtgtccctgaacctgacccagctgccccccttcaacgtgcacctgcagaccaagctggtgctgctggagcggctgccccggcccagctag

SEQ ID NO: 144157 - DNA, 987 bp, synthetic construct
  misc_feature 1..987: note = Description of Artificial Sequence: Synthetic coding sequence
  source 1..987: mol_type = other DNA
atgccacccacccagccccggccctgcatgtgccccatcagcaccacccaggtggccagccagtgccggggctgcacctcctggtgccccccccggcagaccagcttctgcaccctgacctggcagcccccccggcaggtgtgcctgggcttcagcaagagcacagcccctgggggcaccacccggggccgcatgtgcagccggggccaggcctgctggcacacccacaccagctcctggaggcggccctgggcccctggccccctgcagggccacaccccaggccctggccagaggagaggagaccaccgctgtgagagcgagccagaccccacagcccccctgcagaggcccccagctgacaaggccggggccagcggggaggcccccccagctgtgctgcggggcacccggcagcccagcgctgccaccggcctgcctggagctgtgatcaccaccagcttctggcacaacagcagcaccatcatgaccatccagaggagcaagagcaaggactgggccccagccagtgacagacaccagaccaggagccgggccagcagcacagccagcgctggggccctgagcaccaaggagcggggggcccaggtgctgctggccccccgggagcccctgccccgggtgatggtggccagcagcggcctgcctgctggggactgcaggccagaccaggtgcccttcatgaccaaccaggagcagagggcccaccctggcacctgcctgcccggcggccacgtgtgcccagcccaccctgggggcgctgtgttctggcagcaccccaccctggccgcccggggccccctgggcgcccccaagacagccccacccctgcggggggaccacggcggccctggccgcaccccaccaccctggtgccaccactgcaacttctgcatccaccgccaccccatcagcatcacagacaagatcctgggggacaagcacatccagaagggcatgaggtag

SEQ ID NO: 144158 - DNA, 2865 bp, synthetic construct
  misc_feature 1..2865: note = Description of Artificial Sequence: Synthetic coding sequence
  source 1..2865: mol_type = other DNA
atgaacaaccaccagctggagctggccaagcagctgcacaaggagggccacctgttctactgcacctgccgggtgctgacctgccccggccaggccaagagcatcgccagcgcccctgggaagtgccaggacagcgctgccctgaccagcacagccttcagcggcctggactttggcctgctgagcggctacctgcacaagcaggccctggtgacagccacccaccccacctgcaccctgctcttccccagctgccacgccttcttccccctgcccctgacccccaccctgtacaagatgcacaagggctggaagaactactgcagccagaagagcctgaatgaggcctccatggatgagtacctgggcagcctgggcctcttcaggaagctgacagccaaggatgccagctgcctcttccgggccatcagcgagcagctgttctgcagccaggtgcaccacctggagatcaggaaggcctgtgtgtcctacatgagggagaaccagcagacctttgagagctatgtggagggcagctttgagaagtacctggagcggctgggggaccccaaggagagcgctggccagctggagatccgggccctgagcctcatctacaacagagacttcatcctgtaccgcttccctgggaagccacccacctacgtgacagacaatggctatgaggacaagatcctgctgtgctacagcagcagcggccactatgacagcgtgtacagcaagcagttccagagcagcgctgctgtgtgccaggccgtgctgtatgagatcctgtacaaggatgtgtttgtggtggatgaggaggagctgaagacagccatcaagctgttccgcagcggcagcaagaagaacagaaataatgctgtgactggaagtgaagatgcccacacagactacaagagcagcaaccagaacaggatggaggagtggggcgcctgctacaatgctgagaacatccctgagggctacaacaagggcacagaggagaccaagagccctgagaaccccagcaagatgcccttcccctacaaggtgctgaaggccctggaccctgagatctacagaaatgtggagtttgatgtgtggctggacagcaggaaggagctgcagaagagtgactacatggagtatgccggccggcagtactacctgggggacaagtgccaggtgtgcctggagagcgagggccgctactacaatgcccacatccaggaggtgggcaatgaaaacaacagcgtgacagtgttcatcgaggagctggccgagaagcacgtggtgcccctggccaacctgaagcctgtgacccaggtgatgtctgtgcctgcctggaatgccatgcccagcaggaagggccggggctaccagaagatgcctgggggctacgtgcctgagatcgtcatcagcgagatggacatcaagcagcagaagaagatgttcaagaagatccggggcaaggaggtgtacatgaccatggcctacggcaagggggaccccctgctgcccccccggctgcagcacagcatgcactacggccatgacccccccatgcactacagccagacagctggaaatgtgatgagcaatgagcacttccacccccagcaccccagcccccggcagggccggggctacggcatgcccaggaacagcagccgcttcatcaacagacacaacatgcctggccccaaggtggacttctacccaggccctgggaagcgctgctgccagagctatgacaacttctcctaccgcagccgctccttccgccgcagccaccggcagatgagctgtgtgaacaaggagagccagtatggcttcaccccaggaaatggccagatgccccggggcctggaggagaccatcaccttctatgaggtggaggagggagatgaaacagcctaccccaccctgcccaaccacggcggccccagcaccatggtgcctgccaccagcggctactgtgtgggccggcggggccacagcagcggcaagcagaccctgaacctggaggagggcaatggccagagtgaaaatggccgctaccacgaggagtacctgtacagagctgagccagactatgagaccagcggcgtgtacagcaccacagccagcacagccaacctgagcctgcaggacaggaagagctgcagcatgagcccccaggacacagtgaccagctacaactacccccagaagatgatgggcaacattgctgctgtggccgccagctgtgccaacaacgtgcctgcccctgtgctgagcaatggagctgctgccaaccaggccatcagcaccacctctgtgagcagccagaatgccatccagcccctgtttgtgagcccccccacccacggccgcccagacaccaaggtgctgcagtactacttcaacctgggcctgcagtgctactaccacagctactggcacagcatggtgtatgtgccccagatgcagcagcagctgcacgtggagaactaccctgtgtacacagagccccccctggtggaccagacagtgccccagtgctacagcgaggtgcggcgggaggatggcatccaggccgaggccagcgccaatgacaccttccccaatgctgacagcagctctgtgccccatggagctgtgtactaccctgtgatgtctgacccctacggccagccccccctgcccggctttgacagctgcctgcctgtggtgcctgactacagctgtgtgcccccctggcaccctgtgggcacagcctacggcggcagcagccagatccatggagccatcaaccctggccccatcggctgcatcgcccccagccccccagccagccactacgtgccccagggcatgtag

SEQ ID NO: 144159 - DNA, 498 bp, synthetic construct
  misc_feature 1..498: note = Description of Artificial Sequence: Synthetic coding sequence
  source 1..498: mol_type = other DNA
atgaagtgtgtgtttgtgacagtgggcaccaccagctttgatgacctgattgcctgtgtgtctgccccagacagcctgcagaagattgagagcctgggctacaacagactcatcctgcagatcggccggggcaccgtggtgcctgagcccttcagcacagagagcttcaccctggatgtgtaccgctacaaggacagcctgaaggaggacatccagaaggctgacctggtgatcagccatgctggagctggcagctgcctggagaccctggagaagggcaagcccctggtggtggtgatcaatgagaagctgatgaacaaccaccagctggagctggccaagcagctgcacaaggagggccacctgttctactgcacctgcagcaccctgcccggcctgctgcagagcatggacctgagcaccctgaagtgctacccacctggccagcctgagaagttcagcgccttcctggacaaggtggtgggcctgcagaagtag

SEQ ID NO: 144160 - DNA, 3414 bp, synthetic construct
  misc_feature 1..3414: note = Description of Artificial Sequence: Synthetic coding sequence
  source 1..3414: mol_type = other DNA
atgaagtgtgtgtttgtgacagtgggcaccaccagctttgatgacctgattgcctgtgtgtctgccccagacagcctgcagaagattgagagcctgggctacaacagactcatcctgcagatcggccggggcaccgtggtgcctgagcccttcagcacagagagcttcaccctggatgtgtaccgctacaaggacagcctgaaggaggacatccagaaggctgacctggtgatcagccatgctggagctggcagctgcctggagaccctggagaagggcaagcccctggtggtggtgatcaatgagaagctgatgaacaaccaccagctggagctggccaagcagctgcacaaggagggccacctgttctactgcacctgccgggtgctgacctgccccggccaggccaagagcatcgccagcgcccctgggaagtgccaggacagcgctgccctgaccagcacagccttcagcggcctggactttggcctgctgagcggctacctgcacaagcaggccctggtgacagccacccaccccacctgcaccctgctcttccccagctgccacgccttcttccccctgcccctgacccccaccctgtacaagatgcacaagggctggaagaactactgcagccagaagagcctgaatgaggcctccatggatgagtacctgggcagcctgggcctcttcaggaagctgacagccaaggatgccagctgcctcttccgggccatcagcgagcagctgttctgcagccaggtgcaccacctggagatcaggaaggcctgtgtgtcctacatgagggagaaccagcagacctttgagagctatgtggagggcagctttgagaagtacctggagcggctgggggaccccaaggagagcgctggccagctggagatccgggccctgagcctcatctacaacagagacttcatcctgtaccgcttccctgggaagccacccacctacgtgacagacaatggctatgaggacaagatcctgctgtgctacagcagcagcggccactatgacagcgtgtacagcaagcagttccagagcagcgctgctgtgtgccaggccgtgctgtatgagatcctgtacaaggatgtgtttgtggtggatgaggaggagctgaagacagccatcaagctgttccgcagcggcagcaagaagaacagaaataatgctgtgactggaagtgaagatgcccacacagactacaagagcagcaaccagaacaggatggaggagtggggcgcctgctacaatgctgagaacatccctgagggctacaacaagggcacagaggagaccaagagccctgagaaccccagcaagatgcccttcccctacaaggtgctgaaggccctggaccctgagatctacagaaatgtggagtttgatgtgtggctggacagcaggaaggagctgcagaagagtgactacatggagtatgccggccggcagtactacctgggggacaagtgccaggtgtgcctggagagcgagggccgctactacaatgcccacatccaggaggtgggcaatgaaaacaacagcgtgacagtgttcatcgaggagctggccgagaagcacgtggtgcccctggccaacctgaagcctgtgacccaggtgatgtctgtgcctgcctggaatgccatgcccagcaggaagggccggggctaccagaagatgcctgggggctacgtgcctgagatcgtcatcagcgagatggacatcaagcagcagaagaagatgttcaagaagatccggggcaaggaggtgtacatgaccatggcctacggcaagggggaccccctgctgcccccccggctgcagcacagcatgcactacggccatgacccccccatgcactacagccagacagctggaaatgtgatgagcaatgagcacttccacccccagcaccccagcccccggcagggccggggctacggcatgcccaggaacagcagccgcttcatcaacagacacaacatgcctggccccaaggtggacttctacccaggccctgggaagcgctgctgccagagctatgacaacttctcctaccgcagccgctccttccgccgcagccaccggcagatgagctgtgtgaacaaggagagccagtatggcttcaccccaggaaatggccagatgccccggggcctggaggagaccatcaccttctatgaggtggaggagggagatgaaacagcctaccccaccctgcccaaccacggcggccccagcaccatggtgcctgccaccagcggctactgtgtgggccggcggggccacagcagcggcaagcagaccctgaacctggaggagggcaatggccagagtgaaaatggccgctaccacgaggagtacctgtacagagctgagccagactatgagaccagcggcgtgtacagcaccacagccagcacagccaacctgagcctgcaggacaggaagagctgcagcatgagcccccaggacacagtgaccagctacaactacccccagaagatgatgggcaacattgctgctgtggccgccagctgtgccaacaacgtgcctgcccctgtgctgagcaatggagctgctgccaaccaggccatcagcaccacctctgtgagcagccagaatgccatccagcccctgtttgtgagcccccccacccacggccggcctgtgattgccagccccagctacccctgccacagcgccatcccccacgccggggccagcctgcccccacctcctcctcctcctcctcctcctcctcctcctcctcctcctcctcctcctcctcctcctcctcctcctcctccagccctggatgtgggggagaccagcaacctgcagcccccaccacccctgcccccaccaccctacagctgtgaccccagcggcagtgacctgccccaggacaccaaggtgctgcagtactacttcaacctgggcctgcagtgctactaccacagctactggcacagcatggtgtatgtgccccagatgcagcagcagctgcacgtggagaactaccctgtgtacacagagccccccctggtggaccagacagtgccccagtgctacagcgaggtgagaagagaagatggcatccaggccgaggccagcgccaatgacaccttccccaatgctgacagcagctctgtgccccacggggctgtgtactaccctgtgatgtctgacccctacggccagccccccctgcccggctttgacagctgcctgcctgtggtgcctgactacagctgtgtgcccccctggcaccctgtgggcacagcctatggaggcagcagccagatccacggggccatcaaccctggccccatcggctgcatcgcccccagccccccagccagccactacgtgccccagggcatgtag

SEQ ID NO: 144161 - DNA, 651 bp, synthetic construct
  misc_feature 1..651: note = Description of Artificial Sequence: Synthetic coding sequence
  source 1..651: mol_type = other DNA
atggtgtgtgtgctggtgctggccgctgctgctggagctgtggccgtgttcctgatcctgcgcatctgggtggtgctgcgctccatggatgtgaccccccgggagagcctgagcatcctggtggtggccggcagcggcggccacaccacagagatcctgcggctgctgggcagcctgagcaatgcctacagccccaggcactacgtgattgctgacacagatgagatgtctgccaacaagatcaacagctttgagctggacagagctgaccgggaccccagcaacatgtacaccaagtactacatccaccgcatccccaggagccgggaggtgcagcagagctggcccagcaccgtcttcaccaccctgcacagcatgtggctgtccttccccctcatccaccgggtgaagccagacctggtgctgtgcaatggacctggcacctgtgtgcccatctgtgtgtctgccctgctgctgggcatcctgggcatcaagaaggtgatcatcgtgtatgtggagagcatctgccgggtggagaccctgtccatgtctgggaagatcctcttccacctgagtgactacttcatcgtgcagtggccagccctgaaggagaagtaccccaagtctgtgtacctgggcagaattgtgtag

SEQ ID NO: 144162 - DNA, 972 bp, synthetic construct
  misc_feature 1..972: note = Description of Artificial Sequence: Synthetic coding sequence
  source 1..972: mol_type = other DNA
atgcccctgctgaagctggtgcacggcagccccctggtgtttggagagaagttcaagctgttcaccctggtgtctgcctgcatccctgtgttccggctggcccggcggaggaagaagatcctcttctactgccacttcccagacctgctgctgaccaagagggacagcttcctgaagaggctgtaccgggcccccatcgactggattgaggagtacaccaccggcatggctgactgcatcctggtgaacagccagttcaccgctgctgtgttcaaggagaccttcaagagcctgagccacattgatcctgatgtgctgtaccccagcctgaatgtgaccagctttgattctgtggtgcctgagaagctggatgacctggtgcccaagggcaagaagttcctgctgctgagcatcaacagatatgaaaggaagaagaacctgaccctggccctggaggccctggtgcagctgcggggccgcctgaccagccaggactgggagcgggtgcacctgattgtggccggcggctatgatgagcgggtgctggagaatgtggagcactaccaggagctgaagaagatggtgcagcagagcgacctgggccagtatgtgaccttcctgcgctccttcagtgacaagcagaagatcagcctgctgcacagctgcacctgtgtgctgtacacccccagcaatgagcacttcggcatcgtgcccctggaggccatgtacatgcagtgccctgtgattgctgtgaacagcggcggccccctggagagcattgaccacagcgtgacaggcttcctgtgtgagccagaccctgtgcacttcagcgaggccatcgagaagttcatccgggagcccagcctgaaggccaccatgggcctggccggccgggcccgggtgaaggagaagttcagccctgaggccttcacagagcagctgtaccgctacgtgaccaagctgctggtgtag

SEQ ID NO: 144163 - DNA, 1251 bp, synthetic construct
  misc_feature 1..1251: note = Description of Artificial Sequence: Synthetic coding sequence
  source 1..1251: mol_type = other DNA
atggccgaggagcagggccgggagcgggacagcgtgcccaagcccagcgtgctcttcctgcacccagacctgggcgtgggcggcgctgagcggctggtgctggatgctgccctggccctgcaggcccggggctgcagcgtgaagatctggacagcccactatgaccccggccactgctttgctgagagccgggagctgcctgtgcgctgtgccggggactggctgccccggggcctgggctggggcggccgcggggctgctgtgtgtgcctacgtgaggatggtgttcctggccctgtatgtgctcttcctggctgatgaggagtttgatgtggtggtgtgtgaccaggtgtctgcctgcatccctgtgttccggctggcccggcggaggaagaagatcctcttctactgccacttcccagacctgctgctgaccaagagggacagcttcctgaagaggctgtaccgggcccccatcgactggattgaggagtacaccaccggcatggctgactgcatcctggtgaacagccagttcaccgctgctgtgttcaaggagaccttcaagagcctgagccacatcgaccctgatgtgctgtaccccagcctgaatgtgaccagctttgacagcgtggtgcctgagaagctggatgacctggtgcccaagggcaagaagttcctgctgctgagcatcaacagatatgaaaggaagaagaacctgaccctggccctggaggccctggtgcagctgcggggccgcctgaccagccaggactgggagcgggtgcacctgattgtggccggcggctatgatgagcgggtgctggagaatgtggagcactaccaggagctgaagaagatggtgcagcagagcgacctgggccagtatgtgaccttcctgcggagcttcagtgacaagcagaagatcagcctgctgcacagctgcacctgtgtgctgtacacccccagcaatgagcactttggaattgtgcccctggaggccatgtacatgcagtgccctgtgattgctgtgaacagcggcggccccctggagagcattgaccacagcgtgacaggcttcctgtgtgagccagaccctgtgcacttcagcgaggccatcgagaagttcatccgggagcccagcctgaaggccaccatgggcctggccggccgggcccgggtgaaggagaagttcagccctgaggccttcacagagcagctgtaccgctacgtgaccaagctgctggtgtag

SEQ ID NO: 144164 - DNA, 1317 bp, synthetic construct
  misc_feature 1..1317: note = Description of Artificial Sequence: Synthetic coding sequence
  source 1..1317: mol_type = other DNA
atggctgctggcctgaggaagaggggccgcagcggcagcgctgcccaggccgagggcctgtgcaagcagtggctgcagagggcctggcaggagcggcggctgctgctgcgggagccccgctacaccctgctggtggccgcctgcctgtgcctggccgaggtgggcatcaccttctgggtgatccaccgggtggcctacacagaaattgactggaaggcctacatggccgaggtggagggcgtcatcaatggcacctatgactacacccagctgcagggcgacaccggccccctggtgtacccagctggctttgtgtacatcttcatgggcctgtactatgccaccagccggggcacagacatccgcatggcccagaacatctttgctgtgctgtacctggccaccctgctgctggtgttcctgatctaccaccagacctgcaaggtgcccccatttgtgttcttcttcatgtgctgtgccagctacagagtgcacagcatctttgtgctgcggctcttcaatgaccctgtggccatggtgctgctcttcctgagcatcaacctgctgctggcccagcgctggggctggggctgctgcttcttcagcctggccgtgtctgtgaagatgaatgtgctgctgtttgcccctggcctgctcttcctgctgctgacccagtttggcttccggggggccctgcccaagctgggcatctgtgccggcctgcaggtggtgctgggcctgcccttcctgctggagaaccccagcggctacctgagccgcagctttgacctgggccggcagttcctgttccactggacagtgaactggaggttcctgcctgaggccctcttcctgcaccgggccttccacctggccctgctgacagcccacctgaccctgctgctgctgtttgccctgtgccgctggcacaggactggagagagcatcctgagcctgctgcgggaccccagcaagaggaaggtgcccccccagcccctgacccccaaccagatcgtgtccaccctcttcaccagcaacttcatcggcatctgcttcagccgcagcctgcactaccagttctacgtgtggtacttccacaccctgccctacctgctgtgggccatgcctgcccgctggctgacccacctgctgcggctgctggtgctgggcctcatcgagctgtcctggaacacctaccccagcaccagctgcagcagcgctgccctgcacatctgccacgccgtcatcctgctgcagctgtggctgggcccccagcccttccccaagagcacccagcacagcaagaaggcccactag

SEQ ID NO: 144165 - DNA, 1149 bp, synthetic construct
  misc_feature 1..1149: note = Description of Artificial Sequence: Synthetic coding sequence
  source 1..1149: mol_type = other DNA
atggctgctgcccggctggcccgggccgccccagctgctgctggggccgccctgcacgccgccggcggccgcctgcccctgcccggcggcggcggccaccacctgctgggccacagccagggcggcatgtacccagctggctttgtgtacatcttcatgggcctgtactatgccaccagccggggcacagacatccgcatggcccagaacatctttgctgtgctgtacctggccaccctgctgctggtgttcctgatctaccaccagacctgcaaggtgcccccatttgtgttcttcttcatgtgctgtgccagctacagagtgcacagcatctttgtgctgcggctcttcaatgaccctgtggccatggtgctgctcttcctgagcatcaacctgctgctggcccagcgctggggctggggctgctgcttcttcagcctggccgtgtctgtgaagatgaatgtgctgctgtttgcccctggcctgctcttcctgctgctgacccagtttggcttccggggggccctgcccaagctgggcatctgtgccggcctgcaggtggtgctgggcctgcccttcctgctggagaaccccagcggctacctgagccgcagctttgacctgggccggcagttcctgttccactggacagtgaactggaggttcctgcctgaggccctcttcctgcaccgggccttccacctggccctgctgacagcccacctgaccctgctgctgctgtttgccctgtgccgctggcacaggactggagagagcatcctgagcctgctgcgggaccccagcaagaggaaggtgcccccccagcccctgacccccaaccagatcgtgtccaccctcttcaccagcaacttcatcggcatctgcttcagccgcagcctgcactaccagttctacgtgtggtacttccacaccctgccctacctgctgtgggccatgcctgcccgctggctgacccacctgctgcggctgctggtgctgggcctcatcgagctgtcctggaacacctaccccagcaccagctgcagcagcgctgccctgcacatctgccacgccgtcatcctgctgcagctgtggctgggcccccagcccttccccaagagcacccagcacagcaagaaggcccactag

SEQ ID NO: 144166 - DNA, 1530 bp, synthetic construct
  misc_feature 1..1530: note = Description of Artificial Sequence: Synthetic coding sequence
  source 1..1530: mol_type = other DNA
atggagaagtggtacctgatgacagtggtggtgctgattggcctgactgtgcgctggacagtgtccctgaacagctacagcggggccggcaagccacccatgtttggagactatgaggcccagaggcactggcaggagatcaccttcaacctgcctgtgaagcagtggtacttcaacagcagtgacaacaacctgcagtactggggcctggactacccacccctgacagcctaccacagcctgctgtgtgcctacgtggccaagttcatcaacccagactggatcgccctgcacaccagccggggctatgagagccaggcccacaagctgttcatgaggaccaccgtgctgattgctgacctgctgatctacatcccagctgtggtgctgtactgctgctgcctgaaggagatcagcaccaagaagaagatcgccaatgccctgtgcatcctgctgtacccaggcctcatcctgattgattatggccacttccagaacatctacaacagcgtgtccctgggctttgccctgtggggcgtgctgggcatcagctgtgactgtgacctgctgggcagcctggccttctgcctggccatcaactacaagcagatggagctgtaccacgccctgcccttcttctgcttcctgctgggcaagtgcttcaagaagggcctgaagggcaagggctttgtgctgctggtgaagctggcctgcatcgtggtggccagctttgtgctgtgctggctgcccttcttcacagagcgggagcagaccctgcaggtgctgcggcggctcttccctgtggaccggggcctgtttgaggacaaggtggccaacatctggtgcagcttcaacgtgttcctgaagatcaaggacatcctgcccaggcacatccagctgatcatgtccttctgcagcaccttcctgagcctgctgcctgcctgcatcaagctgatcctgcagcccagcagcaagggcttcaagttcaccctggtgtcctgtgccctgtccttcttcctgttctccttccaggtgcatgagaagagcatcctgctggtgtccctgcctgtgtgcctggtgctgtctgagatccccttcatgagcacctggttcctgctggtgtccaccttctccatgctgcccctgctgctgaaggatgagctgctgatgcccagcgtggtgaccaccatggccttcttcatcgcctgtgtgaccagcttcagcatctttgagaagaccagcgaggaggagctgcagctgaagagcttcagcatctctgtgaggaagtacctgccctgcttcaccttcctgagccgcatcatccagtacctgttcctgatcagcgtcatcaccatggtgctgctgaccctgatgacagtgaccctggaccccccccagaagctgcctgacctcttctctgtgctggtgtgctttgtgtcctgcctgaacttcctgttcttcctggtgtacttcaacatcatcatcatgtgggacagcaagtctggaagaaaccagaagaagatctcctag

SEQ ID NO: 144167 - DNA, 1524 bp, synthetic construct
  misc_feature 1..1524: note = Description of Artificial Sequence: Synthetic coding sequence
  source 1..1524: mol_type = other DNA
atggagaagtggtacctgatgacagtggtggtgctgattggcctgactgtgcgctggacagtgtccctgaacagctacagcggggccggcaagccacccatgtttggagactatgaggcccagaggcactggcaggagatcaccttcaacctgcctgtgaagcagtggtacttcaacagcagtgacaacaacctgcagtactggggcctggactacccacccctgacagcctaccacagcctgctgtgtgcctacgtggccaagttcatcaacccagactggatcgccctgcacaccagccggggctatgagagccaggcccacaagctgttcatgaggaccaccgtgctgattgctgacctgctgatctacatcccagctgtggtgctgtactgctgctgcctgaaggagatcagcaccaagaagaagatcgccaatgccctgtgcatcctgctgtacccaggcctcatcctgattgattatggccacttccagtacaacagcgtgtccctgggctttgccctgtggggcgtgctgggcatcagctgtgactgtgacctgctgggcagcctggccttctgcctggccatcaactacaagcagatggagctgtaccacgccctgcccttcttctgcttcctgctgggcaagtgcttcaagaagggcctgaagggcaagggctttgtgctgctggtgaagctggcctgcatcgtggtggccagctttgtgctgtgctggctgcccttcttcacagagcgggagcagaccctgcaggtgctgcggcggctcttccctgtggaccggggcctgtttgaggacaaggtggccaacatctggtgcagcttcaacgtgttcctgaagatcaaggacatcctgcccaggcacatccagctgatcatgtccttctgcagcaccttcctgagcctgctgcctgcctgcatcaagctgatcctgcagcccagcagcaagggcttcaagttcaccctggtgtcctgtgccctgtccttcttcctgttctccttccaggtgcatgagaagagcatcctgctggtgtccctgcctgtgtgcctggtgctgtctgagatccccttcatgagcacctggttcctgctggtgtccaccttctccatgctgcccctgctgctgaaggatgagctgctgatgcccagcgtggtgaccaccatggccttcttcatcgcctgtgtgaccagcttcagcatctttgagaagaccagcgaggaggagctgcagctgaagagcttcagcatctctgtgaggaagtacctgccctgcttcaccttcctgagccgcatcatccagtacctgttcctgatcagcgtcatcaccatggtgctgctgaccctgatgacagtgaccctggaccccccccagaagctgcctgacctcttctctgtgctggtgtgctttgtgtcctgcctgaacttcctgttcttcctggtgtacttcaacatcatcatcatgtgggacagcaagtctggaagaaaccagaagaagatctcctag

SEQ ID NO: 144168 - DNA, 765 bp, synthetic construct
  misc_feature 1..765: note = Description of Artificial Sequence: Synthetic coding sequence
  source 1..765: mol_type = other DNA
atggagctgtaccacgccctgcccttcttctgcttcctgctgggcaagtgcttcaagaagggcctgaagggcaaaggatttgtgctgctggtgaagctggcctgcatcgtggtggccagctttgtgctgtgctggctgcccttcttcacagagcgggagcagaccctgcaggtgctgcggcggctcttccctgtggaccggggcctgtttgaggacaaggtggccaacatctggtgcagcttcaacgtgttcctgaagatcaaggacatcctgcccaggcacatccagctgatcatgaggcctgtgtgcctggtgctgtctgagatccccttcatgagcacctggttcctgctggtgtccaccttctccatgctgcccctgctgctgaaggatgagctgctgatgcccagcgtggtgaccaccatggccttcttcatcgcctgtgtgaccagcttcagcatctttgagaagaccagcgaggaggagctgcagctgaagagcttcagcatctctgtgaggaagtacctgccctgcttcaccttcctgagccgcatcatccagtacctgttcctgatcagcgtcatcaccatggtgctgctgaccctgatgacagtgaccctggaccccccccagaagctgcctgacctcttctctgtgctggtgtgctttgtgtcctgcctgaacttcctgttcttcctggtgtacttcaacatcatcatcatgtgggacagcaagagcggcaggaaccagaagaagatctcctag

SEQ ID NO: 144169 - DNA, 1581 bp, synthetic construct
  misc_feature 1..1581: note = Description of Artificial Sequence: Synthetic coding sequence
  source 1..1581: mol_type = other DNA
atggccgccctgaccatcgccaccggcaccggcaactggttcagcgccctggccctgggcgtgaccctgctgaagtgcctgctgatccccacctaccacagcacagactttgaggtgcacaggaactggctggccatcacccacagcctgcccatcagccagtggtactatgaggccaccagcgagtggaccctggactacccacccttctttgcctggtttgagtacatcctgagccacgtggccaagtactttgaccaggagatgctgaatgtgcacaacctgaactacagcagcagcaggaccctgctcttccagcgcttcagcgtcatcttcatggatgtgctgtttgtgtatgctgtgcgggagtgctgcaagtgcattgatggcaagaaggtgggcaaggagctgacagagaagcccaagttcatcctgtctgtgctgctgctgtggaactttggcctgctgattgtggaccacatccacttccagtacaacggcttcctgtttggcctgatgctgctgagcatcgcccggctcttccagaagaggcacatggagggcgccttcctgtttgctgtgctgctgcacttcaagcacatctacctgtatgtggccccagcctatggagtgtacctgctgcggagctactgcttcaccgccaacaagccagatggcagcatccgctggaagagcttctcctttgtgcgggtcatcagcctgggcctggtggtgttcctggtgtctgccctgagcctgggccccttcctggccctgaaccagctgccccaggtgttcagccgcctcttccccttcaagaggggcctgtgccacgcctactgggcccccaacttctgggccctgtacaatgccctggacaaggtgctgtctgtgattggcctgaagctgaagttcctggaccccaacaacatccccaaggcctccatgaccagcggcctggtgcagcagttccagcacacagtgctgcccagcgtgacccccctggccaccctcatctgcaccctgattgccatcctgcccagcatcttctgcctgtggttcaagccccagggcccccggggcttcctgcgctgcctgaccctgtgtgccctgagcagcttcatgtttggctggcacgtgcatgagaaggccatcctgctggccatcctgcccatgagcctgctgtctgtgggcaaggctggagatgccagcatcttcctgatcctgaccaccaccggccactacagcctcttccccctgctcttcaccgcccctgagctgcccatcaagatcctgctgatgctgctcttcaccatctacagcatcagcagcctgaagaccctcttcaggaaggagaagcccctcttcaactggatggagaccttctacctgctgggcctgggccccctggaggtgtgctgtgaatttgtgttccccttcacctcctggaaggtgaagtaccccttcatccccctgctgctgacctctgtgtactgtgctgtgggcatcacctacgcctggttcaagctgtatgtgtctgtgctgattgacagcgccatcggcaagaccaagaagcagtag

SEQ ID NO: 144170 - DNA, 1404 bp, synthetic construct
  misc_feature 1..1404: note = Description of Artificial Sequence: Synthetic coding sequence
  source 1..1404: mol_type = other DNA
atggccgccctgaccatcgccaccggcaccggcaactggttcagcgccctggccctgggcgtgaccctgctgaagtgcctgctgatccccacctaccacagcacagactttgaggtgcacaggaactggctggccatcacccacagcctgcccatcagccagtggtactatgaggccaccagcgagtggaccctggactacccacccttctttgcctggtttgagtacatcctgagccacgtggccaagtactttgaccaggagatgctgaatgtgcacaacctgaactacagcagcagcaggaccctgctcttccagcgcttcagcgtcatcttcatggatgtgctgtttgtgtatgctgtgcgggagtgctgcaagtgcattgatggcaagaaggtgggcaaggagctgacagagaagcccaagttcatcctgtctgtgctgctgctgtggaactttggcctgctgattgtggaccacatccacttccagtacaacggcttcctgtttggcctgatgctgctgagcatcgcccggctcttccagaagaggcacatggagggcgccttcctgtttgctgtgctgctgcacttcaagcacatctacctgtatgtggccccagcctatggagtgtacctgctgcggagctactgcttcaccgccaacaagccagatggcagcatccgctggaagagcttctcctttgtgcgggtcatcagcctgggcctggtggtgttcctggtgtctgccctgagcctgggccccttcctggccctgaaccagctgccccaggtgttcagccgcctcttccccttcaagaggggcctgtgccacgcctactgggcccccaacttctgggccctgtacaatgccctggacaaggtgctgtctgtgattggcctgaagctgaagttcctggaccccaacaacatccccaaggcctccatgaccagcggcctggtgcagcagttccagcacacagtgctgcccagcgtgacccccctggccaccctcatctgcaccctgattgccatcctgcccagcatcttctgcctgtggttcaagccccagggcccccggggcttcctgcgctgcctgaccctgtgtgccctgagcagcttcatgtttggctggcacgtgcatgagaaggccatcctgctggccatcctgcccatgagcctgctgtctgtgggcaaggctggagatgccagcatcttcctgatcctgaccaccaccggccactacagcctcttccccctgctcttcaccgcccctgagctgcccatcaagatcctgctgatgctgctcttcaccatctacagcatcagcagcctgaagaccctcttccgccgctccttcaccctggtggcccaggccggcgtgcagtggcatgacctgtcctag

SEQ ID NO: 144171 - DNA, 1323 bp, synthetic construct
  misc_feature 1..1323: note = Description of Artificial Sequence: Synthetic coding sequence
  source 1..1323: mol_type = other DNA
atgatgctggccttcctggtgctgagcacaggcatgttctgcagcagcagcgccttcctgcccagcagcttctgcatgtacaccaccctgattgccatgacaggctggtacatggacaagaccagcattgctgtgctgggcgtggccgccggggccatcctgggctggcccttctctgctgccctgggcctgcccatcgcctttgacctgctggtgatgaagcaccgctggaagagcttcttccactggagcctgatggccctgatcctcttcctggtgcctgtggtggtgattgacagctactactacggcaagctggtgattgcccccctgaacatcgtgctgtacaacgtgttcaccccccacggccctgacctgtatggaacagagccctggtacttctacctgatcaatggcttcctgaacttcaacgtggcctttgccctggccctgctggtgctgcccctgaccagcctgatggagtacctgctgcagcgcttccacgtgcagaacctgggccacccctactggctgaccctggcccccatgtacatctggttcatcatcttcttcatccagccccacaaggaggagcgcttcctgtttcctgtgtaccccctcatctgcctgtgtggggctgtggccctgagcgccctgcagaagtgctaccactttgtgttccagcgctaccgcctggagcactacacagtgaccagcaactggctggccctgggcaccgtcttcctgtttggcctgctgtccttcagccgctctgtggccctcttccggggctaccacggccccctggacctgtacccagagttctaccgcatcgccacagaccccaccatccacacagtgcctgagggccggcctgtgaatgtgtgtgtgggcaaggagtggtaccgcttccccagcagcttcctgctgcctgacaactggcagctgcagttcatccccagcgagttccggggccagctgcccaagccctttgctgagggccccctggccacccgcatcgtgcccacagacatgaatgaccagaacctggaggagcccagccgctacatcgacatcagcaagtgccactacctggtggacctggacaccatgagggagaccccccgggagcccaagtacagcagcaacaaggaggagtggatcagcctggcctaccggcccttcctggatgccagccgcagcagcaagctgctgcgggccttctacgtgcccttcctgagtgaccagtacacagtgtatgtgaactacaccatcctgaagcccaggaaggccaagcagatcaggaagaagagcggcggctag

SEQ ID NO: 144172 - DNA, 2535 bp, synthetic construct
  misc_feature 1..2535: note = Description of Artificial Sequence: Synthetic coding sequence
  source 1..2535: mol_type = other DNA
atggccccccggcggctgctgctggtgggggagggcaacttctcctttgctgctgccctgtctgagaccctggaccagagcacccagctgacagccacctgcctgcagaggcctgctgagctggcccgggaccccctggcctgggagaacctgcagtgcctgcgggagcggggcattgatgtgcgctttggagtggactgcacccagctggctgatgtgtttgagctgcacgagcgggagtttgaccagatctacttcatcttcccccactgcggcaggaaggccggcgtggccaagaaccgggagctgctggccaagttcttccagagctgtgctgatgtgctggccgaggagggggaggtgcacgtggccctgtgccggggccagggcggcaccccagctgacaagccccagcgggagtggcacaacagctggcaggtggtggccatggccgccctgggcggcctcatcctgagtgatgtgtaccccttcagctgcaaggctgtggccggctacaagtgcaccggctaccgcagccaggacaagagcttccacgtggagggcgccctgaaccacatcttcaccaggagcctgccctttgagggcagccagccccgcatcttccgcatcaagctgggcaaccagtggttctccttccctgagcctgaggccctggtgggcaagctgaaccggctggccatggccagcagaggagcccggcagaggctgaagggcagcggggccagcagcggggacacagccccagctgctgacaagctgcgggagctgctgggcagccgggaggccggcggcgctgagcacaggacagagctgagcggcaacaaggccggccaggtgtgggcccctgagggcagcacagccttcaagtgcctgctgagcgcccggctgtgtgccgccctgctgagcaacatcagtgactgtgatgagaccttcaactactgggagcccacccactacctgatctatggagagggcttccagacctgggagtacagccctgcctatgccatccgctcctatgcctacctgctgctgcacgcctggccagctgccttccacgcccgcatcctgcagaccaacaagatcctggtgttctacttcctgcgctgcctgctggcctttgtgtcctgcatctgtgagctgtacttctacaaggctgtgtgcaagaagtttggcctgcacgtgtccaggatgatgctggccttcctggtgctgagcacaggcatgttctgcagcagcagcgccttcctgcccagcagcttctgcatgtacaccaccctgattgccatgacaggctggtacatggacaagaccagcattgctgtgctgggcgtggccgccggggccatcctgggctggcccttctctgctgccctgggcctgcccatcgcctttgacctgctggtgatgaagcaccgctggaagagcttcttccactggagcctgatggccctgatcctcttcctggtgcctgtggtggtgattgacagctactactacggcaagctggtgattgcccccctgaacatcgtgctgtacaacgtgttcaccccccacggccctgacctgtatggaacagagccctggtacttctacctgatcaatggcttcctgaacttcaacgtggcctttgccctggccctgctggtgctgcccctgaccagcctgatggagtacctgctgcagcgcttccacgtgcagaacctgggccacccctactggctgaccctggcccccatgtacatctggttcatcatcttcttcatccagccccacaaggaggagcgcttcctgtttcctgtgtaccccctcatctgcctgtgtggggctgtggccctgagcgccctgcagaagtgctaccactttgtgttccagcgctaccgcctggagcactacacagtgaccagcaactggctggccctgggcaccgtcttcctgtttggcctgctgtccttcagccgctctgtggccctcttccggggctaccacggccccctggacctgtacccagagttctaccgcatcgccacagaccccaccatccacacagtgcctgagggccggcctgtgaatgtgtgtgtgggcaaggagtggtaccgcttccccagcagcttcctgctgcctgacaactggcagctgcagttcatccccagcgagttccggggccagctgcccaagccctttgctgagggccccctggccacccgcatcgtgcccacagacatgaatgaccagaacctggaggagcccagccgctacatcgacatcagcaagtgccactacctggtggacctggacaccatgagggagaccccccgggagcccaagtacagcagcaacaaggaggagtggatcagcctggcctaccggcccttcctggatgccagccgcagcagcaagctgctgcgggccttctacgtgcccttcctgagtgaccagtacacagtgtatgtgaactacaccatcctgaagcccaggaaggccaagcagatcaggaagaagagcggcggctag

SEQ ID NO: 144173 - DNA, 1344 bp, synthetic construct
  misc_feature 1..1344: note = Description of Artificial Sequence: Synthetic coding sequence
  source 1..1344: mol_type = other DNA
atgatgctggccttcctggtgctgagcacaggcatgttctgcagcagcagcgccttcctgcccagcagcttctgcatgtacaccaccctgattgccatgacaggctggtacatggacaagaccagcattgctgtgctgggcgtggccgccggggccatcctgggctggcccttctctgctgccctgggcctgcccatcgcctttgacctgctggtgatgaagcaccgctggaagagcttcttccactggagcctgatggccctgatcctcttcctggtgcctgtggtggtgattgacagctactactacggcaagctggtgattgcccccctgaacatcgtgctgtacaacgtgttcaccccccacggccctgacctgtatggaacagagccctggtacttctacctgatcaatggcttcctgaacttcaacgtggcctttgccctggccctgctggtgctgcccctgaccagcctgatggagtacctgctgcagcgcttccacgtgcagaacctgggccacccctactggctgaccctggcccccatgtacatctggttcatcatcttcttcatccagccccacaaggaggagcgcttcctgtttcctgtgtaccccctcatctgcctgtgtggggctgtggccctgagcgccctgcagcacagcttcctgtacttccagaagtgctaccactttgtgttccagcgctaccgcctggagcactacacagtgaccagcaactggctggccctgggcaccgtcttcctgtttggcctgctgtccttcagccgctctgtggccctcttccggggctaccacggccccctggacctgtacccagagttctacagaattgccacagaccccaccatccacacagtgcctgagggccggcctgtgaatgtgtgtgtgggcaaggagtggtaccgcttccccagcagcttcctgctgcctgacaactggcagctgcagttcatccccagcgagttccggggccagctgcccaagccctttgctgagggccccctggccaccagaattgtgcccacagacatgaatgaccagaacctggaggagcccagccgctacatcgacatcagcaagtgccactacctggtggacctggacaccatgagggagaccccccgggagcccaagtacagcagcaacaaggaggagtggatcagcctggcctaccggcccttcctggatgccagccgcagcagcaagctgctgcgggccttctacgtgcccttcctgagtgaccagtacacagtgtatgtgaactacaccatcctgaagcccaggaaggccaagcagatcaggaagaagagcggcggctag

SEQ ID NO: 144174 - DNA, 1647 bp, synthetic construct
  misc_feature 1..1647: note = Description of Artificial Sequence: Synthetic coding sequence
  source 1..1647: mol_type = other DNA
atggtgctggccgagctgtatgtgtctgaccgggagggcagtgatgccactggagatggcaccaaggagaagcccttcaagacaggcctgaaggccctgatgacagtgggcaaggagcccttccccaccatctacgtggacagccagaaggaaaatgaacgctggaatgtcatcagcaagagccagctgaagaacatcaagaagatgtggcaccgggagcagatgaagtctgagagccgggagaagaaggaggccgaggacagcctgcggcgggagaagaacctggaggaggccaagaagatcaccatcaagaatgaccccagcctgcctgagcccaagtgtgtgaagattggagccctggagggctaccggggccagagggtgaaggtgtttggctgggtgcaccggctgcggcggcagggcaagaacctgatgttcctggtgctgagagatggcaccggctacctgcagtgtgtgctggctgatgagctgtgccagtgctacaatggagtgctgctgagcacagagagctctgtggccgtgtatggcatgctgaacctgacccccaagggcaagcaggcccctgggggccacgagctgagctgtgacttctgggagctgattggcctggccccagctggaggagctgacaacctgatcaatgaggagagtgatgtggatgtgcagctgaacaacagacacatgatgatccggggggagaacatgagcaagatcctgaaggcccgctccatggtgacccgctgcttccgggaccacttctttgaccggggctactatgaggtgaccccacccaccctggtgcagacccaggtggagggcggggccaccctcttcaagctggactactttggagaggaggccttcctgacccagagcagccagctgtacctggagacctgcctgcctgccctgggagatgtgttctgcatcgcccagagctacagagctgagcagagcaggaccaggaggcacctggccgagtacacccacgtggaggctgaatgtcccttcctgacctttgatgacctgctgaaccggctggaggacctggtgtgtgatgtggtggaccgcatcctgaagagccctgctggcagcatcgtgcatgagctgaaccccaacttccagccccccaagaggcccttcaagaggatgaactacagtgatgccatcgtgtggctgaaggagcatgatgtgaagaaggaggatggcaccttctatgaatttggagaggacatccctgaggcccctgagcggctgatgacagacaccatcaatgagcccatcctgctgtgccgcttccctgtggagatcaagagcttctacatgcagcgctgcccagaggacagccggctgacagaatctgtggatgtgctgatgcccaacgtgggggagatcgtgggcggctccatgaggatctttgacagcgaggagatcctggccggctacaagcgggagggcatcgaccccaccccctactactggtacacagaccagaggaaatatggcacctgcccccatggaggctacggcctgggcctggagcgcttcctgacctggatcctgaaccgctaccacatcagagatgtgtgcctgtaccccaggtttgtgcagcgctgcaccccctag

SEQ ID NO: 144175 - DNA, 765 bp, synthetic construct
  misc_feature 1..765: note = Description of Artificial Sequence: Synthetic coding sequence
  source 1..765: mol_type = other DNA
atgacagtgggcaaggagcccttccccaccatctacgtggacagccagaaggaaaatgaacgctggaatgtcatcagcaagagccagctgaagaacatcaagaagatgtggcaccgggagcagatgaagtctgagagccgggagaagaaggaggccgaggacagcctgcggcgggagaagaacctggaggaggccaagaagatcaccatcaagaatgaccccagcctgcctgagcccaagtgtgtgaagatcggggccctggagggctaccggggccagagggtgaaggtgtttggctgggtgcaccggctgcggcggcagggcaagaacctgatgttcctggtgctgagagatggcaccggctacctgcagtgtgtgctggctgatgagctgtgccagtgctacaacggggtgctgctgagcacagagagctctgtggccgtgtatggcatgctgaacctgacccccaagggcaagcaggcccctgggggccacgagctgagctgtgacttctgggagctgattggcctggccccagctgggggcgctgacaacctgatcaatgaggagagtgatgtggatgtgcagctgaacaacagacacatgatgatcagaggagagaacatgagcaagatcctgaaggcccgctccatggtgacccgctgcttccgggaccacttctttgaccggggctactatgaggtgtccatgcacagcagcgcctttgccaagaacatgttctttgctgtgctgaagctggagtag

SEQ ID NO: 144176 - DNA, 900 bp, synthetic construct
  misc_feature 1..900: note = Description of Artificial Sequence: Synthetic coding sequence
  source 1..900: mol_type = other DNA
atgtgtgaggactggtgcttccgggaccacttctttgaccggggctactatgaggtgaccccacccaccctggtgcagacccaggtggagggcggggccaccctcttcaagctggactactttggagaggaggccttcctgacccagagcagccagctgtacctggagacctgcctgcctgccctgggagatgtgttctgcatcgcccagagctacagagctgagcagagcaggacccggcggcacctggccgagtacacccacgtggaggccgagtgccccttcctgacctttgatgacctgctgaaccggctggaggacctggtgtgtgatgtggtggaccgcatcctgaagagccctgctggcagcatcgtgcatgagctgaaccccaacttccagccccccaagaggcccttcaagaggatgaactacagtgatgccatcgtgtggctgaaggagcatgatgtgaagaaggaggatggcaccttctatgaatttggagaggacatccctgaggcccctgagcggctgatgacagacaccatcaatgagcccatcctgctgtgccgcttccctgtggagatcaagagcttctacatgcagcgctgcccagaggacagccggctgacagagagcgtggatgtgctgatgcccaacgtgggggagatcgtgggcggctccatgaggatctttgattctgaggagatcctggccggctacaagcgggagggcatcgaccccaccccctactactggtacacagaccagaggaaatatggcacctgcccccacggcggctacggcctgggcctggagcgcttcctgacctggatcctgaaccgctaccacatcagagatgtgtgcctgtaccccaggtttgtgcagcgctgcaccccctag

SEQ ID NO: 144177 - DNA, 525 bp, synthetic construct
  misc_feature 1..525: note = Description of Artificial Sequence: Synthetic coding sequence
  source 1..525: mol_type = other DNA
atggtgctggccgagctgtatgtgtctgaccgggagggcagtgatgccactggagatggcaccaaggagaagcccttcaagacaggcctgaaggccctgatgacagtgggcaaggagcccttccccaccatctacgtggacagccagaaggaaaatgaacgctggaatgtcatcagcaagagccagctgaagaacatcaagaagatgtggcaccgggagcagatgaagtctgagagccgggagaagaaggaggccgaggacagcctgcggcgggagaagaacctggaggaggccaagaagatcaccatcaagaatgaccccagcctgcctgagcccaagtgtgtgaagattggagccctggagggctaccggggccagagggtgaaggtgtttggctgggtgcaccggctgcggcggcaggtgtctgtgctgcagtggagcagcctggtgcatggagagcagtgctgcagcgtgtggaatgccaagagctaccccaagggccaggccggcagccgctggccctag

SEQ ID NO: 144178 - DNA, 1434 bp, synthetic construct
  misc_feature 1..1434: note = Description of Artificial Sequence: Synthetic coding sequence
  source 1..1434: mol_type = other DNA
atgctgggcgtgcgctgcctgctgcggtctgtgcgcttctgcagcagcgcccccttccccaagcacaagcccagcgccaagctgtctgtgagagatgccctgggcgcccagaatgccagcggggagcgcatcaagatccagggctggatccgctctgtgcgcagccagaaggaggtgctcttcctgcacgtgaatgatggcagcagcctggagagcctgcaggtggtggccgacagcggcctggacagccgggagctgaactttggcagctctgtggaggtgcagggccagctgatcaagagccccagcaagaggcagaatgtggagctgaaggccgagaagatcaaggtgattggcaactgtgatgccaaggacttccccatcaagtacaaggagcggcaccccctggagtacctgcggcagtacccccacttccgctgcaggaccaacgtgctgggcagcatcctgcgcatccgctctgaggccacagctgccatccacagcttcttcaaggacagcggctttgtgcacatccacacccccatcatcaccagcaatgacagcgagggcgctggggagctgttccagctggagcccagcggcaagctgaaggtgcctgaggagaacttcttcaacgtgcctgccttcctgactgtgtctggccagctgcacctggaggtgatgtctggggccttcacccaggtgttcaccttcggccccaccttccgggcagagaacagccagagccgccgccacctggccgagttctacatgattgaagctgagatcagctttgtggacagcctgcaggacctgatgcaggtgattgaggagctgttcaaggccaccaccatgatggtgctgagcaagtgcccagaagatgtggagctgtgccacaagttcatcgcccctggccagaaggaccggctggagcacatgctgaagaacaacttcctgatcatctcctacacagaggccgtggagatcctgaagcaggccagccagaacttcaccttcaccccagagtggggcgctgacctgaggacagaacatgagaagtacctggtgaagcactgcggcaacatccctgtgtttgtgatcaactaccccctgaccctgaagcccttctacatgagggacaatgaagatggcccccagcacacagtggccgctgtggacctgctggtgcctggggtgggggagctgtttggaggcggcctgcgggaggagcgctaccacttcctggaggagcggctggcccggagcggcctgacagaggtgtaccagtggtacctggacctgcggagatttggatctgtgccccacggcggcttcggcatgggctttgagcgctacctgcagtgcatcctgggcgtggacaacatcaaggatgtgatccccttcccccgcttcccccacagctgcctgctgtag

SEQ ID NO: 144179 - DNA, 942 bp, synthetic construct
  misc_feature 1..942: note = Description of Artificial Sequence: Synthetic coding sequence
  source 1..942: mol_type = other DNA
atggcccagaggaagaatgccaagagcagcggcaacagcagcagcagcggcagcggcagcggcagcaccagcgctggcagcagcagccctggggcccggcgggagaccaagcacggcggccacaagaatggaaggaagggcggcctgagcggcaccagcttcttcacctggttcatggtgattgccctgctgggcgtgtggacctctgtggccgtggtgtggtttgacctggtggactatgaggaggtgctgggcaagctgggcatctatgatgctgatggagatggagactttgatgtggatgatgccaaggtgctgctgggcctgaaggagaggagcaccagcgagcctgctgtgcccccagaggaggccgagccccacacagagcctgaggagcaggtgcctgtggaggccgagccccagaacattgaagatgaggccaaggagcagatccagagcctgctgcacgagatggtgcatgctgagcacgtggagggggaggacctgcagcaggaggatggccccaccggggagccccagcaggaggatgatgagttcctgatggccacagatgtggatgacagatttgagaccctggagcctgaggtgtcccatgaggagacagagcacagctaccacgtggaggagaccgtgtcccaggactgcaaccaggacatggaggagatgatgtctgagcaggagaacccagacagcagcgagcctgtggtggaggatgagcggctgcaccacgacacagatgatgtgacctaccaggtgtatgaggagcaggccgtgtatgagcccctggagaatgaaggcatcgagatcacagaggtgacagcccctcctgaggacaaccctgtggaggacagccaggtgattgtggaggaggtgtccatcttccctgtggaggagcagcaggaggtgcccccagacacctag

SEQ ID NO: 144180 - DNA, 612 bp, synthetic construct
  misc_feature 1..612: note = Description of Artificial Sequence: Synthetic coding sequence
  source 1..612: mol_type = other DNA
atggcccagaggaagaatgccaagagcagcggcaacagcagcagcagcggcagcggcagcggcagcaccagcgctggcagcagcagccctggggcccggcgggagaccaagcacggcggccacaagaatggaaggaagggcggcctgagcggcaccagcttcttcacctggttcatggtgattgccctgctgggcgtgtggacctctgtggccgtggtgtggtttgacctggtggactatgaggaggtgctggccaaggccaaggacttccgctacaacctgtctgaggtgctgcagggcaagctgggcatctatgatgctgatggagatggagactttgatgtggatgatgccaaggtgctgctgggcctgaccaaggatggcagcaatgaaaatattgacagcctggaggaggtgctgaacatcctggccgaggagagcagtgactggttctacggcttcctgtccttcctgtatgacatcatgaccccatttgagatgctggaggaggaggaggaggagagcgagacagcagatggagtggatggcaccagccagaatgaaggagtgcagggcaagacctgtgtgatcctggacctgcacaaccagtag

SEQ ID NO: 144181 - DNA, 2277 bp, synthetic construct
  misc_feature 1..2277: note = Description of Artificial Sequence: Synthetic coding sequence
  source 1..2277: mol_type = other DNA
atggcccagaggaagaatgccaagagcagcggcaacagcagcagcagcggcagcggcagcggcagcaccagcgctggcagcagcagccctggggcccggcgggagaccaagcacggcggccacaagaatggaaggaagggcggcctgagcggcaccagcttcttcacctggttcatggtgattgccctgctgggcgtgtggacctctgtggccgtggtgtggtttgacctggtggactatgaggaggtgctgggcaagctgggcatctatgatgctgatggagatggagactttgatgtggatgatgccaaggtgctgctgggcctgaaggagaggagcaccagcgagcctgctgtgcccccagaggaggccgagccccacacagagcctgaggagcaggtgcctgtggaggccgagccccagaacattgaagatgaggccaaggagcagatccagagcctgctgcacgagatggtgcatgctgagcacgtggagggggaggacctgcagcaggaggatggccccaccggggagccccagcaggaggatgatgagttcctgatggccacagatgtggatgacagatttgagaccctggagcctgaggtgtcccatgaggagacagagcacagctaccacgtggaggagaccgtgtcccaggactgcaaccaggacatggaggagatgatgtctgagcaggagaacccagacagcagcgagcctgtggtggaggatgagcggctgcaccacgacacagatgatgtgacctaccaggtgtatgaggagcaggccgtgtatgagcccctggagaatgaaggcatcgagatcacagaggtgacagcccctcctgaggacaaccctgtggaggacagccaggtgattgtggaggaggtgtccatcttccctgtggaggagcagcaggaggtgcccccagagaccaacaggaagacagatgatcctgagcagaaggccaaggtgaagaagaagaagcccaagctgctgaacaagtttgacaagaccatcaaggccgagctggatgctgctgagaagctgaggaagaggggcaagattgaggaggccgtgaatgccttcaaggagctggtgaggaagtacccccagagcccccgggcccgctatggcaaggcccagtgtgaagatgacctggccgagaagaggaggagcaatgaggtgctgcggggggccatcgagacctaccaggaggtggccagcctgcctgatgtgcctgctgacctgctgaagctgagcctgaagagaagaagtgaccggcagcagttcctgggccacatgaggggcagcctgctgaccctgcagaggctggtgcagctgttccccaatgacaccagcctgaagaatgacctgggcgtgggctacctgctgattggagacaatgacaatgccaagaaggtgtatgaggaggtgctgtctgtgaccccaaatgatggctttgccaaggtgcactacggcttcatcctgaaggcccagaacaagattgctgagagcatcccctacctgaaggagggcattgaaagtggggaccccggcacagatgatggccgcttctacttccacctgggagatgccatgcagagggtgggcaacaaggaggcctacaagtggtatgagctgggccacaagaggggccactttgcctctgtgtggcagaggagcctgtacaacgtgaatggcctgaaggcccagccctggtggacccccaaggagaccggctacacagagctggtgaagagcctggagaggaactggaagctgatcagagatgagggcctggccgtgatggacaaggccaagggcctcttcctgcctgaagatgagaacctgcgggagaagggggactggagccagttcaccctgtggcagcagggcagaagaaatgaaaatgcctgcaagggggcccccaagacctgcaccctgctggagaagtttcctgagaccaccggctgcagaagaggccagatcaagtacagcatcatgcaccctggcacccacgtgtggccccacacaggccccaccaactgccgcctgaggatgcacctgggcctggtgatccccaaggagggctgcaagatccgctgtgccaatgagaccaagacctgggaggagggcaaggtgctgatctttgatgacagctttgaacatgaggtgtggcaggatgccagcagcttccgcctcatcttcatcgtggatgtgtggcaccctgagctgaccccccagcagaggaggagcctgcctgccatctag

SEQ ID NO: 144182 - DNA, 678 bp, synthetic construct
  misc_feature 1..678: note = Description of Artificial Sequence: Synthetic coding sequence
  source 1..678: mol_type = other DNA
atggccgaggacaaggagaccaagcatggaggccacaagaatggaagaaaaggaggcctgagcggcaccagcttcttcacctggttcatggtgattgccctgctgggcgtgtggacctctgtggccgtggtgtggtttgacctggtggactatgaggaggtgctggccaaggccaaggacttccgctacaacctgtctgaggtgctgcagggcaagctgggcatctatgatgctgatggagatggagactttgatgtggatgatgccaaggtgctgctggagggccccagcggcgtggccaagaggaagaccaaggccaaggtgaaggagctgaccaaggaggagctgaagaaggagaaggagaagccagagagcaggaaggagagcaagaatgaggagaggaagaagggcaagaaggaggatgtgaggaaggacaagaagattgctgatgctgacctgagcaggaaggagagccccaagggcaagaaggaccgggagaaggagaaggtggacctggagaagagcgccaagaccaaggagaacaggaagaagagcaccaacatgaaggatgtgagcagcaagatggccagccgggacaaggatgacaggaaggagagccgcagcagcaccaggtatgcccacctgaccaagggcaacacccagaagagaaatggatag

SEQ ID NO: 144183 - DNA, 1290 bp, synthetic construct
  misc_feature 1..1290: note = Description of Artificial Sequence: Synthetic coding sequence
  source 1..1290: mol_type = other DNA
atggcccagaggaagaatgccaagagcagcggcaacagcagcagcagcggcagcggcagcggcagcaccagcgctggcagcagcagccctggggcccggcgggagaccaagcacggcggccacaagaatggaaggaagggcggcctgagcggcaccagcttcttcacctggttcatggtgattgccctgctgggcgtgtggacctctgtggccgtggtgtggtttgacctggtggactatgaggaggtgctgggcaagctgggcatctatgatgctgatggagatggagactttgatgtggatgatgccaaggtgctgctgggcctgaaggagaggagcaccagcgagcctgctgtgcccccagaggaggccgagccccacacagagcctgaggagcaggtgcctgtggaggccgagccccagaacattgaagatgaggccaaggagcagatccagagcctgctgcacgagatggtgcatgctgagcacgtggagggggaggacctgcagcaggaggatggccccaccggggagccccagcaggaggatgatgagttcctgatggccacagatgtggatgacagatttgagaccctggagcctgaggtgtcccatgaggagacagagcacagctaccacgtggaggagacagacagcagcgagcctgtggtggaggatgagcggctgcaccacgacacagatgatgtgacctaccaggtgtatgaggagcaggccgtgtatgagcccctggagaatgaaggaattgagatcacagaggtgacagcccccccagaggacaaccctgtggaggacagccaggtgattgtggaggaggtgtccatcttccctgtggaggagcagcaggaggtgcccccagagaccaacaggaagacagatgatcctgagcagaaggccaaggtgaagaagaagaagcccaagctgctgaacaagtttgacaagaccatcaaggccgagctggatgctgctgagaagctgaggaagaggggcaagattgaggaggccgtgaatgccttcaaggagctggtgaggaagtacccccagagcccccgggcccgctatggcaaggcccagtgtgaagatgacctggccgagaagagaagaagcaatgaggtgctgcggggggccatcgagacctaccaggaggtggccagcctgcctgatgtgcctgctgacctgctgaagctgagcctgaagagaagaagtgaccggcagcagttcctgggccacatgaggggcagcctgctgaccctgcagaggctggtgcagtag

SEQ ID NO: 144184 - DNA, 900 bp, synthetic construct
  misc_feature 1..900: note = Description of Artificial Sequence: Synthetic coding sequence
  source 1..900: mol_type = other DNA
atggccgaggacaaggagaccaagcatggaggccacaagaatggaagaaaaggaggcctgagcggcaccagcttcttcacctggttcatggtgattgccctgctgggcgtgtggacctctgtggccgtggtgtggtttgacctggtggactatgaggaggtgctggccaaggccaaggacttccgctacaacctgtctgaggtgctgcagggcaagctgggcatctatgatgctgatggagatggagactttgatgtggatgatgccaaggtgctgctgggcctgaaggagaggagcaccagcgagcctgctgtgcccccagaggaggccgagccccacacagagcctgaggagcaggtgcctgtggaggccgagccccagaacattgaagatgaggccaaggagcagatccagagcctgctgcacgagatggtgcatgctgagcacgtggagggggaggacctgcagcaggaggatggccccaccggggagccccagcaggaggatgatgagttcctgatggccacagatgtggatgacagatttgagaccctggagcctgaggtgtcccatgaggagacagagcacagctaccacgtggaggagaccgtgtcccaggactgcaaccaggacatggaggagatgatgtctgagcaggagaacccagacagcagcgagcctgtggtggaggatgagcggctgcaccacgacacagatgatgtgacctaccaggtgtatgaggagcaggccgtgtatgagcccctggagaatgaaggcatcgagatcacagaggtgacagcccctcctgaggacaaccctgtggaggacagccaggtgattgtggaggaggtgtccatcttccctgtggaggagcagcaggaggtgcccccagacacctag

SEQ ID NO: 144185 - DNA, 900 bp, synthetic construct; identical to SEQ ID NO: 144184
  misc_feature 1..900: note = Description of Artificial Sequence: Synthetic coding sequence
  source 1..900: mol_type = other DNA

SEQ ID NO: 144186 - DNA, 897 bp, synthetic construct
  misc_feature 1..897: note = Description of Artificial Sequence: Synthetic coding sequence
  source 1..897: mol_type = other DNA
atggccgaggacaaggagaccaagcatggaggccacaagaatggaagaaaaggaggcctgagcggcaccagcttcttcacctggttcatggtgattgccctgctgggcgtgtggacctctgtggccgtggtgtggtttgacctggtggactatgaggaggtgctggccaaggccaaggacttccgctacaacctgtctgaggtgctgcagggcaagctgggcatctatgatgctgatggagatggagactttgatgtggatgatgccaaggtgctgctgggcctgaaggagaggagcaccagcgagcctgctgtgcccccagaggaggccgagccccacacagagcctgaggagcaggtgcctgtggaggccgagccccagaacattgaagatgaggccaaggagcagatccagagcctgctgcacgagatggtgcatgctgagcacgtggagggggaggacctgcagcaggaggatggccccaccggggagccccagcaggaggatgatgagttcctgatggccacagatgtggatgacagatttgagaccctggagcctgaggtgtcccatgaggagacagagcacagctaccacgtggaggagaccgtgtcccaggactgcaaccaggacatggaggagatgatgtctgagcaggagaacccagacagcagcgagcctgtggtggaggatgagcggctgcaccacgacacagatgatgtgacctaccaggtgtatgaggagcaggtgtatgagcccctggagaatgaaggaattgagatcacagaggtgacagcccccccagaggacaaccctgtggaggacagccaggtgattgtggaggaggtgtccatcttccctgtggaggagcagcaggaggtgcccccagacacctag

SEQ ID NO: 144187 - DNA, 813 bp, synthetic construct
  misc_feature 1..813: note = Description of Artificial Sequence: Synthetic coding sequence
  source 1..813: mol_type = other DNA
atggcccagaggaagaatgccaagagcagcggcaacagcagcagcagcggcagcggcagcggcagcaccagcgctggcagcagcagccctggggcccggcgggagaccaagcacggcggccacaagaatggaaggaagggcggcctgagcggcaccagcttcttcacctggttcatggtgattgccctgctgggcgtgtggacctctgtggccgtggtgtggtttgacctggtggactatgaggaggtgctgggcaagctgggcatctatgatgctgatggagatggagactttgatgtggatgatgccaaggtgctgctgggcctgaaggagaggagcaccagcgagcctgctgtgcccccagaggaggccgagccccacacagagcctgaggagcaggtgcctgtggaggccgagccccagaacattgaagatgaggccaaggagcagatccagagcctgctgcacgagatggtgcatgctgagcatgaaacagagcacagctaccacgtggaggagaccgtgtcccaggactgcaaccaggacatggaggagatgatgtctgagcaggagaacccagacagcagcgagcctgtggtggaggatgagcggctgcaccacgacacagatgatgtgacctaccaggtgtatgaggagcaggccgtgtatgagcccctggagaatgaaggaattgagatcacagaggtgacagcccccccagaggacaaccctgtggaggacagccaggtgattgtggaggaggtgtccatcttccctgtggaggagcagcaggaggtgcccccagacacctag

SEQ ID NO: 144188 - DNA, 633 bp, synthetic construct
  misc_feature 1..633: note = Description of Artificial Sequence: Synthetic coding sequence
  source 1..633: mol_type = other DNA
atggccgaggacaaggagaccaagcatggaggccacaagaatggaagaaaaggaggcctgagcggcaccagcttcttcacctggttcatggtgattgccctgctgggcgtgtggacctctgtggccgtggtgtggtttgacctggtggactatgaggaggtgctgggcaagctgggcatctatgatgctgatggagatggagactttgatgtggatgatgccaaggtgctgctggagggccccagcggcgtggccaagaggaagaccaaggccaaggtgaaggagctgaccaaggaggagctgaagaaggagaaggagaagccagagagcaggaaggagagcaagaatgaggagaggaagaagggcaagaaggaggatgtgaggaaggacaagaagattgctgatgctgacctgagcaggaaggagagccccaagggcaagaaggaccgggagaaggagaaggtggacctggagaagagcgccaagaccaaggaaaataggaagaagagcaccaacatgaaggatgtgagcagcaagatggccagccgggacaaggatgacaggaaggagagccgcagcagcaccaggtatgcccacctgaccaagggcaacacccagaagagaaatggatag

SEQ ID NO: 144189 - DNA, 771 bp, synthetic construct
  misc_feature 1..771: note = Description of Artificial Sequence: Synthetic coding sequence
  source 1..771: mol_type = other DNA
atggccgaggacaaggagaccaagcatggaggccacaagaatggaagaaaaggaggcctgagcggcaccagcttcttcacctggttcatggtgattgccctgctgggcgtgtggacctctgtggccgtggtgtggtttgacctggtggactatgaggaggtgctggccaaggccaaggacttccgctacaacctgtctgaggtgctgcagggcaagctgggcatctatgatgctgatggagatggagactttgatgtggatgatgccaaggtgctgctgggcctgaaggagaggagcaccagcgagcctgctgtgcccccagaggaggccgagccccacacagagcctgaggagcaggtgcctgtggaggccgagccccagaacattgaagatgaggccaaggagcagatccagagcctgctgcacgagatggtgcatgctgagcatgaaacagagcacagctaccacgtggaggagaccgtgtcccaggactgcaaccaggacatggaggagatgatgtctgagcaggagaacccagacagcagcgagcctgtggtggaggatgagcggctgcaccacgacacagatgatgtgacctaccaggtgtatgaggagcaggccgtgtatgagcccctggagaatgaaggaattgagatcacagaggtgacagcccccccagaggacaaccctgtggaggacagccaggtgattgtggaggaggtgtccatcttccctgtggaggagcagcaggaggtgcccccagacacctag

SEQ ID NO: 144190 - DNA, 2190 bp, synthetic construct
  misc_feature 1..2190: note = Description of Artificial Sequence: Synthetic coding sequence
  source 1..2190: mol_type = other DNA
atggccgaggacaaggagaccaagcatggaggccacaagaatggaagaaaaggaggcctgagcggcaccagcttcttcacctggttcatggtgattgccctgctgggcgtgtggacctctgtggccgtggtgtggtttgacctggtggactatgaggaggtgctgggcaagctgggcatctatgatgctgatggagatggagactttgatgtggatgatgccaaggtgctgctgggcctgaaggagaggagcaccagcgagcctgctgtgcccccagaggaggccgagccccacacagagcctgaggagcaggtgcctgtggaggccgagccccagaacattgaagatgaggccaaggagcagatccagagcctgctgcacgagatggtgcacgccgagcacgtggagggggaggacctgcagcaggaggatggccccactggagagccccagcaggaggatgatgagttcctgatggccacagatgtggatgacagatttgagaccctggagcctgaggtgtcccatgaggagacagagcacagctaccacgtggaggagaccgtgtcccaggactgcaaccaggacatggaggagatgatgtctgagcaggagaacccagacagcagcgagcctgtggtggaggatgagcggctgcaccacgacacagatgatgtgacctaccaggtgtatgaggagcaggccgtgtatgagcccctggagaatgaaggaattgagatcacagaggtgacagcccccccagaggacaaccctgtggaggacagccaggtgattgtggaggaggtgtccatcttccctgtggaggagcagcaggaggtgcccccagagaccaacaggaagacagatgatcctgagcagaaggccaaggtgaagaagaagaagcccaagctgctgaacaagtttgacaagaccatcaaggccgagctggatgctgctgagaagctgaggaagaggggcaagattgaggaggccgtgaatgccttcaaggagctggtgaggaagtacccccagagcccccgggcccgctatggcaaggcccagtgtgaagatgacctggccgagaagagaagaagcaatgaggtgctgcggggggccatcgagacctaccaggaggtggccagcctgcctgatgtgcctgctgacctgctgaagctgagcctgaagagaagaagtgaccggcagcagttcctgggccacatgaggggcagcctgctgaccctgcagaggctggtgcagctgttccccaatgacaccagcctgaagaatgacctgggcgtgggctacctgctgattggagacaatgacaatgccaagaaggtgtatgaggaggtgctgtctgtgaccccaaatgatggctttgccaaggtgcactacggcttcatcctgaaggcccagaacaagattgctgagagcatcccctacctgaaggagggcatcgagagcggggaccctggaacagatgatggccgcttctacttccacctgggagatgccatgcagagggtgggcaacaaggaggcctacaagtggtatgagctgggccacaagaggggccactttgcctctgtgtggcagaggagcctgtacaacgtgaatggcctgaaggcccagccctggtggacccccaaggagaccggctacacagagctggtgaagagcctggagaggaactggaagctgatcagagatgagggcctggccgtgatggacaaggccaagggcctcttcctgcctgaagatgagaacctgcgggagaagggggactggagccagttcaccctgtggcagcagggcagaagaaatgaaaatgcctgcaagggggcccccaagacctgcaccctgctggagaagtttcctgagaccaccggctgccggcggggccagatcaagtacagcatcatgcaccctggcacccacgtgtggccccacacaggccccaccaactgccgcctgaggatgcacctgggcctggtgatccccaaggagggctgcaagatccgctgtgccaatgagaccaagacctgggaggagggcaaggtgctgatctttgatgacagctttgagcacgaggtgtggcaggatgccagcagcttccgcctcatcttcatcgtggatgtgtggcaccctgagctgaccccccagcagaggaggagcctgcctgccatctag

SEQ ID NO: 144191 - DNA, 1032 bp, synthetic construct
  misc_feature 1..1032: note = Description of Artificial Sequence: Synthetic coding sequence
  source 1..1032: mol_type = other DNA
atgggcagccctggggccagcctgggcatcaagaaggccctgcagagcgagcaggccacagccctgcctgccagcgccccagctgtgtcccagcccacagccccagcccccagctgcctgcccaaggccggccaggtgatccccaccctgctgcgggaggcccccttcagcagcgtcatcgcccccaccctgctgtgtggcttcctgttcctggcctgggtggccgctgaggtgcctgaggagagcagcaggatggccggcagcggggcccggtctgaggagggccggcggcagcacgcctttgtgcctgagccctttgatggagccaacgtggtgcccaacctgtggctgcacagctttgaggtgatcaatgacctgaaccactgggaccacatcaccaagctgcgcttcctgaaggagagcctgcggggggaggccctgggcgtgtacaaccggctgagcccccaggaccagggcgactatggaacagtgaaggaggccctgctgaaggccttcggcgtgcctggagctgcccccagccacctgcccaaggagatcgtgtttgccaacagcatgggcaagggctactacctgaagggcaagattggcaaggtgcctgtgcgcttcctggtggacagcggggcccaggtgtctgtggtgcaccccaacctgtgggaggaggtgacagatggagacctggacaccctgcagccctttgaaaatgtggtgaaggtggccaatggagctgagatgaagatcctgggcgtgtgggacacagctgtgtccctgggcaagctgaagctgaaggcccagttcctggtggccaatgccagcgctgaggaggccatcatcggcacagatgtgctgcaggaccacaatgccatcctggactttgagcacaggacctgcaccctgaagggcaagaagttccggctgctgcctgtgggcggcagcctggaggatgaatttgacctggagctgattgaggaggaccccagcagcgaggagggccggcaggagctgagccactag

SEQ ID NO: 144192 - DNA, 960 bp, synthetic construct
  misc_feature 1..960: note = Description of Artificial Sequence: Synthetic coding sequence
  source 1..960: mol_type = other DNA
atgtgcagcctgcctgtgccccgggagcccctgcggcgggtggccgtgactggaggcacccatggaaatgagatgtctggagtgtacctggcccggcactggctgcacgccccagctgagctgcagagggccagcttctctgctgtgcctgtgctggccaacccagctgccaccagcggctgccgccgctacgtggaccatgacctgaacagaaccttcaccagcagcttcctgaacagccggcccaccccagatgacccctatgaggtgacccgggcccgggagctgaaccagctgctgggccccaaggccagcggccaggcctttgattttgtgctggacctgcacaacaccacagccaacatgggcacctgcctgattgccaagagcagccatgaggtgtttgccatgcacctgtgccgccacctgcagctgcagtacccagagctgagctgccaggtgttcctgtaccagaggtctggagaggagagctacaacctggacagcgtggccaagaatggcctgggcctggagctgggcccccagccccagggcgtgctgcgggctgacatcttcagcaggatgaggaccctggtggccaccgtgctggacttcatcgagctgttcaaccagggcacagccttccctgcctttgagatggaggcctacagacctgtgggcgtggtggacttccccaggacagaggccggccacctggccggcaccgtgcacccccagctgcaggaccgggacttccagcccctgcagcccggggcccccatcttccagatgttcagcggggaggacctgctgtatgaaggagagagcacagtgtaccctgtgttcatcaatgaggccgcctactatgaaaaaggagtggcctttgtgcagacagagaagttcaccttcaccgtgcctgccatgcctgccctgaccccagcccccagccctgccagctag

SEQ ID NO: 144193 - DNA, 1041 bp, synthetic construct
  misc_feature 1..1041: note = Description of Artificial Sequence: Synthetic coding sequence
  source 1..1041: mol_type = other DNA
atggccaggaagagcaacctgcctgtgctgctggtgcccttcctgctgtgccaggccctggtgcgctgcagcagccccctgcccctggtggtgaacacctggcccttcaagaatgccacagaggccgcctggagggccctggccagcggcggcagcgccctggatgctgtggagagcggctgtgccatgtgtgagcgggagcagtgtgatggctctgtgggctttggaggcagcccagatgagctgggggagaccaccctggatgccatgatcatggatggcaccaccatggatgtgggcgctgtgggggacctgcggcgcatcaagaatgccatcggcgtggccaggaaggtgctggagcacaccacccacaccctgctggtgggggagagcgccaccacctttgcccagagcatgggcttcatcaatgaagacctgagcaccacagccagccaggccctgcacagcgactggctggccaggaactgccagcccaactactggagaaatgtcatcccagaccccagcaagtactgcggcccctacaagcccccaggcatcctgaagcaggacatccccatccacaaggagacagaagatgaccggggccatgacaccatcggcatggtggtgatccacaagacaggccacatcgccgccggcaccagcaccaacggcatcaagttcaagatccacggccgggtgggggacagccccatccctggagctggggcctatgcagatgacacagctggagctgctgctgccactggaaatggagacatcctgatgaggttcctgcccagctaccaggccgtggagtacatgagaagaggagaggaccccaccatcgcctgccagaaggtgatcagccgcatccagaagcacttccctgagttctttggagctgtgatctgtgccaacgtgacaggcagctatggagctgcctgcaacaagctgagcaccttcacccagttctccttcatggtgtacaacagcgagaagaaccagcccacagaggagaaggtggactgcatctag

SEQ ID NO: 144194 - DNA, 573 bp, synthetic construct
  misc_feature 1..573: note = Description of Artificial Sequence: Synthetic coding sequence
  source 1..573: mol_type = other DNA
atggagagccagaggctggagctgatccggctgatggagacccaggaggaggatgtggtgctgctgacagctggggagcacaacaaggcctgcagcctgctgggcaagctgcggctggagtgtgccgacctgctggagacccggggcgtggtgctgcgggaccccaccctcttctccttcctgtgggtggtggacttccccctcttcctgcccaaggaggagaacccccgggagctggagagcgcccaccaccccttcaccgccccccaccccagcgacatccacctgctgtacacagagcccaagaaggaggatgtgaagatgctgagccacctgctgcaggccctggactatggagcccctcctcatggaggcatcgccctgggcctggacaggctcatctgcctggtgacaggcagccccagcatcagagatgtgattgccttccccaagagcttccggggccatgacctgatgagcaacaccccagattctgtgcccccagaggagctgaagccctaccacatccgggtgtccaagcccacagacagcaaggccgagcgggcccactag

SEQ ID NO: 144195 - DNA, 1938 bp, synthetic construct
  misc_feature 1..1938: note = Description of Artificial Sequence: Synthetic coding sequence
  source 1..1938: mol_type = other DNA
atgtacttccccagctggctgagccagctgtaccggggcctgagccggcccatccggaggaccacccagcccatctggggcagcctgtaccgcagcctgctgcagagcagccagaggcgcatccctgagttcagcagctttgtggtgaggaccaacacctgtggggagctgcggagcagccacctgggccaggaggtgaccctgtgtggctggatccagtaccgccggcagaacaccttcctggtgctgcgggactttgatggcctggtgcaggtgatcatcccccaggatgaatctgctgcctctgtgaagaagatcctgtgtgaggcccctgtggagagcgtggtgcaggtgtctggaacagtcatcagcaggcctgctggccaggagaaccccaagatgcccaccggggagattgagatcaaggtgaagacagctgagctgctgaatgcctgcaagaagctgccctttgagatcaagaactttgtgaagaagacagaggccctgcggctgcagtaccgctacctggacctgcggagcttccagatgcagtacaacctgcggctgcggagccagatggtgatgaagatgagggagtacctgtgcaacctgcacggctttgtggacatcgagacccccaccctcttcaagaggacccctgggggcgccaaggagttcctggtgcccagccgggagcccgggaagttctacagcctgccccagagcccccagcagttcaagcagctgctgatggtgggcggcctggaccgctacttccaggtggcccgctgctacagagatgagggcagcaggccagaccggcagcctgagttcacccagattgatattgagatgagctttgtggaccagacaggcatccagagcctgattgagggcctgctgcagtacagctggcccaatgacaaggaccctgtggtggtgcccttccccaccatgacctttgctgaggtgctggccacctacggcacagacaagccagacaccaggtttggcatgaagatcatcgacatcagtgatgtgttcaggaacacagaaattggcttcctgcaggatgccctgagcaagccccacggcaccgtgaaggccatctgcatccctgagggcgccaagtacctgaagaggaaggacatcgagagcatccggaactttgctgctgaccacttcaaccaggagatcctgcctgtgttcctgaatgccaacagaaactggaacagccctgtggccaacttcatcatggagagccagaggctggagctgatccggctgatggagacccaggaggaggatgtggtgctgctgacagctggggagcacaacaaggcctgcagcctgctgggcaagctgcggctggagtgtgccgacctgctggagacccggggcgtggtgctgcgggaccccaccctcttctccttcctgtgggtggtggacttccccctcttcctgcccaaggaggagaacccccgggagctggagagcgcccaccaccccttcaccgccccccaccccagcgacatccacctgctgtacacagagcccaagaaggcccggagccagcactatgacctggtgctgaatggaaatgagatcggcggcggcagcatccgcatccacaatgctgagctgcagcgctacatcctggccaccctgctgaaggaggatgtgaagatgctgagccacctgctgcaggccctggactatggagccccaccccacggcggcatcgccctgggcctggacaggctcatctgcctggtgacaggcagccccagcatcagagatgtgattgccttccccaagagcttccggggccatgacctgatgagcaacaccccagacagcgtgcccccagaggagctgaagccctaccacatccgggtgtccaagcccacagacagcaaggccgagcgggcccactag

SEQ ID NO: 144196 - DNA, 1143 bp, synthetic construct
  misc_feature 1..1143: note = Description of Artificial Sequence: Synthetic coding sequence
  source 1..1143: mol_type = other DNA
atgaaggagtatgtgctgctgctcttcctggccctgtgcagcgccaagcccttcttcagccccagccacatcgccctgaagaacatgatgctgaaggacatggaggacacagatgatgatgatgatgatgatgatgatgatgatgatgatgatgaggacaacagcctcttccccacccgggagcccaggagccacttcttcccctttgacctcttccccatgtgccccttcggctgccagtgctacagccgggtggtgcactgcagcgacctgggcctgacctctgtgcccaccaacatcccctttgacaccaggatgctggacctgcagaacaacaagatcaaggagatcaaggaaaatgacttcaagggcctgaccagcctgtatggcctcatcctgaacaacaacaagctgaccaagatccaccccaaggccttcctgaccaccaagaagctgcggcggctgtacctgagccacaaccagctgtctgagatccccctgaacctgcccaagagcctggccgagctgcgcatccacgagaacaaggtgaagaagatccagaaggacaccttcaagggcatgaatgccctgcacgtgctggagatgtctgccaaccccctggacaacaacggcatcgagcccggggcctttgaaggagtgacagtgttccacatcagaattgctgaggccaagctgacctctgtgcccaagggcctgccccccaccctgctggagctgcacctggactacaacaagatcagcacagtggagctggaggacttcaagcgctacaaggagctgcagaggctgggcctgggcaacaacaagatcacagacattgaaaatggcagcctggccaacatcccccgggtgcgggagatccacctggagaacaacaagctgaagaagatccccagcggcctgcctgagctgaagtacctgcagatcatcttcctgcacagcaacagcatcgcccgggtgggcgtgaatgacttctgccccaccgtgcccaagatgaagaagagcctgtacagcgccatcagcctcttcaacaaccctgtgaagtactgggagatgcagcctgccaccttccgctgtgtgctgagcaggatgtctgtgcagctgggcaactttggcatgtag

SEQ ID NO: 144197 - DNA, 732 bp, synthetic construct
  misc_feature 1..732: note = Description of Artificial Sequence: Synthetic coding sequence
  source 1..732: mol_type = other DNA
atgaaggagtatgtgctgctgctcttcctggccctgtgcagcgccaagcccttcttcagccccagccacatcgccctgaagaacatgatgctgaaggacatggaggacacagatgatgatgatgatgatgatgatgatgatgatgatgatgatgaggacaacagcctcttccccacccgggagcccaggagccacttcttcccctttgacctcttccccatgtgccccttcggctgccagtgctacagccgggtggtgcactgcagcgacctgggcctgacctctgtgcccaccaacatcccctttgacaccaggatgctggacctgcagaacaacaagatcaaggagatcaaggaaaatgacttcaagggcctgaccagcctgtatggcctcatcctgaacaacaacaagctgaccaagatccaccccaaggccttcctgaccaccaagaagctgcggcggctgtacctgagccacaaccagctgtctgagatccccctgaacctgcccaagagcctggccgagctgcgcatccacgagaacaaggtgaagaagatccagaaggacaccttcaagggcatgaatgccctgcacgtgctggagatgtctgccaaccccctggacaacaacggcatcgagcccggggcctttgaaggagtgacagtgttccacatcagaattgctgaggccaagctgacctctgtgcccaaggtgaacctgccccagttctag

SEQ ID NO: 144198 - DNA, 243 bp, synthetic construct
  misc_feature 1..243: note = Description of Artificial Sequence: Synthetic coding sequence
  source 1..243: mol_type = other DNA
atgatgctgaaggacatggaggacacagatgatgatgatgatgatgatgatgatgatgatgatgatgatgaggacaacagcctcttccccacccgggagcccaggagccacttcttcccctttgacctcttccccatgtgccccttcggctgccagtgctacagccgggtggtgcactgcagcgacctgggcctgacctctgtgcccaccaacatccccctcatcctggagtgcctgatctag

SEQ ID NO: 144199 - DNA, 732 bp, synthetic construct
  misc_feature 1..732: note = Description of Artificial Sequence: Synthetic coding sequence
  source 1..732: mol_type = other DNA
atgaaggagtatgtgctgctgctcttcctggccctgtgcagcgccaagcccttcttcagccccagccacatcgccctgaagaacatgatgctgaaggacatggaggacacagatgatgatgatgatgatgatgatgatgatgatgatgatgatgaggacaacagcctcttccccacccgggagcccaggagccacttcttcccctttgacctcttccccatgtgccccttcggctgccagtgctacagccgggtggtgcactgcagcgacctgggcctgacctctgtgcccaccaacatcccctttgacaccaggatgctggacctgcagaacaacaagatcaaggagatcaaggaaaatgacttcaagggcctgaccagcctgtatggcctcatcctgaacaacaacaagctgaccaagatccaccccaaggccttcctgaccaccaagaagctgcggcggctgtacctgagccacaaccagctgtctgagatccccctgaacctgcccaagagcctggccgagctgcgcatccacgagaacaaggtgaagaagatccagaaggacaccttcaagggcatgaatgccctgcacgtgctggagatgtctgccaaccccctggacaacaacggcatcgagcccggggcctttgaaggagtgacagtgttccacatcagaattgctgaggccaagctgacctctgtgcccaaggacaacctgcccagcttctag

SEQ ID NO: 144200 - DNA, 3885 bp, synthetic construct
  misc_feature 1..3885: note = Description of Artificial Sequence: Synthetic coding sequence
  source 1..3885: mol_type = other DNA
atggccctggccggcctgtgtgccctgctggcctgctgctggggccctgctgctgtgctggccacagctgctggagatgtggaccccagcaaggagctggagtgcaagctgaagagcatcaccgtgtctgccctgcccttcctgcgggagaatgacctgagcatcatgcacagccccagcgccagcgagcccaagctgctcttctctgtgagaaatgacttccctggagagatggtggtggtggatgacctggagaacacagagctgccctactttgtgctggagatcagcggcaacacagaggacatccccctggtgcgctggaggcagcagtggctggagaatggcaccctgctcttccacatccaccaccaggatggagcccccagcctgcccggccaggaccccacagaggagccccagcacgagagcgctgaggaggagctgcgcatcctgcacatctctgtgatgggcggcatgattgccctgctgctgagcatcctgtgcctggtgatgatcctgtacacccggcggcgctggtgcaagagaagaagagtgccccagccccagaagagcgccagcgctgaggccgccaatgagatccactacatccccagcgtgctgattggaggccacggccgggagagcctgagaaatgcccgggtgcagggccacaacagcagcggcaccctgagcatccgggagacccccatcctggatggctatgaatatgacatcacagacctgcggcaccacctgcagcgggagtgcatgaatggaggagaggactttgccagccaggtgaccaggaccctggacagcctgcagggctgcaatgagaagagcggcatggacctgaccccaggcagtgacaatgccaagctgagcctgatgaacaagtacaaggacaacatcatcgccaccagccctgtggacagcaaccaccagcaggccaccctgctgagccacaccagcagcagccagaggaagaggatcaacaacaaggcccgggccggcagcgccttcctgaaccctgagggggacagcggcacagaagcagaaaatgacccccagctgaccttctacacagaccccagccgcagcagaagaagaagccgggtgggcagccccaggagccctgtgaacaagaccaccctgaccctcatcagcatcaccagctgtgtgattggcctggtgtgcagcagccacgtgaactgccccctggtggtgaagatcaccctgcacgtgcctgagcacctgattgctgatggcagccgcttcatcctgctggagggcagccagctggatgccagtgactggctgaacccagcccaggtggtgctcttcagccagcagaacagcagcggcccctgggccatggacctgtgtgcccggcggctgctggacccctgtgagcaccagtgtgaccctgagactggagaatgtctgtgctatgagggctacatgaaggaccctgtgcacaagcacctgtgcatcagaaatgagtggggcaccaaccagggcccctggccctacaccatcttccagaggggctttgacctggtgctgggggagcagcccagcgacaagatcttccgcttcacctacaccctgggggagggcatgtggctgcccctgagcaagagctttgtgattcctcctgctgagctggccatcaaccccagcgccaagtgcaagacagacatgacagtgatggaggatgctgtggaggtgcgggaggagctgatgaccagcagcagctttgacagcctggaggtgctgctggacagctttggacctgtgcgggactgcagcaaggacaatggaggctgcagcaagaacttccgctgcatcagtgacaggaagctggacagcacaggctgtgtgtgccccagcggcctgagccccatgaaggacagcagcggctgctatgacagacacatcggcgtggactgcagtgatggcttcaatggaggctgtgagcagctgtgcctgcagcagatggcccccttcccagatgaccccaccctgtacaacatcctgatgttctgtggctgcatcgaggactacaagctgggcgtggatggccgcagctgccagctgatcacagagacctgcccagagggcagtgactgtggggagagccgggagctgcccatgaaccagaccctgtttggagagatgttcttcggctacaacaaccacagcaaggaggtggccgccggccaggtgctgaagggcaccttccggcagaacaactttgcccggggcctggaccagcagctgcctgatggcctggtggtggccaccgtgcccctggagaaccagtgcctggaggagatcagcgagcccaccccagaccctgacttcctgaccggcatggtgaacttcagcgaggtgtctggctaccctgtgctgcagcactggaaggtgcgctctgtgatgtaccacatcaagctgaaccaggtggccatcagccaggccctgagcaatgccctgcacagcctggatggagccaccagcagagctgactttgtggccctgctggaccagtttggaaaccactacatccaggaggccatctacggctttgaggagagctgcagcatctggtaccccaacaagcaggtgcagaggcggctgtggctggagtatgaggacatcagcaagggcaacagccccagtgatgagagcgaggagcgggagcgggaccccaaggtgctgaccttccctgagtacatcaccagcctgagtgacagcggcaccaagcacatggctgctggggtgaggatggagtgccacagcaagggccgctgccccagcagctgccccctgtgccacgtgaccagcagcccagacaccccagctgagcctgtgctgctggaggtgaccaaggccgcccccatctatgagctggtgaccaacaaccagacccagaggctgctgcaggaggccaccatgagcagcctgtggtgcagcggcactggagatgtgattgaggactggtgccgctgtgacagcacagccttcggggctgatggcctgcccacctgtgcccccctgccccagcctgtgctgcggctgagcacagtgcatgagcccagcagcaccctggtggtgctggagtgggagcacagcgagccccccatcggcgtgcagatcgtggactacctgctgcggcaggagaaggtgacagacaggatggaccacagcaaggtggagacagaaacagtgctgagctttgtggatgacatcatcagcggggccaagagcccctgtgccatgcccagccaggtgcctgacaagcagctgaccaccatcagcctcatcatccgctgcctggagccagacaccatctacatgttcaccctgtggggcgtggacaacacaggccgccgcagccggcccagtgatgtgattgtgaagaccccctgccctgtggtggatgatgtgaaggcccaggagattgctgacaagatctacaacctcttcaacggctacaccagcggcaaggagcagcagacagcctacaacaccctgctggacctgggcagccccaccctgcaccgggtgctgtaccactacaaccagcactatgagagctttggagagttcacctggaggtgtgaagatgagctgggccccaggaaggccggcctcatcctgagccagctgggggacctgagctcctggtgcaatggcctgctgcaggagcccaagatcagcctgcggcgcagcagcctgaagtacctgggctgccgctacagcgagatcaagccctacggcctggactgggccgagctgagccgggacctgaggaagacctgtgaggagcagaccctgagcatcccctacaatgactatggagacagcaaggagatctag

SEQ ID NO: 144201 - DNA, 3909 bp, synthetic construct
  misc_feature 1..3909: note = Description of Artificial Sequence: Synthetic coding sequence
  source 1..3909: mol_type = other DNA
atggccctggccggcctgtgtgccctgctggcctgctgctggggccctgctgctgtgctggccacagctgctggagatgtggaccccagcaaggagctggagtgcaagctgaagagcatcaccgtgtctgccctgcccttcctgcgggagaatgacctgagcatcatgcacagccccagcgccagcgagcccaagctgctcttctctgtgagaaatgacttccctggagagatggtggtggtggatgacctggagaacacagagctgccctactttgtgctggagatcagcggcaacacagaggacatccccctggtgcgctggaggcagcagtggctggagaatggcaccctgctcttccacatccaccaccaggatggagcccccagcctgcccggccaggaccccacagaggagccccagcacgagagcgctgaggaggagctgcgcatcctgcacatctctgtgatgggcggcatgattgccctgctgctgagcatcctgtgcctggtgatgatcctgtacacccggcggcgctggtgcaagagaagaagagtgccccagccccagaagagcgccagcgctgaggccgccaatgagatccactacatccccagcgtgctgattggaggccacggccgggagagcctgagaaatgcccgggtgcagggccacaacagcagcggcaccctgagcatccgggagacccccatcctggatggctatgaatatgacatcacagacctgcggcaccacctgcagcgggagtgcatgaatggaggagaggactttgccagccaggtgaccaggaccctggacagcctgcagggctgcaatgagaagagcggcatggacctgaccccaggcagtgacaatgccaagctgagcctgatgaacaagtacaaggacaacatcatcgccaccagccctgtggacagcaaccaccagcaggccaccctgctgagccacaccagcagcagccagaggaagaggatcaacaacaaggcccgggccggcagcgccttcctgaaccctgagggggacagcggcacagaagcagaaaatgacccccagctgaccttctacacagaccccagccgcagcagaagaagaagccgggtgggcagccccaggagccctgtgaacaagaccaccctgaccctcatcagcatcaccagctgtgtgattggcctggtgtgcagcagccacgtgaactgccccctggtggtgaagatcaccctgcacgtgcctgagcacctgattgctgatggcagccgcttcatcctgctggagggcagccagctggatgccagtgactggctgaacccagcccaggtggtgctcttcagccagcagaacagcagcggcccctgggccatggacctgtgtgcccggcggctgctggacccctgtgagcaccagtgtgaccctgagactggaagaagagagcacagagctgctggagaatgtctgtgctatgagggctacatgaaggaccctgtgcacaagcacctgtgcatcagaaatgagtggggcaccaaccagggcccctggccctacaccatcttccagaggggctttgacctggtgctgggggagcagcccagcgacaagatcttccgcttcacctacaccctgggggagggcatgtggctgcccctgagcaagagctttgtgattcctcctgctgagctggccatcaaccccagcgccaagtgcaagacagacatgacagtgatggaggatgctgtggaggtgcgggaggagctgatgaccagcagcagctttgacagcctggaggtgctgctggacagctttggacctgtgcgggactgcagcaaggacaatggaggctgcagcaagaacttccgctgcatcagtgacaggaagctggacagcacaggctgtgtgtgccccagcggcctgagccccatgaaggacagcagcggctgctatgacagacacatcggcgtggactgcagtgatggcttcaatggaggctgtgagcagctgtgcctgcagcagatggcccccttcccagatgaccccaccctgtacaacatcctgatgttctgtggctgcatcgaggactacaagctgggcgtggatggccgcagctgccagctgatcacagagacctgcccagagggcagtgactgtggggagagccgggagctgcccatgaaccagaccctgtttggagagatgttcttcggctacaacaaccacagcaaggaggtggccgccggccaggtgctgaagggcaccttccggcagaacaactttgcccggggcctggaccagcagctgcctgatggcctggtggtggccaccgtgcccctggagaaccagtgcctggaggagatcagcgagcccaccccagaccctgacttcctgaccggcatggtgaacttcagcgaggtgtctggctaccctgtgctgcagcactggaaggtgcgctctgtgatgtaccacatcaagctgaaccaggtggccatcagccaggccctgagcaatgccctgcacagcctggatggagccaccagcagagctgactttgtggccctgctggaccagtttggaaaccactacatccaggaggccatctacggctttgaggagagctgcagcatctggtaccccaacaagcaggtgcagaggcggctgtggctggagtatgaggacatcagcaagggcaacagccccagtgatgagagcgaggagcgggagcgggaccccaaggtgctgaccttccctgagtacatcaccagcctgagtgacagcggcaccaagcacatggctgctggggtgaggatggagtgccacagcaagggccgctgccccagcagctgccccctgtgccacgtgaccagcagcccagacaccccagctgagcctgtgctgctggaggtgaccaaggccgcccccatctatgagctggtgaccaacaaccagacccagaggctgctgcaggaggccaccatgagcagcctgtggtgcagcggcactggagatgtgattgaggactggtgccgctgtgacagcacagccttcggggctgatggcctgcccacctgtgcccccctgccccagcctgtgctgcggctgagcacagtgcatgagcccagcagcaccctggtggtgctggagtgggagcacagcgagccccccatcggcgtgcagatcgtggactacctgctgcggcaggagaaggtgacagacaggatggaccacagcaaggtggagacagaaacagtgctgagctttgtggatgacatcatcagcggggccaagagcccctgtgccatgcccagccaggtgcctgacaagcagctgaccaccatcagcctcatcatccgctgcctggagccagacaccatctacatgttcaccctgtggggcgtggacaacacaggccgccgcagccggcccagtgatgtgattgtgaagaccccctgccctgtggtggatgatgtgaaggcccaggagattgctgacaagatctacaacctcttcaacggctacaccagcggcaaggagcagcagacagcctacaacaccctgctggacctgggcagccccaccctgcaccgggtgctgtaccactacaaccagcactatgagagctttggagagttcacctggaggtgtgaagatgagctgggccccaggaaggccggcctcatcctgagccagctgggggacctgagctcctggtgcaatggcctgctgcaggagcccaagatcagcctgcggcgcagcagcctgaagtacctgggctgccgctacagcgagatcaagccctacggcctggactgggccgagctgagccgggacctgaggaagacctgtgaggagcagaccctgagcatcccctacaatgactatggagacagcaaggagatctag

SEQ ID NO: 144202 - DNA, 3651 bp, synthetic construct
  misc_feature 1..3651: note = Description of Artificial Sequence: Synthetic coding sequence
  source 1..3651: mol_type = other DNA
atggccctggccggcctgtgtgccctgctggcctgctgctggggccctgctgctgtgctggccacagctgctggagatgtggaccccagcaaggagctggagtgcaagctgaagagcatcaccgtgtctgccctgcccttcctgcgggagaatgacctgagcatcatgcacagccccagcgccagcgagcccaagctgctcttctctgtgagaaatgacttccctggagagatggtggtggtggatgacctggagaacacagagctgccctactttgtgctggagatcagcggcaacacagaggacatccccctggtgcgctggaggcagcagtggctggagaatggcaccctgctcttccacatccaccaccaggatggagcccccagcctgcccggccaggaccccacagaggagccccagcacgagagcgctgaggaggagctgcgcatcctgcacatctctgtgatgggcggcatgattgccctgctgctgagcatcctgtgcctggtgatgatcctgtacacccggcggcgctggtgcaagagaagaagagtgccccagccccagaagagcgccagcgctgaggccgccaatgagatccactacatccccagcgtgctgattggaggccacggccgggagagcctgagaaatgcccgggtgcagggccacaacagcagcggcaccctgagcatccgggagacccccatcctggatggctatgaatatgacatcacagacctgcggcaccacctgcagcgggagtgcatgaatggaggagaggactttgccagccaggtgaccaggaccctggacagcctgcagggctgcaatgagaagagcggcatggacctgaccccaggcagtgacaatgccaagctgagcctgatgaacaagtacaaggacaacatcatcgccaccagccctgtggacagcaaccaccagcaggccaccctgctgagccacaccagcagcagccagaggaagaggatcaacaacaaggcccgggccggcagcgccttcctgaaccctgagggggacagcggcacagaagcagaaaatgacccccagctgaccttctacacagaccccagccgcagcagaagaagaagccgggtgggcagccccaggagccctgtgaacaagaccaccctgaccctcatcagcatcaccagctgtgtgattggcctggtgtgcagcagccacgtgaactgccccctggtggtgaagatcaccctgcacgtgcctgagcacctgattgctgatggcagccgcttcatcctgctggagggcagccagctggatgccagtgactggctgaacccagcccaggtggtgctcttcagccagcagaacagcagcggcccctgggccatggacctgtgtgcccggcggctgctggacccctgtgagcaccagtgtgaccctgagactggagaatgtctgtgctatgagggctacatgaaggaccctgtgcacaagcacctgtgcatcagaaatgagtggggcaccaaccagggcccctggccctacaccatcttccagaggggctttgacctggtgctgggggagcagcccagcgacaagatcttccgcttcacctacaccctgggggagggcatgtggctgcccctgagcaagagctttgtgattcctcctgctgagctggccatcaaccccagcgccaagtgcaagacagacatgacagtgatggaggatgctgtggaggtgcgggaggagctgatgaccagcagcagctttgacagcctggaggtgctgctggacagctttggacctgtgcgggactgcagcaaggacaatggaggctgcagcaagaacttccgctgcatcagtgacaggaagctggacagcacaggctgtgtgtgccccagcggcctgagccccatgaaggacagcagcggctgctatgacagacacatcggcgtggactgcagtgatggcttcaatggaggctgtgagcagctgtgcctgcagcagatggcccccttcccagatgaccccaccctgtacaacatcctgatgttctgtggctgcatcgaggactacaagctgggcgtggatggccgcagctgccagctgatcacagagacctgcccagagggcagtgactgtggggagagccgggagctgcccatgaaccagaccctgtttggagagatgttcttcggctacaacaaccacagcaaggaggtggccgccggccaggtgctgaagggcaccttccggcagaacaactttgcccggggcctggaccagcagctgcctgatggcctggtggtggccaccgtgcccctggagaaccagtgcctggaggagatcagcgagcccaccccagaccctgacttcctgaccggcatggtgaacttcagcgaggtgtctggctaccctgtgctgcagcactggaaggtgcgctctgtgatgtaccacatcaagctgaaccaggtggccatcagccaggccctgagcaatgccctgcacagcctggatggagccaccagcagagctgactttgtggccctgctggaccagtttggaaaccactacatccaggaggccatctacggctttgaggagagctgcagcatctggtaccccaacaagcaggtgcagaggcggctgtggctggagtatgaggacatcagcaagggcaacagccccagtgatgagagcgaggagcgggagcgggaccccaaggtgctgaccttccctgagtacatcaccagcctgagtgacagcggcaccaagcacatggctgctggggtgaggatggagtgccacagcaagggccgctgccccagcagctgccccctgtgccacgtgaccagcagcccagacaccccagctgagcctgtgctgctggaggtgaccaaggccgcccccatctatgagctggtgaccaacaaccagacccagaggctgctgcaggaggccaccatgagcagcctgtggtgcagcggcactggagatgtgattgaggactggtgccgctgtgacagcacagccttcggggctgatggcctgcccacctgtgcccccctgccccagcctgtgctgcggctgagcacagtgcatgagcccagcagcaccctggtggtgctggagtgggagcacagcgagccccccatcggcgtgcagatcgtggactacctgctgcggcaggagaaggtgacagacaggatggaccacagcaaggtggagacagaaacagtgctgagctttgtggatgacatcatcagcggggccaagagcccctgtgccatgcccagccaggtgcctgacaagcagctgaccaccatcagcctcatcatccgctgcctggagccagacaccatctacatgttcaccctgtggggcgtggacaacacaggccgccgcagccggcccagtgatgtgattgtgaagaccccctgccctgtggtggatgatgtgaaggcccaggagattgctgacaagatctacaacctcttcaacggctacaccagcggcaaggagcagcagacagcctacaacaccctgctggacctgggcagccccaccctgcaccgggtgctgtaccactacaaccagcactatgagagctttggagagttcacctggaggtgtgaagatgagctgggccccaggtag

SEQ ID NO: 144203 - DNA, 3657 bp, synthetic construct
  misc_feature 1..3657: note = Description of Artificial Sequence: Synthetic coding sequence
  source 1..3657: mol_type = other DNA
atggccctggccggcctgtgtgccctgctggcctgctgctggggccctgctgctgtgctggccacagctgctggagatgtggaccccagcaaggagctggagtgcaagctgaagagcatcaccgtgtctgccctgcccttcctgcgggagaatgacctgagcatcatgcacagccccagcgccagcgagcccaagctgctcttctctgtgagaaatgacttccctggagagatggtggtggtggatgacctggagaacacagagctgccctactttgtgctggagatcagcggcaacacagaggacatccccctggtgcgctggaggcagcagtggctggagaatggcaccctgctcttccacatccaccaccaggatggagcccccagcctgcccggccaggaccccacagaggagccccagcacgagagcgctgaggaggagctgcgcatcctgcacatctctgtgatgggcggcatgattgccctgctgctgagcatcctgtgcctggtgatgatcctgtacacccggcggcgctggtgcaagagaagaagagtgccccagccccagaagagcgccagcgctgaggccgccaatgagatccactacatccccagcgtgctgattggaggccacggccgggagagcctgagaaatgcccgggtgcagggccacaacagcagcggcaccctgagcatccgggagacccccatcctggatggctatgaatatgacatcacagacctgcggcaccacctgcagcgggagtgcatgaatggaggagaggactttgccagccaggtgaccaggaccctggacagcctgcagggctgcaatgagaagagcggcatggacctgaccccaggcagtgacaatgccaagctgagcctgatgaacaagtacaaggacaacatcatcgccaccagccctgtggacagcaaccaccagcaggccaccctgctgagccacaccagcagcagccagaggaagaggatcaacaacaaggcccgggccggcagcgccttcctgaaccctgagggggacagcggcacagaagcagaaaatgacccccagctgaccttctacacagaccccagccgcagcagaagaagaagccgggtgggcagccccaggagccctgtgaacaagaccaccctgaccctcatcagcatcaccagctgtgtgattggcctggtgtgcagcagccacgtgaactgccccctggtggtgaagatcaccctgcacgtgcctgagcacctgattgctgatggcagccgcttcatcctgctggagggcagccagctggatgccagtgactggctgaacccagcccaggtggtgctcttcagccagcagaacagcagcggcccctgggccatggacctgtgtgcccggcggctgctggacccctgtgagcaccagtgtgaccctgagactggagaatgtctgtgctatgagggctacatgaaggaccctgtgcacaagcacctgtgcatcagaaatgagtggggcaccaaccagggcccctggccctacaccatcttccagaggggctttgacctggtgctgggggagcagcccagcgacaagatcttccgcttcacctacaccctgggggagggcatgtggctgcccctgagcaagagctttgtgattcctcctgctgagctggccatcaaccccagcgccaagtgcaagacagacatgacagtgatggaggatgctgtggaggtgcgggaggagctgatgaccagcagcagctttgacagcctggaggtgctgctggacagctttggacctgtgcgggactgcagcaaggacaatggaggctgcagcaagaacttccgctgcatcagtgacaggaagctggacagcacaggctgtgtgtgccccagcggcctgagccccatgaaggacagcagcggctgctatgacagacacatcggcgtggactgcagtgatggcttcaatggaggctgtgagcagctgtgcctgcagcagatggcccccttcccagatgaccccaccctgtacaacatcctgatgttctgtggctgcatcgaggactacaagctgggcgtggatggccgcagctgccagctgatcacagagacctgcccagagggcagtgactgtggggagagccgggagctgcccatgaaccagaccctgtttggagagatgttcttcggctacaacaaccacagcaaggaggtggccgccggccaggtgctgaagggcaccttccggcagaacaactttgcccggggcctggaccagcagctgcctgatggcctggtggtggccaccgtgcccctggagaaccagtgcctggaggagatcagcgagcccaccccagaccctgacttcctgaccggcatggtgaacttcagcgaggtgtctggctaccctgtgctgcagcactggaaggtgcgctctgtgatgtaccacatcaagctgaaccaggtggccatcagccaggccctgagcaatgccctgcacagcctggatggagccaccagcagagctgactttgtggccctgctggaccagtttggaaaccactacatccaggaggccatctacggctttgaggagagctgcagcatctggtaccccaacaagcaggtgcagaggcggctgtggctggagtatgaggacatcagcaagggcaacagccccagtgatgagagcgaggagcgggagcgggaccccaaggtgctgaccttccctgagtacatcaccagcctgagtgacagcggcaccaagcacatggctgctggggtgaggatggagtgccacagcaagggccgctgccccagcagctgccccctgtgccacgtgaccagcagcccagacaccccagctgagcctgtgctgctggaggtgaccaaggccgcccccatctatgagctggtgaccaacaaccagacccagaggctgctgcaggaggccaccatgagcagcctgtggtgcagcggcactggagatgtgattgaggactggtgccgctgtgacagcacagccttcggggctgatggcctgcccacctgtgcccccctgccccagcctgtgctgcggctgagcacagtgcatgagcccagcagcaccctggtggtgctggagtgggagcacagcgagccccccatcggcgtgcagatcgtggactacctgctgcggcaggagaaggtgacagacaggatggaccacagcaaggtggagacagaaacagtgctgagctttgtggatgacatcatcagcggggccaagagcccctgtgccatgcccagccaggtgcctgacaagcagctgaccaccatcagcctcatcatccgctgcctggagccagacaccatctacatgttcaccctgtggggcgtggacaacacaggccgccgcagccggcccagtgatgtgattgtgaagaccccctgccctgtggtggatgatgtgaaggcccaggagattgctgacaagatctacaacctcttcaacggctacaccagcggcaaggagcagcagacagcctacaacaccctgctggacctgggcagccccaccctgcaccgggtgctgtaccactacaaccagcactatgagagctttggagagttcacctggaggtgtgaagatgagctgggccccaggaaccagtag

SEQ ID NO: 144204 - DNA, 1323 bp, synthetic construct
  misc_feature 1..1323: note = Description of Artificial Sequence: Synthetic coding sequence
  source 1..1323: mol_type = other DNA
atgaacaccctgctgtgcaagggcatgttctgcctgctgtcctgggaggccgacagccggggccgcctgggggagtacaccctgcagcccctgagcctgcagacagaggagaccacagagctgggcagcaagaaggagctgaagtccatgcccttcatcacctacctgagcggcctgctgacagcccagatgctgagtgatgaccagctgatcagcggcgtggagatccgctgtgaggagaagggccgctgccccagcacctgccacctgtgccggcggcctgggaaggagcagctgagccccacccctgtgctgctggagatcaacagagtggtgcccctgtacaccctcatccaggacaatggcaccaaggaggccttcaagagcgccctgatgagcagctactggtgcagcgggaaaggagatgtgattgatgactggtgccgctgtgacctgagcgcctttgatgccaacggcctgcccaactgcagccccctgctgcagcctgtgctgcggctgagccccaccgtggagcccagcagcacagtggtgtccctggagtgggtggatgtgcagcctgccatcggcaccaaggtgtctgactacatcctgcagcacaagaaggtggatgagtacacagacacagacctgtacacaggagagttcctgagctttgctgatgacctgctgagcggcctgggcaccagctgtgtggccgccggccgcagccacggggaggtgcctgaggtgtccatctacagcgtcatcttcaagtgcctggagccagatggcctgtacaagttcaccctgtatgctgtggacacccggggccgccacagcgagctgagcacagtgaccctgaggacagcctgccccctggtggatgacaacaaggccgaggagattgctgacaagatctacaacctgtacaacggctacaccagcggcaaggagcagcagatggcctacaacaccctgatggaggtgtctgcctccatgctgttccgggtgcagcaccactacaacagccactatgagaagtttggagactttgtgtggaggagtgaagatgagctgggccccaggaaggcccacctgatcctgcggcggctggagcgggtgagcagccactgcagcagcctgctgcggagcgcctacatccagagccgggtggagaccgtgccctacctgttctgccgctctgaggaggtgcggcctgctggcatggtgtggtacagcatcctgaaggacaccaagatcacctgtgaggagaagatggtgtccatggccaggaacacctacggggagagcaagggccgctag

SEQ ID NO: 144205 - DNA, 4020 bp, synthetic construct
  misc_feature 1..4020: note = Description of Artificial Sequence: Synthetic coding sequence
  source 1..4020: mol_type = other DNA
atggctgctgctggggcccggctgagccctggccctggcagcggcctgcggggccggccccggctgtgcttccaccctggccccccacccctgctgcccctgctgctgctcttcctgctgctgctgcccccaccacccctgctggccggggccacagctgctgccagccgggagccagacagcccctgccgcctgaagacagtgacagtgtccaccctgcctgccctgcgggagagtgacatcggctggagcggggcccgggccggggccggggccggcaccggggccggggctgctgctgctgctgccagccctggcagccctggcagcgctggaacagctgctgagagccggctgctgctgtttgtgagaaatgagctgcccggcagaattgctgtgcaggatgacctggacaacacagagctgcccttcttcaccctggagatgagcggcacagctgctgacatcagcctggtgcactggaggcagcagtggctggagaatggcaccctgtacttccacgtgtccatgagcagcagcggccagctggcccaggccacagcccccaccctgcaggagcccagcgagatcgtggaggagcagatgcacatcctgcacatctctgtgatgggcggcctcatcgccctgctgctgctgctgctggtgttcaccgtggccctgtatgcccagaggcgctggcagaagagaagacgcatcccccagaagagcgccagcacagaggccacccatgagatccactacatccccagcgtgctgctgggcccccaggcccgggagagcttccgcagcagccggctgcagacccacaacagcgtcatcggcgtgcccatccgggagacccccatcctggatgattatgactgtgaagaagatgaggagcccccaagaagagccaaccacgtgtccagagaagatgaatttggcagccaggtgacccacaccctggacagcctgggccaccctggagaggagaaggtggactttgagaagaaggctgctgctgaggccacccaggagaccgtggagagcctgatgcagaagttcaaggagagcttccgggccaacacccccattgaaattggccagctgcagccccccctgcggagcaccagcgctgggaagaggaagaggaggagcaagagccggggcggcatcagctttggccgggccaagggcaccagcggcagcgaggctgatgatgagacccagctgaccttctacacagagcagtaccgcagcagaagaagaagcaagggcctgctgaagagccctgtgaacaagacagccctgaccctgattgctgtgagcagctgcatcctggccatggtgtgtggcagccagatgagctgccccctgactgtgaaggtgaccctgcacgtgcctgagcacttcatcgcagatggcagcagctttgtggtgtctgagggcagctacctggacatcagtgactggctgaacccagccaagctgagcctgtactaccagatcaatgccaccagcccctgggtgcgggacctgtgtggccagaggaccacagatgcctgtgagcagctgtgtgaccctgagaccggggagtgcagctgccacgagggctacgccccagaccctgtgcaccgccacctgtgtgtgcggagtgactggggccagagcgagggcccctggccctacaccaccctggagcggggctatgacctggtgactggagagcaggcccctgagaagatcctgcggagcaccttcagcctgggccagggcctgtggctgcctgtgtccaagagctttgtggtgccccctgtggagctgagcatcaaccccctggccagctgcaagacagatgtgctggtgacagaggaccctgcagatgtgcgggaggaggccatgctgagcacctactttgagaccatcaatgacctgctgagcagctttggacctgtgcgggactgcagcagaaataatggaggctgcaccaggaacttcaagtgtgtgtctgaccggcaggtggacagcagcggctgtgtgtgcccagaggagctgaagcccatgaaggatggcagcggctgctatgaccacagcaaaggaattgactgcagtgatggcttcaacggcggctgtgagcagctgtgcctgcagcagaccctgcccctgccctatgatgccaccagcagcaccatcttcatgttctgtggctgtgtggaggagtacaagctggccccagatggcaagagctgcctgatgctgagtgatgtgtgtgagggccccaagtgcctgaagccagacagcaagttcaatgacaccctgtttggagagatgctgcacggctacaacaacagaacccagcacgtgaaccagggccaggtgttccagatgaccttccgggagaacaacttcatcaaggacttcccccagctggctgatggcctgctggtgatccccctgcctgtggaggagcagtgccggggcgtgctgtctgagcccctgcctgacctgcagctgctgaccggggacatccgctatgatgaggccatgggctaccccatggtgcagcagtggagggtgcgcagcaacctgtacagagtgaagctgagcaccatcaccctggccgccggcttcaccaacgtgctgaagatcctgaccaaggagagcagccgggaggagctgctgtccttcatccagcactacggcagccactacatcgccgaggccctgtatggcagcgagctgacctgcatcatccacttccccagcaagaaggtgcagcagcagctgtggctgcagtaccagaaggagaccacagagctgggcagcaagaaggagctgaagtccatgcccttcatcacctacctgagcggcctgctgacagcccagatgctgagtgatgaccagctgatctctggagtggagatccgctgtgaggagaagggccgctgccccagcacctgccacctgtgcagaagacctgggaaggagcagctgagccccacccctgtgctgctggagatcaacagagtggtgcccctgtacaccctcatccaggacaatggcaccaaggaggccttcaagagcgccctgatgagcagctactggtgcagcgggaaaggagatgtgattgatgactggtgccgctgtgacctgagcgcctttgatgccaacggcctgcccaactgcagccccctgctgcagcctgtgctgcggctgagccccaccgtggagcccagcagcacagtggtgtccctggagtgggtggatgtgcagcctgccatcggcaccaaggtgtctgactacatcctgcagcacaagaaggtggatgagtacacagacacagacctgtacaccggggagttcctgagctttgctgatgacctgctgagcggcctgggcaccagctgtgtggccgccggccgcagccatggagaggtgcctgaggtgtccatctacagcgtcatcttcaagtgcctggagccagatggcctgtacaagttcaccctgtatgctgtggacacccggggccgccacagcgagctgagcacagtgaccctgaggacagcctgccccctggtggatgacaacaaggccgaggagattgctgacaagatctacaacctgtacaacggctacaccagcggcaaggagcagcagatggcctacaacaccctgatggaggtgtctgcctccatgctgttccgggtgcagcaccactacaacagccactatgagaagtttggagactttgtgtggaggagtgaagatgagctgggccccaggaaggcccacctgatcctgcggcggctggagcgggtgagcagccactgcagcagcctgctgcggagcgcctacatccagagccgggtggagaccgtgccctacctgttctgccgctctgaggaggtgcggcctgctggcatggtgtggtacagcatcctgaaggacaccaagatcacctgtgaggagaagatggtgtccatggccaggaacacctatggagagagcaaaggaagatag

SEQ ID NO: 144206 - DNA, 1188 bp, synthetic construct
  misc_feature 1..1188: note = Description of Artificial Sequence: Synthetic coding sequence
  source 1..1188: mol_type = other DNA
atgcccttcatcacctacctgagcggcctgctgacagcccagatgctgagtgatgaccagctgatctctggagtggagatccgctgtgaggagaagggccgctgccccagcacctgccacctgtgcagaagacctgggaaggagcagctgagccccacccctgtgctgctggagatcaacagagtggtgcccctgtacaccctcatccaggacaatggcaccaaggaggccttcaagagcgccctgatgagcagctactggtgcagcgggaaaggagatgtgattgatgactggtgccgctgtgacctgagcgcctttgatgccaacggcctgcccaactgcagccccctgctgcagcctgtgctgcggctgagccccaccgtggagcccagcagcacagtggtgtccctggagtgggtggatgtgcagcctgccatcggcaccaaggtgtctgactacatcctgcagcacaagaaggtggatgagtacacagacacagacctgtacaccggggagttcctgagctttgctgatgacctgctgagcggcctgggcaccagctgtgtggccgccggccgcagccatggagaggtgcctgaggtgtccatctacagcgtcatcttcaagtgcctggagccagatggcctgtacaagttcaccctgtatgctgtggacacccggggccgccacagcgagctgagcacagtgaccctgaggacagcctgccccctggtggatgacaacaaggccgaggagattgctgacaagatctacaacctgtacaacggctacaccagcggcaaggagcagcagatggcctacaacaccctgatggaggtgtctgcctccatgctgttccgggtgcagcaccactacaacagccactatgagaagtttggagactttgtgtggaggagtgaagatgagctgggccccaggaaggcccacctgatcctgcggcggctggagcgggtgagcagccactgcagcagcctgctgcggagcgcctacatccagagccgggtggagaccgtgccctacctgttctgccgctctgaggaggtgcggcctgctggcatggtgtggtacagcatcctgaaggacaccaagatcacctgtgaggagaagatggtgtccatggccaggaacacctactacctgaccctgagcaaggtgagccccttctag

SEQ ID NO: 144207 - DNA, 585 bp, synthetic construct
  misc_feature 1..585: note = Description of Artificial Sequence: Synthetic coding sequence
  source 1..585: mol_type = other DNA
atgcccttcatcacctacctgagcggcctgctgacagcccagatgctgagtgatgaccagctgatctctggagtggagatccgctgtgaggagaagggccgctgccccagcacctgccacctgtgcagaagacctgggaaggagcagctgagccccacccctgtgctgctggagatcaacagagtggtgcccctgtacaccctcatccaggacaatggcaccaaggaggccttcaagagcgccctgatgagcagctactggtgcagcgggaaaggagatgtgattgatgactggtgccgctgtgacctgagcgcctttgatgccaacggcctgcccaactgcagccccctgctgcagcctgtgctgcggctgagccccaccgtggagcccagcagcacagtggtgtccctggagtgggtggatgtgcagcctgccatcggcaccaaggtgtctgactacatcctgcagcacaagaaggtggatgagtacacagacacagacctgtacacagtgtactgctggatcaccttcatcgacctgcgcatcctgaaccagccctgcatccctggcatgaagcccacctag

SEQ ID NO: 144208 - DNA, 3867 bp, synthetic construct
  misc_feature 1..3867: note = Description of Artificial Sequence: Synthetic coding sequence
  source 1..3867: mol_type = other DNA
atggctgctgctggggcccggctgagccctggccctggcagcggcctgcggggccggccccggctgtgcttccaccctggccccccacccctgctgcccctgctgctgctcttcctgctgctgctgcccccaccacccctgctggccggggccacagctgctgccagccgggagccagacagcccctgccgcctgaagacagtgacagtgtccaccctgcctgccctgcgggagagtgacatcggctggagcggggcccgggccggggccggggccggcaccggggccggggctgctgctgctgctgccagccctggcagccctggcagcgctggaacagctgctgagagccggctgctgctgtttgtgagaaatgagctgcccggcagaattgctgtgcaggatgacctggacaacacagagctgcccttcttcaccctggagatgagcggcacagctgctgacatcagcctggtgcactggaggcagcagtggctggagaatggcaccctgtacttccacgtgtccatgagcagcagcggccagctggcccaggccacagcccccaccctgcaggagcccagcgagatcgtggaggagcagatgcacatcctgcacatctctgtgatgggcggcctcatcgccctgctgctgctgctgctggtgttcaccgtggccctgtatgcccagaggcgctggcagaagagaagacgcatcccccagaagagcgccagcacagaggccacccatgagatccactacatccccagcgtgctgctgggcccccaggcccgggagagcttccgcagcagccggctgcagacccacaacagcgtcatcggcgtgcccatccgggagacccccatcctggatgattatgactgtgaagaagatgaggagcccccaagaagagccaaccacgtgtccagagaagatgaatttggcagccaggtgacccacaccctggacagcctgggccaccctggagaggagaaggtggactttgagaagaagggcggcatcagctttggccgggccaagggcaccagcggcagcgaggctgatgatgagacccagctgaccttctacacagagcagtaccgcagcagaagaagaagcaagggcctgctgaagagccctgtgaacaagacagccctgaccctgattgctgtgagcagctgcatcctggccatggtgtgtggcagccagatgagctgccccctgactgtgaaggtgaccctgcacgtgcctgagcacttcatcgcagatggcagcagctttgtggtgtctgagggcagctacctggacatcagtgactggctgaacccagccaagctgagcctgtactaccagatcaatgccaccagcccctgggtgcgggacctgtgtggccagaggaccacagatgcctgtgagcagctgtgtgaccctgagactggagaatgtagctgccacgagggctacgccccagaccctgtgcaccgccacctgtgtgtgcggagtgactggggccagagcgagggcccctggccctacaccaccctggagcggggctatgacctggtgactggagagcaggcccctgagaagatcctgcggagcaccttcagcctgggccagggcctgtggctgcctgtgtccaagagctttgtggtgccccctgtggagctgagcatcaaccccctggccagctgcaagacagatgtgctggtgacagaagatcctgcagatgtgcgggaggaggccatgctgagcacctactttgagaccatcaatgacctgctgagcagctttggacctgtgcgggactgcagcaggaacaacggcggctgcaccaggaacttcaagtgtgtgtctgaccggcaggtggacagcagcggctgtgtgtgcccagaggagctgaagcccatgaaggatggcagcggctgctatgaccacagcaagggcatcgactgcagtgatggcttcaatggaggctgtgagcagctgtgcctgcagcagaccctgcccctgccctatgatgccaccagcagcaccatcttcatgttctgtggctgtgtggaggagtacaagctggccccagatggcaagagctgcctgatgctgagtgatgtgtgtgagggccccaagtgcctgaagccagacagcaagttcaatgacaccctgtttggagagatgctgcacggctacaacaacagaacccagcacgtgaaccagggccaggtgttccagatgaccttccgggagaacaacttcatcaaggacttcccccagctggctgatggcctgctggtgatccccctgcctgtggaggagcagtgccggggcgtgctgtctgagcccctgcctgacctgcagctgctgactggagacatccgctatgatgaggccatgggctaccccatggtgcagcagtggagggtgcgcagcaacctgtacagagtgaagctgagcaccatcaccctggccgccggcttcaccaacgtgctgaagatcctgaccaaggagagcagccgggaggagctgctgtccttcatccagcactacggcagccactacatcgccgaggccctgtatggcagcgagctgacctgcatcatccacttccccagcaagaaggtgcagcagcagctgtggctgcagtaccagaaggagaccacagagctgggcagcaagaaggagctgaagtccatgcccttcatcacctacctgagcggcctgctgacagcccagatgctgagtgatgaccagctgatcagcggcgtggagatccgctgtgaggagaagggccgctgccccagcacctgccacctgtgccggcggcctgggaaggagcagctgagccccacccctgtgctgctggagatcaacagagtggtgcccctgtacaccctcatccaggacaatggcaccaaggaggccttcaagagcgccctgatgagcagctactggtgcagcgggaaaggagatgtgattgatgactggtgccgctgtgacctgagcgcctttgatgccaacggcctgcccaactgcagccccctgctgcagcctgtgctgcggctgagccccaccgtggagcccagcagcacagtggtgtccctggagtgggtggatgtgcagcctgccatcggcaccaaggtgtctgactacatcctgcagcacaagaaggtggatgagtacacagacacagacctgtacacaggagagttcctgagctttgctgatgacctgctgagcggcctgggcaccagctgtgtggccgccggccgcagccacggggaggtgcctgaggtgtccatctacagcgtcatcttcaagtgcctggagccagatggcctgtacaagttcaccctgtatgctgtggacacccggggccgccacagcgagctgagcacagtgaccctgaggacagcctgccccctggtggatgacaacaaggccgaggagattgctgacaagatctacaacctgtacaacggctacaccagcggcaaggagcagcagatggcctacaacaccctgatggaggtgtctgcctccatgctgttccgggtgcagcaccactacaacagccactatgagaagtttggagactttgtgtggaggagtgaagatgagctgggccccaggaaggcccacctgatcctgcggcggctggagcgggtgagcagccactgcagcagcctgctgcggagcgcctacatccagagccgggtggagaccgtgccctacctgttctgccgctctgaggaggtgcggcctgctggcatggtgtggtacagcatcctgaaggacaccaagatcacctgtgaggagaagatggtgtccatggccaggaacacctacggggagagcaagggccgctag

SEQ ID NO: 144209 - DNA, 1188 bp, synthetic construct; identical to SEQ ID NO: 144206
  misc_feature 1..1188: note = Description of Artificial Sequence: Synthetic coding sequence
  source 1..1188: mol_type = other DNA

SEQ ID NO: 144210 - DNA, 4008 bp, synthetic construct
  misc_feature 1..4008: note = Description of Artificial Sequence: Synthetic coding sequence
  source 1..4008: mol_type = other DNA
atggctgctgctggggcccggctgagccctggccctggcagcggcctgcggggccggccccggctgtgcttccaccctggccccccacccctgctgcccctgctgctgctcttcctgctgctgctgcccccaccacccctgctggccggggccacagctgctgccagccgggagccagacagcccctgccgcctgaagacagtgacagtgtccaccctgcctgccctgcgggagagtgacatcggctggagcggggcccgggccggggccggggccggcaccggggccggggctgctgctgctgctgccagccctggcagccctggcagcgctggaacagctgctgagagccggctgctgctgtttgtgagaaatgagctgcccggcagaattgctgtgcaggatgacctggacaacacagagctgcccttcttcaccctggagatgagcggcacagctgctgacatcagcctggtgcactggaggcagcagtggctggagaatggcaccctgtacttccacgtgtccatgagcagcagcggccagctggcccaggccacagcccccaccctgcaggagcccagcgagatcgtggaggagcagatgcacatcctgcacatctctgtgatgggcggcctcatcgccctgctgctgctgctgctggtgttcaccgtggccctgtatgcccagaggcgctggcagaagagaagacgcatcccccagaagagcgccagcacagaggccacccatgagatccactacatccccagcgtgctgctgggcccccaggcccgggagagcttccgcagcagccggctgcagacccacaacagcgtcatcggcgtgcccatccgggagacccccatcctggatgattatgactgtgaagaagatgaggagcccccaagaagagccaaccacgtgtccagagaagatgaatttggcagccaggtgacccacaccctggacagcctgggccaccctggagaggagaaggtggactttgagaagaaggctgctgctgaggccacccaggagaccgtggagagcctgatgcagaagttcaaggagagcttccgggccaacacccccattgaaattggccagctgcagccccccctgcggagcaccagcgctgggaagaggaagaggaggagcaagagccggggcggcatcagctttggccgggccaagggcaccagcggcagcgaggctgatgatgagacccagctgaccttctacacagagcagtaccgcagcagaagaagaagcaagggcctgctgaagagccctgtgaacaagacagccctgaccctgattgctgtgagcagctgcatcctggccatggtgtgtggcagccagatgagctgccccctgactgtgaaggtgaccctgcacgtgcctgagcacttcatcgcagatggcagcagctttgtggtgtctgagggcagctacctggacatcagtgactggctgaacccagccaagctgagcctgtactaccagatcaatgccaccagcccctgggtgcgggacctgtgtggccagaggaccacagatgcctgtgagcagctgtgtgaccctgagaccggggagtgcagctgccacgagggctacgccccagaccctgtgcaccgccacctgtgtgtgcggagtgactggggccagagcgagggcccctggccctacaccaccctggagcggggctatgacctggtgactggagagcaggcccctgagaagatcctgagcctgggccagggcctgtggctgcctgtgtccaagagctttgtggtgccccctgtggagctgagcatcaaccccctggccagctgcaagacagatgtgctggtgacagaggaccctgcagatgtgcgggaggaggccatgctgagcacctactttgagaccatcaatgacctgctgagcagctttggacctgtgcgggactgcagcagaaataatggaggctgcaccaggaacttcaagtgtgtgtctgaccggcaggtggacagcagcggctgtgtgtgcccagaggagctgaagcccatgaaggatggcagcggctgctatgaccacagcaaaggaattgactgcagtgatggcttcaacggcggctgtgagcagctgtgcctgcagcagaccctgcccctgccctatgatgccaccagcagcaccatcttcatgttctgtggctgtgtggaggagtacaagctggccccagatggcaagagctgcctgatgctgagtgatgtgtgtgagggccccaagtgcctgaagccagacagcaagttcaatgacaccctgtttggagagatgctgcacggctacaacaacagaacccagcacgtgaaccagggccaggtgttccagatgaccttccgggagaacaacttcatcaaggacttcccccagctggctgatggcctgctggtgatccccctgcctgtggaggagcagtgccggggcgtgctgtctgagcccctgcctgacctgcagctgctgaccggggacatccgctatgatgaggccatgggctaccccatggtgcagcagtggagggtgcgcagcaacctgtacagagtgaagctgagcaccatcaccctggccgccggcttcaccaacgtgctgaagatcctgaccaaggagagcagccgggaggagctgctgtccttcatccagcactacggcagccactacatcgccgaggccctgtatggcagcgagctgacctgcatcatccacttccccagcaagaaggtgcagcagcagctgtggctgcagtaccagaaggagaccacagagctgggcagcaagaaggagctgaagtccatgcccttcatcacctacctgagcggcctgctgacagcccagatgctgagtgatgaccagctgatctctggagtggagatccgctgtgaggagaagggccgctgccccagcacctgccacctgtgcagaagacctgggaaggagcagctgagccccacccctgtgctgctggagatcaacagagtggtgcccctgtacaccctcatccaggacaatggcaccaaggaggccttcaagagcgccctgatgagcagctactggtgcagcgggaaaggagatgtgattgatgactggtgccgctgtgacctgagcgcctttgatgccaacggcctgcccaactgcagccccctgctgcagcctgtgctgcggctgagccccaccgtggagcccagcagcacagtggtgtccctggagtgggtggatgtgcagcctgccatcggcaccaaggtgtctgactacatcctgcagcacaagaaggtggatgagtacacagacacagacctgtacaccggggagttcctgagctttgctgatgacctgctgagcggcctgggcaccagctgtgtggccgccggccgcagccatggagaggtgcctgaggtgtccatctacagcgtcatcttcaagtgcctggagccagatggcctgtacaagttcaccctgtatgctgtggacacccggggccgccacagcgagctgagcacagtgaccctgaggacagcctgccccctggtggatgacaacaaggccgaggagattgctgacaagatctacaacctgtacaacggctacaccagcggcaaggagcagcagatggcctacaacaccctgatggaggtgtctgcctccatgctgttccgggtgcagcaccactacaacagccactatgagaagtttggagactttgtgtggaggagtgaagatgagctgggccccaggaaggcccacctgatcctgcggcggctggagcgggtgagcagccactgcagcagcctgctgcggagcgcctacatccagagccgggtggagaccgtgccctacctgttctgccgctctgaggaggtgcggcctgctggcatggtgtggtacagcatcctgaaggacaccaagatcacctgtgaggagaagatggtgtccatggccaggaacacctatggagagagcaaaggaagatag

SEQ ID NO: 144211 - DNA, 297 bp, synthetic construct
  misc_feature 1..297: note = Description of Artificial Sequence: Synthetic coding sequence
  source 1..297: mol_type = other DNA
tgaatggcctacaacaccctgatggaggtgtctgcctccatgctgttccgggtgcagcaccactacaacagccactatgagaagtttggagactttgtgtggaggagtgaagatgagctgggccccagcctgctggagagcttcatgagcctgcaggacatcaacctgctggagaggaggcctggccggccccagaggcctggcaaccccctgagcaatgtgtcctggaggatcagcgagatcgcccccaccagccacacagacatgtctgctggcatcaaggagacagccagctag

SEQ ID NO: 144212 - DNA, 6828 bp, synthetic construct
  misc_feature 1..6828: note = Description of Artificial Sequence: Synthetic coding sequence
  source 1..6828: mol_type = other DNA
atggctgctgagcggcgctgtggctccatgagggacctgcgggcccaggtgaccagcggcctgctgcccttccctgaggtgaccctgcaggccctgggggaggatgagatcaccctggagagcgtgctgcggggcaagtttgctgctgggaagaatggcctggcctgcctggcctgtggcccccagctggaggtggtgaacagcatcaccggggagcggctgagcgcctaccgcttcagcggcgtgaatgagcagccccctgtggtgctggccgtgaaggagttctcctggcagaagaggacaggcctgctgattggcctggaggagacagagggctctgtgctgtgcctgtatgacctgggcatcagcaaggtggtgaaggctgtggtgctgcccggccgggtgacagccatcgagcccatcatcaaccacggcggggccagcgccagcacccagcacctgcaccccagcctgcgctggctgtttggagtggccgctgtggtgacagatgtgggccagatcctgctggtggacctgtgcctggatgacctgagctgcaaccagaatgaggtggaggccagtgacctggaggtgctgaccggcatcccagctgaggtgccccacatccgggagagcgtgatgaggcagggccgccacctgtgcttccagctggtgagccccaccggcacagctgtgtccaccctgagctacatcagcaggaccaaccagctggccgtgggcttcagtgatggctacctggccctgtggaacatgaagtccatgaagcgggagtactacatccagctggagagcggccaggtgcctgtgtatgctgtgaccttccaggagccagaaaatgaccccaggaactgctgctacctgtgggccgtgcagagcacccaggacagtgaaggagatgtgctgagcctgcacctgctgcagctggcctttggaaacaggaagtgcctggccagcggccagatcctgtatgagggcctggagtactgtgaggagcgctacaccctggacctgactggaggcatgttccccctgcggggccagaccagcaacaccaagctgctgggctgccagagcattgagaagttccgcagccacggggaccgggaggagggcgtgaatgaggccctgagcccagacacctctgtgtctgtgttcacctggcaggtgaacatctacggccagggcaagcccagcgtgtacctgggcctgtttgacatcaaccgctggtaccacgcccagatgccagacagcctgcggtctggagagtacctgcacaactgcagctactttgccctgtggagcctggagagcgtggtgtccaggaccagcccccacggcatcctggacatcctggtgcatgagaggagcctgaacagaggagtgcccccatcctacccacctcctgagcagttcttcaaccccagcacctacaactttgatgccacctgcctgctgaacagcggcgtggtgcacctgacctgcaccggcttccagaaggagaccctgaccttcctgaagaagagcggccccagcctgaatgagctgatcccagatggctacaaccgctgcctggtggccggcctgctgagccccaggtttgtggatgtgcagcccagcagcctgagccaggaggagcagctggaggccatcctgtctgctgccatccagaccagcagcctgggcctgctgaccggctacatccgccgctggatcacagaggagcagcccaacagcgccaccaacctgcgctttgtgctggagtggacctggaacaaggtggtgctgaccaaggaggagtttgaccggctgtgtgtgcccctgtttgatggcagctgccacttcatggacccccagaccatccagagcatccagcagtgctacctgctgctgagcaacctgaacatcgtgctgagctgctttgccagcgaggcccgggagatcacagagcggggcctgattgacctgagcaacaagtttgtggtgagccacctgatctgccagtatgcccaggtggtgctgtggttcagccacagcggcctgctgcctgagggcattgatgattctgtgcagctgagccggctgtgctacaactaccctgtgatccagaactactacaccagccggcggcagaagtttgagcggctgagccggggcaagtggaacccagactgcctgatgattgatggcctggtgtcccagctgggggagagaattgagaagctgtggaagagagatgagggcggcaccgggaagtaccccccagccagcctgcatgctgtgctggacatgtacctgctggatggagtgacagaagctgccaagcacagcatcaccatctacctgctgctggacatcatgtacagcttccccaacaagacagacacccccatcgagagcttccccaccgtgtttgccatctcctggggccaggtgaagctgatccagggcttctggctgattgaccacaatgactatgagagcggcctggacctgctcttccacccagccacagccaagcccctgtcctggcagcacagcaagatcatccaggccttcatgagccagggcgagcaccggcaggccctgcgctacatccagaccatgaagcccaccgtgtcctctggaaatgatgtgatcctgcacctgactgtgctgctcttcaaccgctgcatggtggaggcctggaacttcctgcggcagcactgcaaccggctgaacatcgaggagctgctgaagcacatgtatgaggtgtgccaggagatgggcctgatggaggacctgctgaagctgcccttcacagacacagagcaggagtgcctggtgaagttcctgcagagcagcgcctctgtgcagaaccacgagttcctgctggtgcaccacctgcagagggccaactacgtgcctgccctgaagctgaaccagaccctgaagatcaacgtgatgaatgaccgggacccccggctgcgggagaggagcctggccaggaacagcatcctggaccagtatggcaagatcctgccccgggtgcacaggaagctggccatcgagcgggccaagccctaccacctgagcaccagcagcgtcttccggctggtgtcccggcccaagcccctgtctgctgtgcccaagcaggtggtgacaggcaccgtgctgaccaggtctgtgttcatcaacaacgtgctgagcaagattggagaggtgtgggccagcaaggagcccatcaacagcaccacccccttcaacagcagcaagattgaggagcccagccccatcgtgtacagcctgcctgcccctgagctgcctgaggccttcttcggcacccccatcagcaaggccagccagaagatcagccggctgctggacctggtggtgcagcctgtgccccggcccagccagtgcagcgagttcatccagcagagctccatgaagagccccctgtacctggtgagccgcagcctgcccagcagcagccagctgaagggcagcccccaggccatcagccgggccagcgagctgcacctgctggagacccccctggtggtgaagaaggccaagagcctggccatgtctgtgaccaccagcggcttcagcgagttcaccccccagagcatcctgcggagcaccctgcggagcacccccctggccagccccagccccagccctggccgcagcccccagaggctgaaggagacccgcatcagctttgtggaggaggatgtgcaccccaagtggatccctggagctgctgatgacagcaagctggaggtgttcaccacccccaagaagtgtgctgtgcctgtggagacagagtggctgaagagcaaggacaggaccaccagcttcttcctgaacagccctgagaaggagcaccaggagatggatgagggcagccagagcctggagaagctggatgtgtccaagggcaacagctctgtgtccatcaccagtgatgagaccaccctggagtaccaggatgcccccagccctgaggacctggaggagaccgtcttcaccgccagcaagcccaagagcagcagcacagccctgaccaccaacgtgacagagcagacagagaaggatggagacaaggatgtgtttgccagcgaggtgacccccagcgacctgcagaagcagatgggcaacctggaggatgctgagaccaaggacctgctggtggccgctgaggccttcagcgagctgaaccacctgagccctgtgcagggcacagaggccagcctgtgtgcccccagcgtgtatgagggcaagatcttcacccagaagagcaaggtgcctgtgctggatgagggcctgacctctgtggagacctacaccccagccatccgggccaatgacaacaagtccatggctgatgtgctgggagatggcggcaacagcagcctgaccatcagcgagggccccatcgtgtctgaaagaaggctgaaccaggaggtggccctgaacctgaaggaggaccacgaggtggaggtgggcgtgctgaaggagagcgtggacctgcctgaggagaagctgcccatcagtgacagccccccagacacccaggagatccacgtgattgagcaggagaagctggaggcccaggacagcggggaggaggccaggaacctgtccttcaatgagctgtaccccagcggcaccctgaagctgcagtacaactttgacaccatcgaccagcagttctgtgacctggccgacaacaaggacacagcagaatgtgacattgctgaggtggatggagagctgtttgtggcccagagcaacttcaccctcatcctggagggggaggagggggaggtggagcccggggactttgccagcagtgatgtgctgcccaaggccgccaacacagccacagaggagaagctggtgtgcagcggggagaatgacaaccacggccagatcgccaacctgcccagcgctgtgaccagtgaccagaagagccagaaggtggacaccctgccctacgtgcctgagcccatcaaggtggccatcgccgagaacctgctggatgtgatcaaggacaccaggagcaaggagatcaccagtgacaccatggagcagagcatccacgagaccatccccctggtgtcccagaacatcatgtgccccaccaagctggtgaagagcgccttcaagacagcccaggagaccagcaccatgaccatgaatgtgtcccaggtggatgatgtggtgagcagcaagaccaggacccggggccagaggatccagaatgtgaatgtgaagagcgcccagcaggaggccagcgcagatgtggccacccccaagatgcctggccagagcgtgaggaagaagaccaggaaggccaaggagatcagcgaggccagcgagaacatctacagtgatgtgcggggcctgagccagaaccagcagatcccccagaacagcgtgaccccaagaagaggccgcaggaagaaggaggtgaaccaggacatcctggagaacaccagctctgtggagcaggagctgcagatcaccaccggccgggagagcaagaggctgaagagcagccagctgctggagcctgctgtggaggagaccaccaagaaggaggtgaaggtgtcctctgtgaccaagaggaccccccggcgcatcaagaggtctgtggagaaccaggagagcgtggagatcatcaatgacctgaaggtgtccacagtgaccagccccagcaggatgatcaggaagctgcggagcaccaacctggatgccagcgagaacacaggcaacaagcaggatgacaagagcagtgacaagcagctgcgcatcaagcacgtgagaagagtgcggggccgggaggtgagccccagtgatgtgcgggaggacagcaacctggagagcagccagctgactgtgcaggccgagtttgacatgtctgccatccccaggaagaggggccggcccaggaagatcaaccccagtgaagatgtgggcagcaaggctgtgaaggaggagaggagccccaagaagaaggaggcccccagcatcagaagaagaagcaccaggaacaccccagccaagtcagaaaatgtggatgtgggcaagccagccctgggcaagagcatcctggtgcccaatgaggagctgtccatggtgatgagcagcaagaagaagctgaccaagaagacagagagccagagccagaagaggagcctgcacagcgtgtctgaggagaggacagatgagatgacccacaaggagaccaatgagcaggaggagcggctgctggccacagccagcttcaccaagagcagccgcagcagcaggaccaggagcagcaaggccatcctgctgcctgacctgtctgagcccaacaatgagcccctcttcagccctgccagcgaggtgcccaggaaggccaaggccaagaagattgaggtgcctgcccagctgaaggagctggtgtctgacctgagcagccagtttgtgatcagccccccagccctgcggagccggcagaagaacaccagcaacaagaacaagctggaggatgagctgaaggatgatgcccagagcgtggagaccctgggcaagcccaaggccaagaggatccgcaccagcaagaccaagcaggccagcaagaacacagagaaggagagcgcctggagccccccacccatcgagatccgcctcatcagccccctggccagccctgcagatggagtgaagagcaagcccaggaagaccacagaggtgactggaacaggcctgggcaggaacaggaagaagctgagcagctaccccaagcagatcctgcggaggaagatgctgtag

SEQ ID NO: 144213 - DNA, 6906 bp, synthetic construct
  misc_feature 1..6906: note = Description of Artificial Sequence: Synthetic coding sequence
  source 1..6906: mol_type = other DNA
atggacagcctggccggcctgagcccccgggaggccgccggcgtgctgagcctgagctgtgtgggcgtgtgcagcacctgtgcctgggcctggccccacggctccatgagggacctgcgggcccaggtgaccagcggcctgctgcccttccctgaggtgaccctgcaggccctgggggaggatgagatcaccctggagagcgtgctgcggggcaagtttgctgctgggaagaatggcctggcctgcctggcctgtggcccccagctggaggtggtgaacagcatcaccggggagcggctgagcgcctaccgcttcagcggcgtgaatgagcagccccctgtggtgctggccgtgaaggagttctcctggcagaagaggacaggcctgctgattggcctggaggagacagagggctctgtgctgtgcctgtatgacctgggcatcagcaaggtggtgaaggctgtggtgctgcccggccgggtgacagccatcgagcccatcatcaaccacggcggggccagcgccagcacccagcacctgcaccccagcctgcgctggctgtttggagtggccgctgtggtgacagatgtgggccagatcctgctggtggacctgtgcctggatgacctgagctgcaaccagaatgaggtggaggccagtgacctggaggtgctgaccggcatcccagctgaggtgccccacatccgggagagcgtgatgaggcagggccgccacctgtgcttccagctggtgagccccaccggcacagctgtgtccaccctgagctacatcagcaggaccaaccagctggccgtgggcttcagtgatggctacctggccctgtggaacatgaagtccatgaagcgggagtactacatccagctggagagcggccaggtgcctgtgtatgctgtgaccttccaggagccagaaaatgaccccaggaactgctgctacctgtgggccgtgcagagcacccaggacagtgaaggagatgtgctgagcctgcacctgctgcagctggcctttggaaacaggaagtgcctggccagcggccagatcctgtatgagggcctggagtactgtgaggagcgctacaccctggacctgactggaggcatgttccccctgcggggccagaccagcaacaccaagctgctgggctgccagagcattgagaagttccgcagccacggggaccgggaggagggcgtgaatgaggccctgagcccagacacctctgtgtctgtgttcacctggcaggtgaacatctacggccagggcaagcccagcgtgtacctgggcctgtttgacatcaaccgctggtaccacgcccagatgccagacagcctgcggtctggagagtacctgcacaactgcagctactttgccctgtggagcctggagagcgtggtgtccaggaccagcccccacggcatcctggacatcctggtgcatgagaggagcctgaacagaggagtgcccccatcctacccacctcctgagcagttcttcaaccccagcacctacaactttgatgccacctgcctgctgaacagcggcgtggtgcacctgacctgcaccggcttccagaaggagaccctgaccttcctgaagaagagcggccccagcctgaatgagctgatcccagatggctacaaccgctgcctggtggccggcctgctgagccccaggtttgtggatgtgcagcccagcagcctgagccaggaggagcagctggaggccatcctgtctgctgccatccagaccagcagcctgggcctgctgaccggctacatccgccgctggatcacagaggagcagcccaacagcgccaccaacctgcgctttgtgctggagtggacctggaacaaggtggtgctgaccaaggaggagtttgaccggctgtgtgtgcccctgtttgatggcagctgccacttcatggacccccagaccatccagagcatccagcagtgctacctgctgctgagcaacctgaacatcgtgctgagctgctttgccagcgaggcccgggagatcacagagcggggcctgattgacctgagcaacaagtttgtggtgagccacctgatctgccagtatgcccaggtggtgctgtggttcagccacagcggcctgctgcctgagggcattgatgattctgtgcagctgagccggctgtgctacaactaccctgtgatccagaactactacaccagccggcggcagaagtttgagcggctgagccggggcaagtggaacccagactgcctgatgattgatggcctggtgtcccagctgggggagagaattgagaagctgtggaagagagatgagggcggcaccgggaagtaccccccagccagcctgcatgctgtgctggacatgtacctgctggatggagtgacagaagctgccaagcacagcatcaccatctacctgctgctggacatcatgtacagcttccccaacaagacagacacccccatcgagagcttccccaccgtgtttgccatctcctggggccaggtgaagctgatccagggcttctggctgattgaccacaatgactatgagagcggcctggacctgctcttccacccagccacagccaagcccctgtcctggcagcacagcaagatcatccaggccttcatgagccagggcgagcaccggcaggccctgcgctacatccagaccatgaagcccaccgtgtcctctggaaatgatgtgatcctgcacctgactgtgctgctcttcaaccgctgcatggtggaggcctggaacttcctgcggcagcactgcaaccggctgaacatcgaggagctgctgaagcacatgtatgaggtgtgccaggagatgggcctgatggaggacctgctgaagctgcccttcacagacacagagcaggagtgcctggtgaagttcctgcagagcagcgcctctgtgcagaaccacgagttcctgctggtgcaccacctgcagagggccaactacgtgcctgccctgaagctgaaccagaccctgaagatcaacgtgatgaatgaccgggacccccggctgcgggagaggagcctggccaggaacagcatcctggaccagtatggcaagatcctgccccgggtgcacaggaagctggccatcgagcgggccaagccctaccacctgagcaccagcagcgtcttccggctggtgtcccggcccaagcccctgtctgctgtgcccaagcaggtggtgacaggcaccgtgctgaccaggtctgtgttcatcaacaacgtgctgagcaagattggagaggtgtgggccagcaaggagcccatcaacagcaccacccccttcaacagcagcaagattgaggagcccagccccatcgtgtacagcctgcctgcccctgagctgcctgaggccttcttcggcacccccatcagcaaggccagccagaagatcagccggctgctggacctggtggtgcagcctgtgccccggcccagccagtgcagcgagttcatccagcagagctccatgaagagccccctgtacctggtgagccgcagcctgcccagcagcagccagctgaagggcagcccccaggccatcagccgggccagcgagctgcacctgctggagacccccctggtggtgaagaaggccaagagcctggccatgtctgtgaccaccagcggcttcagcgagttcaccccccagagcatcctgcggagcaccctgcggagcacccccctggccagccccagccccagccctggccgcagcccccagaggctgaaggagacccgcatcagctttgtggaggaggatgtgcaccccaagtggatccctggagctgctgatgacagcaagctggaggtgttcaccacccccaagaagtgtgctgtgcctgtggagacagagtggctgaagagcaaggacaggaccaccagcttcttcctgaacagccctgagaaggagcaccaggagatggatgagggcagccagagcctggagaagctggatgtgtccaagggcaacagctctgtgtccatcaccagtgatgagaccaccctggagtaccaggatgcccccagccctgaggacctggaggagaccgtcttcaccgccagcaagcccaagagcagcagcacagccctgaccaccaacgtgacagagcagacagagaaggatggagacaaggatgtgtttgccagcgaggtgacccccagcgacctgcagaagcagatgggcaacctggaggatgctgagaccaaggacctgctggtggccgctgaggccttcagcgagctgaaccacctgagccctgtgcagggcacagaggccagcctgtgtgcccccagcgtgtatgagggcaagatcttcacccagaagagcaaggtgcctgtgctggatgagggcctgacctctgtggagacctacaccccagccatccgggccaatgacaacaagtccatggctgatgtgctgggagatggcggcaacagcagcctgaccatcagcgagggccccatcgtgtctgaaagaaggctgaaccaggaggtggccctgaacctgaaggaggaccacgaggtggaggtgggcgtgctgaaggagagcgtggacctgcctgaggagaagctgcccatcagtgacagccccccagacacccaggagatccacgtgattgagcaggagaagctggaggcccaggacagcggggaggaggccaggaacctgtccttcaatgagctgtaccccagcggcaccctgaagctgcagtacaactttgacaccatcgaccagcagttctgtgacctggccgacaacaaggacacagcagaatgtgacattgctgaggtggatggagagctgtttgtggcccagagcaacttcaccctcatcctggagggggaggagggggaggtggagcccggggactttgccagcagtgatgtgctgcccaaggccgccaacacagccacagaggagaagctggtgtgcagcggggagaatgacaaccacggccagatcgccaacctgcccagcgctgtgaccagtgaccagaagagccagaaggtggacaccctgccctacgtgcctgagcccatcaaggtggccatcgccgagaacctgctggatgtgatcaaggacaccaggagcaaggagatcaccagtgacaccatggagcagagcatccacgagaccatccccctggtgtcccagaacatcatgtgccccaccaagctggtgaagagcgccttcaagacagcccaggagaccagcaccatgaccatgaatgtgtcccaggtggatgatgtggtgagcagcaagaccaggacccggggccagaggatccagaatgtgaatgtgaagagcgcccagcaggaggccagcgcagatgtggccacccccaagatgcctggccagagcgtgaggaagaagaccaggaaggccaaggagatcagcgaggccagcgagaacatctacagtgatgtgcggggcctgagccagaaccagcagatcccccagaacagcgtgaccccaagaagaggccgcaggaagaaggaggtgaaccaggacatcctggagaacaccagctctgtggagcaggagctgcagatcaccaccggccgggagagcaagaggctgaagagcagccagctgctggagcctgctgtggaggagaccaccaagaaggaggtgaaggtgtcctctgtgaccaagaggaccccccggcgcatcaagaggtctgtggagaaccaggagagcgtggagatcatcaatgacctgaaggtgtccacagtgaccagccccagcaggatgatcaggaagctgcggagcaccaacctggatgccagcgagaacacaggcaacaagcaggatgacaagagcagtgacaagcagctgcgcatcaagcacgtgagaagagtgcggggccgggaggtgagccccagtgatgtgcgggaggacagcaacctggagagcagccagctgactgtgcaggccgagtttgacatgtctgccatccccaggaagaggggccggcccaggaagatcaaccccagtgaagatgtgggcagcaaggctgtgaaggaggagaggagccccaagaagaaggaggcccccagcatcagaagaagaagcaccaggaacaccccagccaagtcagaaaatgtggatgtgggcaagccagccctgggcaagagcatcctggtgcccaatgaggagctgtccatggtgatgagcagcaagaagaagctgaccaagaagacagagagccagagccagaagaggagcctgcacagcgtgtctgaggagaggacagatgagatgacccacaaggagaccaatgagcaggaggagcggctgctggccacagccagcttcaccaagagcagccgcagcagcaggaccaggagcagcaaggccatcctgctgcctgacctgtctgagcccaacaatgagcccctcttcagccctgccagcgaggtgcccaggaaggccaaggccaagaagattgaggtgcctgcccagctgaaggagctggtgtctgacctgagcagccagtttgtgatcagccccccagccctgcggagccggcagaagaacaccagcaacaagaacaagctggaggatgagctgaaggatgatgcccagagcgtggagaccctgggcaagcccaaggccaagaggatccgcaccagcaagaccaagcaggccagcaagaacacagagaaggagagcgcctggagccccccacccatcgagatccgcctcatcagccccctggccagccctgcagatggagtgaagagcaagcccaggaagaccacagaggtgactggaacaggcctgggcaggaacaggaagaagctgagcagctaccccaagcagatcctgcggaggaagatgctgtag

SEQ ID NO: 144214 - DNA, 6801 bp, synthetic construct
  misc_feature 1..6801: note = Description of Artificial Sequence: Synthetic coding sequence
  source 1..6801: mol_type = other DNA
atgagggacctgcgggcccaggtgaccagcggcctgctgcccttccctgaggtgaccctgcaggccctgggagaagatgagatcaccctggagagcgtgctgcggggcaagtttgctgctgggaagaatggcctggcctgcctggcctgtggcccccagctggaggtggtgaacagcatcactggagagcggctgagcgcctaccgcttctctggagtgaatgagcagccccctgtggtgctggccgtgaaggagttctcctggcagaagaggacaggcctgctgattggcctggaggagacagagggctctgtgctgtgcctgtatgacctgggcatcagcaaggtggtgaaggctgtggtgctgcccggccgggtgacagccatcgagcccatcatcaaccacggcggggccagcgccagcacccagcacctgcaccccagcctgcgctggctgtttggagtggccgctgtggtgacagatgtgggccagatcctgctggtggacctgtgcctggatgacctgagctgcaaccagaatgaggtggaggccagtgacctggaggtgctgaccggcatcccagctgaggtgccccacatccgggagagcgtgatgaggcagggccgccacctgtgcttccagctggtgagccccactggaacagctgtgtccaccctgagctacatcagcaggaccaaccagctggccgtgggcttcagtgatggctacctggccctgtggaacatgaagtccatgaagcgggagtactacatccagctggagagcggccaggtgcctgtgtatgctgtgaccttccaggagccagaaaatgaccccaggaactgctgctacctgtgggccgtgcagagcacccaggacagtgaaggagatgtgctgagcctgcacctgctgcagctggccttcggcaacaggaagtgcctggccagcggccagatcctgtatgagggcctggagtactgtgaggagcgctacaccctggacctgaccggcggcatgttccccctgcggggccagaccagcaacaccaagctgctgggctgccagagcattgagaagttccgcagccatggagaccgggaggagggcgtgaatgaggccctgagcccagacacctctgtgtctgtgttcacctggcaggtgaacatctacggccagggcaagcccagcgtgtacctgggcctgtttgacatcaaccgctggtaccacgcccagatgccagacagcctgcggagcggggagtacctgcacaactgcagctactttgccctgtggagcctggagagcgtggtgtccaggaccagcccccacggcatcctggacatcctggtgcatgagaggagcctgaacagaggagtgccccccagctacccacctcctgagcagttcttcaaccccagcacctacaactttgatgccacctgcctgctgaacagcggcgtggtgcacctgacctgcaccggcttccagaaggagaccctgaccttcctgaagaagagcggccccagcctgaatgaactcatcccagatggctacaaccgctgcctggtggccggcctgctgagccccaggtttgtggatgtgcagcccagcagcctgagccaggaggagcagctggaggccatcctgtctgctgccatccagaccagcagcctgggcctgctgaccggctacatccgccgctggatcacagaggagcagcccaacagcgccaccaacctgcgctttgtgctggagtggacctggaacaaggtggtgctgaccaaggaggagtttgaccggctgtgtgtgcccctgtttgatggcagctgccacttcatggacccccagaccatccagagcatccagcagtgctacctgctgctgagcaacctgaacatcgtgctgagctgctttgccagcgaggcccgggagatcacagagcggggcctgattgacctgagcaacaagtttgtggtgagccacctgatctgccagtatgcccaggtggtgctgtggttcagccacagcggcctgctgcctgagggcattgatgacagcgtgcagctgagccggctgtgctacaactaccctgtgatccagaactactacaccagccggcggcagaagtttgagcggctgagccggggcaagtggaacccagactgcctgatgattgatggcctggtgtcccagctgggggagcgcatcgagaagctgtggaagagagatgaaggaggcaccgggaagtaccccccagccagcctgcatgctgtgctggacatgtacctgctggatggagtgacagaggccgccaagcacagcatcaccatctacctgctgctggacatcatgtacagcttccccaacaagacagacacccccatcgagagcttccccaccgtgtttgccatctcctggggccaggtgaagctgatccagggcttctggctgattgaccacaatgactatgaaagtggcctggacctgctcttccacccagccacagccaagcccctgtcctggcagcacagcaagatcatccaggccttcatgagccagggcgagcaccggcaggccctgcgctacatccagaccatgaagcccaccgtgtcctctggaaatgatgtgatcctgcacctgactgtgctgctcttcaaccgctgcatggtggaggcctggaacttcctgcggcagcactgcaaccggctgaacatcgaggagctgctgaagcacatgtatgaggtgtgccaggagatgggcctgatggaggacctgctgaagctgcccttcacagacacagagcaggagtgcctggtgaagttcctgcagagcagcgcctctgtgcagaaccacgagttcctgctggtgcaccacctgcagagggccaactacgtgcctgccctgaagctgaaccagaccctgaagatcaacgtgatgaatgaccgggacccccggctgcgggagaggagcctggccagaaattccatcctggaccagtatggcaagatcctgccccgggtgcacaggaagctggccatcgagcgggccaagccctaccacctgagcaccagctctgtgttccggctggtgtcccggcccaagcccctgtctgctgtgcccaagcaggtggtgactggaacagtgctgaccaggagcgtcttcatcaacaacgtgctgagcaagatcggggaggtgtgggccagcaaggagcccatcaacagcaccacccccttcaacagcagcaagattgaggagcccagccccatcgtgtacagcctgcctgcccctgagctgcctgaggccttcttcggcacccccatcagcaaggccagccagaagatcagccggctgctggacctggtggtgcagcctgtgccccggcccagccagtgcagcgagttcatccagcagagctccatgaagagccccctgtacctggtgagccgcagcctgcccagcagcagccagctgaagggcagcccccaggccatcagccgggccagcgagctgcacctgctggagacccccctggtggtgaagaaggccaagagcctggccatgtctgtgaccaccagcggcttcagcgagttcaccccccagagcatcctgcggagcaccctgcggagcacccccctggccagccccagccccagccctggccgcagcccccagaggctgaaggagacccgcatcagctttgtggaggaggatgtgcaccccaagtggatccctggagctgctgatgacagcaagctggaggtgttcaccacccccaagaagtgtgctgtgcctgtggagacagagtggctgaagagcaaggacaggaccaccagcttcttcctgaacagccctgagaaggagcaccaggagatggatgagggcagccagagcctggagaagctggatgtgtccaaaggaaacagctctgtgtccatcaccagtgatgagaccaccctggagtaccaggatgcccccagccctgaggacctggaggagaccgtcttcaccgccagcaagcccaagagcagcagcacagccctgaccaccaacgtgacagagcagacagagaaggatggagacaaggatgtgtttgccagcgaggtgacccccagcgacctgcagaagcagatgggcaacctggaggatgctgagaccaaggacctgctggtggccgctgaggccttcagcgagctgaaccacctgagccctgtgcagggcacagaggccagcctgtgtgcccccagcgtgtatgagggcaagatcttcacccagaagagcaaggtgcctgtgctggatgagggcctgacctctgtggagacctacaccccagccatccgggccaatgacaacaagtccatggctgatgtgctgggagatggcggcaacagcagcctgaccatcagcgagggccccatcgtgtctgagcggcggctgaaccaggaggtggccctgaacctgaaggaggaccacgaggtggaggtgggcgtgctgaaggagagcgtggacctgcctgaggagaagctgcccatcagtgacagccccccagacacccaggagatccacgtgattgagcaggagaagctggaggcccaggacagcggggaggaggccaggaacctgtccttcaatgagctgtaccccagcggcaccctgaagctgcagtacaactttgacaccatcgaccagcagttctgtgacctggccgacaacaaggacacagcagaatgtgacattgctgaggtggatggagagctgtttgtggcccagagcaacttcaccctcatcctggagggggaggagggggaggtggagcccggggactttgccagcagtgatgtgctgcccaaggccgccaacacagccacagaggagaagctggtgtgcagcggagaaaatgacaaccacggccagatcgccaacctgcccagcgctgtgaccagtgaccagaagagccagaaggtggacaccctgccctacgtgcctgagcccatcaaggtggccatcgccgagaacctgctggatgtgatcaaggacaccaggagcaaggagatcaccagtgacaccatggagcagagcatccacgagaccatccccctggtgtcccagaacatcatgtgccccaccaagctggtgaagagcgccttcaagacagcccaggagaccagcaccatgaccatgaatgtgtcccaggtggatgatgtggtgagcagcaagaccaggacccggggccagaggatccagaatgtgaatgtgaagagcgcccagcaggaggccagcgcagatgtggccacccccaagatgcctggccagagcgtgaggaagaagaccaggaaggccaaggagatcagcgaggccagcgagaacatctacagtgatgtgcggggcctgagccagaaccagcagatcccccagaacagcgtgaccccccggcggggccgcaggaagaaggaggtgaaccaggacatcctggagaacaccagctctgtggagcaggagctgcagatcaccaccggccgggagagcaagaggctgaagagcagccagctgctggagcctgctgtggaggagaccaccaagaaggaggtgaaggtgtcctctgtgaccaagaggaccccccggcgcatcaagaggtctgtggagaaccaggagagcgtggagatcatcaatgacctgaaggtgtccacagtgaccagccccagcaggatgatcaggaagctgcggagcaccaacctggatgcctctgaaaatactggaaacaagcaggatgacaagagcagtgacaagcagctgcgcatcaagcacgtgcggcgggtgcggggccgggaggtgagccccagtgatgtgcgggaggacagcaacctggagagcagccagctgactgtgcaggccgagtttgacatgtctgccatccccaggaagaggggccggcccaggaagatcaaccccagtgaagatgtgggcagcaaggctgtgaaggaggagaggagccccaagaagaaggaggcccccagcatcagaagaagaagcaccaggaacaccccagccaagtcagaaaatgtggatgtgggcaagccagccctgggcaagagcatcctggtgcccaatgaggagctgtccatggtgatgagcagcaagaagaagctgaccaagaagacagagagccagagccagaagaggagcctgcacagcgtgtctgaggagaggacagatgagatgacccacaaggagaccaatgagcaggaggagcggctgctggccacagccagcttcaccaagagcagccgcagcagcaggaccaggagcagcaaggccatcctgctgcctgacctgtctgagcccaacaatgagcccctcttctccccagccagcgaggtgcccaggaaggccaaggccaagaagattgaggtgcctgcccagctgaaggagctggtgtctgacctgagcagccagtttgtgatcagccccccagccctgcggagccggcagaagaacaccagcaacaagaacaagctggaggatgagctgaaggatgatgcccagagcgtggagaccctgggcaagcccaaggccaagaggatccgcaccagcaagaccaagcaggccagcaagaacacagagaaggagagcgcctggagccccccacccatcgagatccgcctcatcagccccctggccagccctgcagatggagtgaagagcaagcccaggaagaccacagaggtgacaggcaccggcctgggcaggaacaggaagaagctgagcagctaccccaagcagatcctgcggaggaagatgctgtag

SEQ ID NO: 144215 - DNA, 3567 bp, synthetic construct
  misc_feature 1..3567: note = Description of Artificial Sequence: Synthetic coding sequence
  source 1..3567: mol_type = other DNA
atgaaggccgcagatgagcccgcctacctgactgtgggcacagatgtgtctgccaagtacagaggagccttctgtgaggccaagatcaagacagtgaagaggctggtgaaggtgaaggtgctgctgaagcaggacaacaccacccagctggtgcaggatgaccaggtgaagggccccctgcgggtgggcgccatcgtggagaccaggaccagtgatggcagcttccaggaggccatcatcagcaagctgacagatgcctcctggtacacagtggtgtttgatgatggagatgagaggaccctgcggaggaccagcctgtgcctgaagggggagcggcactttgctgagagcgagaccctggaccagctgcccctgaccaaccctgagcacttcggcacccctgtgattgccaagaagaccaacagaggccgccgcagcagcctgcctgtgacagaagatgagaaggaggaggagagcagcgaggaggaggatgaggacaagaggcggctgaatgatgagctgctgggcaaggtggtgtctgtggtgtctgccacagagaggacagagtggtacccagccctggtgatcagccccagctgcaatgatgacatcaccgtgaagaaggaccagtgcctggtgcgctccttcatcgacagcaagttctacagcatcgccaggaaggacatcaaggaggtggacatcctgaacctgcctgagagcgagctgagcaccaagccaggcctgcagaaggccagcatcttcctgaagaccagggtggtgcctgacaactggaagatggacatcagcgagatcctggagagcagcagcagtgatgatgaagatggccctgctgaggagaatgatgaggagaaggagaaggaggccaagaagacagaggaggaggtgcctgaggaggagctggaccctgaggagcgggacaacttcctgcagcagctgtacaagttcatggaggaccggggcacccccatcaacaagccccctgtgctgggctacaaggacctgaacctcttcaagctgttccggctggtgtaccaccagggcggctgtgacaacattgattctggagctgtgtggaagcagatctacatggacctgggcatccccatcctgaacagcgctgccagctacaacgtgaagacagcctacaggaagtacctgtatggctttgaggagtactgccgcagcgccaacatccagttcagaacagtgcaccaccacgagcccaaggtgaaggaggagaagaaggacctggaggagagcatggaggaggccctgaagctggaccaggagatgcccctgacagaggtgaagtctgagccagaagaaaatattgacagcaacagcgagagcgagcgggaggagattgagctgaagagcccccggggcagaagaagaattgccagagatgtgaacagcatcaagaaggagattgaggaggagaagacagaggacaagctgaaggacaatgacacagagaacaaggatgtggatgatgattatgaaacagctgagaagaaggaaaatgagctgctgctgggcaggaagaacacccccaagcagaaggagaagaagatcaagaagcaggaggacagcgacaaggacagtgatgaggaggaggagaagagccaggagcgggaggagacagagagcaaatgtgacagcgagggggaggaggatgaggaggacatggagccctgcctgaccggcaccaaggtgaaggtgaagtatggccggggcaagacccagaagatctatgaggccagcatcaagagcacagaaattgatgatggagaggtgctgtacctggtgcactactacggctggaatgtgcgctatgatgagtgggtgaaggctgaccgcatcatctggcccctggacaagggcggccccaagaagaagcagaagaagaaggccaagaacaaggaggacagcgagaaggatgagaagagagatgaggagcggcagaagagcaagaggggccggccccccctgaagagcaccctgagcagcaacatgccctacggcctgagcaagacagccaacagcgagggcaagagtgacagctgcagcagtgacagcgagacagaagatgccctggagaagaacctgatcaatgaggagctgagcctgaaggatgagctggagaagaatgaaaacctgaatgatgacaagctggatgaggagaaccccaagatcagcgcccacatcctgaaggaaaatgacaggacccagatgcagcccctggagaccctgaagctggaggtgggggagaatgagcagatcgtgcagatcttcggcaacaagatggagaagacagaggaggtgaagaaggaggccgagaagagccccaagggcaaaggaagaagaagcaagaccaaggacctgagcctggagatcatcaagatcagcagctttggccagaatgaagctggcagcgagccccacatcgaggcccacagcctggagctgagcagcctggacaacaagaacttcagcagcgccacagaagatgaaattgaccagtgtgtgaaggagaagaagctgaagaggaagatcctgggccagagcagccctgagaagaagatcagaattgaaaatggcatggagatgaccaacacagtgtcccaggagaggaccagtgactgcatcggcagcgagggcatgaagaacctgaactttgagcagcactttgaaagagaaaatgaaggcatgcccagcctgattgctgagagcaaccagtgcatccagcagctgaccagcgagagatttgacagccctgctgaggagaccgtgaacatccccctgaaggaggatgaagatgccatgcccctcatcggccctgagaccctggtgtgccacgaggtggacctggatgacctggatgagaaggacaagaccagcattgaagatgtggccgtggagagcagcgagagcaacagcctggtgtccatccccccagccctgccccctgtggtgcagcacaacttctctgtggccagccccctgaccctgagccaggatgagagccgctctgtgaagtctgagagtgacatcaccatcgaggtggacagcattgctgaggagagccaggagggcctgtgtgagcgggagagcgccaatggatttgagaccaacgtggccagcggcacctgcagcatcatcgtgcaggagcgggagagccgggagaagggccagaagaggcccagtgatggcaacagcggcctgatggccaagaagcagaagaggacccccaagaggaccagcgctgctgccaagaatgagaagaatggaacagatgagctggacaacatgaacagcacagagcgcatctccttcctgcaggagaagctgcaggagatcaggaagtactacatgagcctgaagtctgaggtggccaccatcgacagaagaaggaagaggctgaagaagaaggaccgggaggtgtcccatgctggggcctccatgagcagcgccagcagtgacaccggcatgagccccagcagcagcagccccccccagaatgtgctggccgtggagtgcaggtag

SEQ ID NO: 144216 - DNA, 3774 bp, synthetic construct
  misc_feature 1..3774: note = Description of Artificial Sequence: Synthetic coding sequence
  source 1..3774: mol_type = other DNA
atgaaggccgcagatgagcccgcctacctgactgtgggcacagatgtgtctgccaagtacagaggagccttctgtgaggccaagatcaagacagtgaagaggctggtgaaggtgaaggtgctgctgaagcaggacaacaccacccagctggtgcaggatgaccaggtgaagggccccctgcgggtgggcgccatcgtggagaccaggaccagtgatggcagcttccaggaggccatcatcagcaagctgacagatgcctcctggtacacagtggtgtttgatgatggagatgagaggaccctgcggaggaccagcctgtgcctgaagggggagcggcactttgctgagagcgagaccctggaccagctgcccctgaccaaccctgagcacttcggcacccctgtgattgccaagaagaccaacagaggccgccgcagcagcctgcctgtgacagaagatgagaaggaggaggagagcagcgaggaggaggatgaggacaagaggcggctgaatgatgagctgctgggcaaggtggtgtctgtggtgtctgccacagagaggacagagtggtacccagccctggtgatcagccccagctgcaatgatgacatcaccgtgaagaaggaccagtgcctggtgcgctccttcatcgacagcaagttctacagcatcgccaggaaggacatcaaggaggtggacatcctgaacctgcctgagagcgagctgagcaccaagccaggcctgcagaaggccagcatcttcctgaagaccagggtggtgcctgacaactggaagatggacatcagcgagatcctggagagcagcagcagtgatgatgaagatggccctgctgaggagaatgatgaggagaaggagaaggaggccaagaagacagaggaggaggtgcctgaggaggagctggaccctgaggagcgggacaacttcctgcagcagctgtacaagttcatggaggaccggggcacccccatcaacaagccccctgtgctgggctacaaggacctgaacctcttcaagctgttccggctggtgtaccaccagggcggctgtgacaacattgattctggagctgtgtggaagcagatctacatggacctgggcatccccatcctgaacagcgctgccagctacaacgtgaagacagcctacaggaagtacctgtatggctttgaggagtactgccgcagcgccaacatccagttcagaacagtgcaccaccacgagcccaaggtgaaggaggagaagaaggacctggaggagagcatggaggaggccctgaagctggaccaggagatgcccctgacagaggtgaagtctgagccagaagaaaatattgacagcaacagcgagagcgagcgggaggagattgagctgaagagcccccggggcagaagaagaattgccagagatgtgaacagcatcaagaaggagattgaggaggagaagacagaggacaagctgaaggacaatgacacagagaacaaggatgtggatgatgattatgaaacagctgagaagaaggaaaatgagctgctgctgggcaggaagaacacccccaagcagaaggagaagaagatcaagaagcaggaggacagcgacaaggacagtgatgaggaggaggagaagagccaggagcgggaggagacagagagcaaatgtgacagcgagggggaggaggatgaggaggacatggagccctgcctgaccggcaccaaggtgaaggtgaagtatggccggggcaagacccagaagatctatgaggccagcatcaagagcacagaaattgatgatggagaggtgctgtacctggtgcactactacggctggaatgtgcgctatgatgagtgggtgaaggctgaccgcatcatctggcccctggacaagggcggccccaagaagaagcagaagaagaaggccaagaacaaggaggacagcgagaaggatgagaagagagatgaggagcggcagaagagcaagaggggccggccccccctgaagagcaccctgagcagcaacatgccctacggcctgagcaagacagccaacagcgagggcaagagtgacagctgcagcagtgacagcgagacagaagatgccctggagaagaacctgatcaatgaggagctgagcctgaaggatgagctggagaagaatgaaaacctgaatgatgacaagctggatgaggagaaccccaagatcagcgcccacatcctgaaggaaaatgacaggacccagatgcagcccctggagaccctgaagctggaggtgggggagaatgagcagatcgtgcagatcttcggcaacaagatggagaagacagaggaggtgaagaaggaggccgagaagagccccaagggcaaaggaagaagaagcaagaccaaggacctgagcctggagatcatcaagatcagcagctttggccagaatgaagctggcagcgagccccacatcgaggcccacagcctggagctgagcagcctggacaacaagaacttcagcagcgccacagaagatgaaattgaccagtgtgtgaaggagaagaagctgaagaggaagatcctgggccagagcagccctgagaagaagatcagaattgaaaatggcatggagatgaccaacacagtgtcccaggagaggaccagtgactgcatcggcagcgagggcatgaagaacctgaactttgagcagcactttgaaagagaaaatgaaggcatgcccagcctgattgctgagagcaaccagtgcatccagcagctgaccagcgagagatttgacagccctgctgaggagaccgtgaacatccccctgaaggaggatgaagatgccatgcccctcatcggccctgagaccctggtgtgccacgaggtggacctggatgacctggatgagaaggacaagaccagcattgaagatgtggccgtggagagcagcgagagcaacagcctggtgtccatccccccagccctgccccctgtggtgcagcacaacttctctgtggccagccccctgaccctgagccaggatgagagccgctctgtgaagtctgagagtgacatcaccatcgaggtggacagcattgctgaggagagccaggagggcctgtgtgagcgggagagcgccaatggatttgagaccaacgtggccagcggcacctgcagcatcatcgtgcaggagcgggagagccgggagaagggccagaagaggcccagtgatggcaacagcggcctgatggccaagaagcagaagaggacccccaagaggaccagcgctgctgccaagaatgagaagaatggaacaggccagagcagtgacagcgaggacctgcctgtgctggacaacagcagcaagtgcacccctgtgaagcacctgaatgtgtccaagccccagaagctggcccggagccctgcccgcatcagcccccacatcaaggatggagagaaggacaagcaccgggagaagcaccccaacagcagccccaggacctacaagtggagcttccagctgaatgagctggacaacatgaacagcacagagcgcatctccttcctgcaggagaagctgcaggagatcaggaagtactacatgagcctgaagtctgaggtggccaccatcgacagaagaaggaagaggctgaagaagaaggaccgggaggtgtcccatgctggggcctccatgagcagcgccagcagtgacaccggcatgagccccagcagcagcagccccccccagaatgtgctggccgtggagtgcaggtag

SEQ ID NO: 144217 - DNA, 3612 bp, synthetic construct
  misc_feature 1..3612: note = Description of Artificial Sequence: Synthetic coding sequence
  source 1..3612: mol_type = other DNA
atgaaggccgcagatgagcccgcctacctgactgtgggcacagatgtgtctgccaagtacagaggagccttctgtgaggccaagatcaagacagtgaagaggctggtgaaggtgaaggtgctgctgaagcaggacaacaccacccagctggtgcaggatgaccaggtgaagggccccctgcgggtgggcgccatcgtggagaccaggaccagtgatggcagcttccaggaggccatcatcagcaagctgacagatgcctcctggtacacagtggtgtttgatgatggagatgagaggaccctgcggaggaccagcctgtgcctgaagggggagcggcactttgctgagagcgagaccctggaccagctgcccctgaccaaccctgagcacttcggcacccctgtgattgccaagaagaccaacagaggccgccgcagcagcctgcctgtgacagaagatgagaaggaggaggagagcagcgaggaggaggatgaggacaagaggcggctgaatgatgagctgctgggcaaggtggtgtctgtggtgtctgccacagagaggacagagtggtacccagccctggtgatcagccccagctgcaatgatgacatcaccgtgaagaaggaccagtgcctggtgcgctccttcatcgacagcaagttctacagcatcgccaggaaggacatcaaggaggtggacatcctgaacctgcctgagagcgagctgagcaccaagccaggcctgcagaaggccagcatcttcctgaagaccagggtggtgcctgacaactggaagatggacatcagcgagatcctggagagcagcagcagtgatgatgaagatggccctgctgaggagaatgatgaggagaaggagaaggaggccaagaagacagaggaggaggtgcctgaggaggagctggaccctgaggagcgggacaacttcctgcagcagctgtacaagttcatggaggaccggggcacccccatcaacaagccccctgtgctgggctacaaggacctgaacctcttcaagctgttccggctggtgtaccaccagggcggctgtgacaacattgattctggagctgtgtggaagcagatctacatggacctgggcatccccatcctgaacagcgctgccagctacaacgtgaagacagcctacaggaagtacctgtatggctttgaggagtactgccgcagcgccaacatccagttcagaacagtgcaccaccacgagcccaaggtgaaggaggagaagaaggacctggaggagagcatggaggaggccctgaagctggaccaggagatgcccctgacagaggtgaagtctgagccagaagaaaatattgacagcaacagcgagagcgagcgggaggagattgagctgaagagcccccggggcagaagaagaattgccagagatgtgaacagcatcaagaaggagattgaggaggagaagacagaggacaagctgaaggacaatgacacagagaacaaggatgtggatgatgattatgaaacagctgagaagaaggaaaatgagctgctgctgggcaggaagaacacccccaagcagaaggagaagaagatcaagaagcaggaggacagcgacaaggacagtgatgaggaggaggagaagagccaggagcgggaggagacagagagcaaatgtgacagcgagggggaggaggatgaggaggacatggagccctgcctgaccggcaccaaggtgaaggtgaagtatggccggggcaagacccagaagatctatgaggccagcatcaagagcacagaaattgatgatggagaggtgctgtacctggtgcactactacggctggaatgtgcgctatgatgagtgggtgaaggctgaccgcatcatctggcccctggacaagggcggccccaagaagaagcagaagaagaaggccaagaacaaggaggacagcgagaaggatgagaagagagatgaggagcggcagaagagcaagaggggccggccccccctgaagagcaccctgagcagcaacatgccctacggcctgagcaagacagccaacagcgagggcaagagtgacagctgcagcagtgacagcgagacagaagatgccctggagaagaacctgatcaatgaggagctgagcctgaaggatgagctggagaagaatgaaaacctgaatgatgacaagctggatgaggagaaccccaagatcagcgcccacatcctgaaggaaaatgacaggacccagatgcagcccctggagaccctgaagctggaggtgggggagaatgagcagatcgtgcagatcttcggcaacaagatggagaagacagaggaggtgaagaaggaggccgagaagagccccaagggcaaaggaagaagaagcaagaccaaggacctgagcctggagatcatcaagatcagcagctttggccagaatgaagctggcagcgagccccacatcgaggcccacagcctggagctgagcagcctggacaacaagaacttcagcagcgccacagaagatgaaattgaccagtgtgtgaaggagaagaagctgaagaggaagatcctgggccagagcagccctgagaagaagatcagaattgaaaatggcatggagatgaccaacacagtgtcccaggagaggaccagtgactgcatcggcagcgagggcatgaagaacctgaactttgagcagcactttgaaagagaaaatgaaggcatgcccagcctgattgctgagagcaaccagtgcatccagcagctgaccagcgagagatttgacagccctgctgaggagaccgtgaacatccccctgaaggaggatgaagatgccatgcccctcatcggccctgagaccctggtgtgccacgaggtggacctggatgacctggatgagaaggacaagaccagcattgaagatgtggccgtggagagcagcgagagcaacagcctggtgtccatccccccagccctgccccctgtggtgcagcacaacttctctgtggccagccccctgaccctgagccaggatgagagccgctctgtgaagtctgagagtgacatcaccatcgaggtggacagcattgctgaggagagccaggagggcctgtgtgagcgggagagcgccaatggatttgagaccaacgtggccagcggcacctgcagcatcatcgtgcaggagcgggagagccgggagaagggccagaagaggcccagtgatggcaacagcggcctgatggccaagaagcagaagaggacccccaagaggaccagcgctgctgccaagaatgagaagaatggaacaggccagagcagtgacagcgaggacctgcctgtgctggacaacagcaatgagctggacaacatgaacagcacagagcgcatctccttcctgcaggagaagctgcaggagatcaggaagtactacatgagcctgaagtctgaggtggccaccatcgacagaagaaggaagaggctgaagaagaaggaccgggaggtgtcccatgctggggcctccatgagcagcgccagcagtgacaccggcatgagccccagcagcagcagccccccccagaatgtgctggccgtggagtgcaggtag

SEQ ID NO: 144218 - DNA, 165 bp, synthetic construct
  misc_feature 1..165: note = Description of Artificial Sequence: Synthetic coding sequence
  source 1..165: mol_type = other DNA
atgaaggccgcagatgagcccgcctacctgactgtgggcacagatgtgtctgccaagtacagaggagccttctgtgaggccaagatcaagacagtgaagaggctggtgaaggtgaaggtgctgctgaagcaggacaacaccacccagctggtgcaggatgactag

SEQ ID NO: 144219 - DNA, 3567 bp, synthetic construct; identical to SEQ ID NO: 144215
  misc_feature 1..3567: note = Description of Artificial Sequence: Synthetic coding sequence
  source 1..3567: mol_type = other DNA

SEQ ID NO: 144220 - DNA, 3939 bp, synthetic construct
  misc_feature 1..3939: note = Description of Artificial Sequence: Synthetic coding sequence
  source 1..3939: mol_type = other DNA
atgaaggccctggatgagcccccctacctgactgtgggcacagatgtgtctgccaagtacagaggagccttctgtgaggccaagatcaagacagccaagaggctggtgaaggtgaaggtgaccttcagacatgacagcagcacagtggaggtgcaggatgaccacatcaagggccccctgaaggtgggcgccatcgtggaggtgaagaacctggatggagcctaccaggaggccgtcatcaacaagctgacagatgcctcctggtacacagtggtgtttgatgatggagatgagaagaccctgcggcgcagcagcctgtgcctgaagggggagcggcactttgctgagagcgagaccctggaccagctgcccctgaccaaccctgagcacttcggcacccctgtgattggcaagaagaccaacagaggccgccgcagcaaccacatccctgaggaggagagcagcagcagcagcagtgatgaagatgaagatgacaggaagcagattgatgagctgctgggcaaggtggtgtgtgtggactacatcagcctggacaagaagaaggccctgtggttccctgccctggtggtgtgcccagactgcagtgatgaaattgctgtgaagaaggacaacatcctggtgcgctccttcaaggatggcaagttcacctctgtgcccaggaaggatgtgcatgagatcaccagtgacacagcccccaagccagatgctgtgctgaagcaggcctttgagcaggccctggagttccacaagagcaggaccatcccagccaactggaagacagagctgaaggaggacagcagcagcagcgaggccgaggaggaggaggaggaggaggatgatgagaaggagaaggaggacaacagcagcgaggaggaggaggagattgagcccttccctgaggagcgggagaacttcctgcagcagctgtacaagttcatggaggaccggggcacccccatcaacaagaggcctgtgctgggctacagaaacctgaacctcttcaagctgttccggctggtgcacaagctgggcggctttgacaacatcgagagcggggctgtgtggaagcaggtgtaccaggacctgggcatccctgtgctgaacagcgctgctggctacaacgtgaagtgtgcctacaagaagtacctgtatggctttgaggagtactgccgcagcgccaacatcgagttccagatggccctgcctgagaaggtggtgaacaagcagtgcaaggaatgtgaaaatgtgaaggagatcaaggtgaaggaggagaatgaaacagagatcaaggagatcaagatggaggaggagaggaacatcatcccccgggaggagaagcccattgaagatgaaattgaaagaaaagaaaacatcaagcccagcctgggcagcaagaagaacctgctggagagcatccccacccacagcgaccaggagaaggaggtgaacatcaagaagccagaagataatgaaaacctggatgacaaggatgatgacaccaccagggtggatgagagcctgaacatcaaggtggaggccgaggaggagaaggccaagtctggagatgagaccaacaaggaggaggatgaagatgatgaggaggccgaggaggaggaggaggaggaggaggaggaggaggatgaagatgatgatgacaacaatgaggaggaggagtttgagtgctacccacctggcatgaaggtgcaggtgcgctatggccggggcaagaaccagaagatgtatgaggccagcatcaaggacagtgatgtggagggcggggaggtgctgtacctggtgcactactgcggctggaatgtgcgctatgatgagtggatcaaggctgacaagatcgtgcggcctgctgacaagaatgtgcccaagatcaagcacaggaagaagatcaagaacaagctggacaaggagaaggacaaggatgagaagtacagccccaagaactgcaagctgcggcggctgagcaagccacccttccagaccaaccccagccctgagatggtgtccaagctggacctgacagatgccaagaacagcgacacagcccacatcaagagcattgagatcaccagcatcctgaatggcctgcaggccagcgagagcagcgcagaagattctgagcaggaggatgagcggggggcccaggacatggacaacaacgggaaggaggagagcaagattgaccacctgaccaacaacagaaatgacctgatcagcaaggaggagcagaacagcagcagcctgctggaggagaacaaggtgcatgctgacctggtgatcagcaagcctgtgtccaagagccctgagcggctgaggaaggacatcgaggtgctgtctgaggacacagattatgaagaagatgaggtgaccaagaagaggaaggatgtgaagaaggacaccacagacaagagcagcaagccccagatcaagaggggcaagaggcgctactgcaacacagaggagtgcctgaagacaggcagccctgggaagaaggaggagaaggccaagaacaaggagagcctgtgcatggagaacagcagcaacagcagcagtgatgaagatgaggaggagaccaaggccaagatgacccccaccaagaagtacaacggcctggaggagaagaggaagagcctgcggaccaccggcttctacagcggcttcagcgaggtggccgagaagaggatcaagctgctgaacaacagtgatgagcggctgcagaacagccgggccaaggacaggaaggatgtgtggagcagcatccagggccagtggcccaagaagaccctgaaggagctgttcagtgacagcgacacagaagctgctgccagccccccccacccagcccctgaggagggcgtggccgaggagagcctgcagacagtggccgaggaggagagctgcagccccagcgtggagctggagaagcccccacctgtgaatgtggacagcaagcccatcgaggagaagacagtggaggtgaatgacaggaaggccgagttccccagcagcggcagcaacagcgtgctgaacaccccacccaccaccccagagagccccagctctgtgacagtgacagagggcagccggcagcagagctctgtgacagtgtctgagcccctggcccccaaccaggaggaggtgcgcagcatcaagtcagaaacagacagcaccatcgaggtggacagcgtggccggggagctgcaggacctgcagagcgagggcaacagcagccctgctggctttgatgcctctgtgagcagcagcagcagcaaccagcctgagcctgagcaccctgagaaggcctgcaccggccagaagagggtgaaggatgcccagggcggcggcagcagcagcaagaagcagaagaggagccacaaggccaccgtggtgaacaacaagaagaagggcaagggcaccaacagcagtgacagcgaggagctgtctgctggggagagcatcaccaagagccagcctgtgaagtctgtgtccacaggcatgaagagccacagcaccaagagccctgcccggacccagagccctggaaaatgtgggaagaatggagacaaggaccctgacctgaaggagcccagcaaccggctgcccaaggtgtacaagtggagcttccagatgtctgacctggagaacatgaccagcgctgagcgcatcaccatcctgcaggagaagctgcaggagatcaggaagcactacctgagcctgaagtctgaggtggccagcattgacagaagaaggaagaggctgaagaagaaggagcgggagagcgctgccaccagcagcagcagcagcagccccagcagcagcagcatcacagctgctgtgatgctgaccctggccgagcccagcatgagcagcgccagccagaatggcatgtctgtggagtgcaggtag

SEQ ID NO: 144221 - DNA, 3681 bp, synthetic construct
  misc_feature 1..3681: note = Description of Artificial Sequence: Synthetic coding sequence
  source 1..3681: mol_type = other DNA
atgaaggccctggatgagcccccctacctgactgtgggcacagatgtgtctgccaagtacagaggagccttctgtgaggccaagatcaagacagccaagaggctggtgaaggtgaaggtgaccttcagacatgacagcagcacagtggaggtgcaggatgaccacatcaagggccccctgaaggtgggcgccatcgtggaggtgaagaacctggatggagcctaccaggaggccgtcatcaacaagctgacagatgcctcctggtacacagtggtgtttgatgatggagatgagaagaccctgcggcgcagcagcctgtgcctgaagggggagcggcactttgctgagagcgagaccctggaccagctgcccctgaccaaccctgagcacttcggcacccctgtgattggcaagaagaccaacagaggccgccgcagcaaccacatccctgaggaggagagcagcagcagcagcagtgatgaagatgaagatgacaggaagcagattgatgagctgctgggcaaggtggtgtgtgtggactacatcagcctggacaagaagaaggccctgtggttccctgccctggtggtgtgcccagactgcagtgatgaaattgctgtgaagaaggacaacatcctggtgcgctccttcaaggatggcaagttcacctctgtgcccaggaaggatgtgcatgagatcaccagtgacacagcccccaagccagatgctgtgctgaagcaggcctttgagcaggccctggagttccacaagagcaggaccatcccagccaactggaagacagagctgaaggaggacagcagcagcagcgaggccgaggaggaggaggaggaggaggatgatgagaaggagaaggaggacaacagcagcgaggaggaggaggagattgagcccttccctgaggagcgggagaacttcctgcagcagctgtacaagttcatggaggaccggggcacccccatcaacaagaggcctgtgctgggctacagaaacctgaacctcttcaagctgttccggctggtgcacaagctgggcggctttgacaacatcgagagcggggctgtgtggaagcaggtgtaccaggacctgggcatccctgtgctgaacagcgctgctggctacaacgtgaagtgtgcctacaagaagtacctgtatggctttgaggagtactgccgcagcgccaacatcgagttccagatggccctgcctgagaaggtggtgaacaagcagtgcaaggaatgtgaaaatgtgaaggagatcaaggtgaaggaggagaatgaaacagagatcaaggagatcaagatggaggaggagaggaacatcatcccccgggaggagaagcccattgaagatgaaattgaaagaaaagaaaacatcaagcccagcctgggcagcaagaagaacctgctggagagcatccccacccacagcgaccaggagaaggaggtgaacatcaagaagccagaagataatgaaaacctggatgacaaggatgatgacaccaccagggtggatgagagcctgaacatcaaggtggaggccgaggaggagaaggccaagagcggctatgatgagtggatcaaggctgacaagatcgtgcggcctgctgacaagaatgtgcccaagatcaagcacaggaagaagatcaagaacaagctggacaaggagaaggacaaggatgagaagtacagccccaagaactgcaagctgcggcggctgagcaagccacccttccagaccaaccccagccctgagatggtgtccaagctggacctgacagatgccaagaacagcgacacagcccacatcaagagcattgagatcaccagcatcctgaatggcctgcaggccagcgagagcagcgcagaagattctgagcaggaggatgagcggggggcccaggacatggacaacaacgggaaggaggagagcaagattgaccacctgaccaacaacagaaatgacctgatcagcaaggaggagcagaacagcagcagcctgctggaggagaacaaggtgcatgctgacctggtgatcagcaagcctgtgtccaagagccctgagcggctgaggaaggacatcgaggtgctgtctgaggacacagattatgaagaagatgaggtgaccaagaagaggaaggatgtgaagaaggacaccacagacaagagcagcaagccccagatcaagaggggcaagaggcgctactgcaacacagaggagtgcctgaagacaggcagccctgggaagaaggaggagaaggccaagaacaaggagagcctgtgcatggagaacagcagcaacagcagcagtgatgaagatgaggaggagaccaaggccaagatgacccccaccaagaagtacaacggcctggaggagaagaggaagagcctgcggaccaccggcttctacagcggcttcagcgaggtggccgagaagaggatcaagctgctgaacaacagtgatgagcggctgcagaacagccgggccaaggacaggaaggatgtgtggagcagcatccagggccagtggcccaagaagaccctgaaggagctgttcagtgacagcgacacagaagctgctgccagccccccccacccagcccctgaggagggcgtggccgaggagagcctgcagacagtggccgaggaggagagctgcagccccagcgtggagctggagaagcccccacctgtgaatgtggacagcaagcccatcgaggagaagacagtggaggtgaatgacaggaaggccgagttccccagcagcggcagcaacagcgtgctgaacaccccacccaccaccccagagagccccagctctgtgacagtgacagagggcagccggcagcagagctctgtgacagtgtctgagcccctggcccccaaccaggaggaggtgcgcagcatcaagtcagaaacagacagcaccatcgaggtggacagcgtggccggggagctgcaggacctgcagagcgagggcaacagcagccctgctggctttgatgcctctgtgagcagcagcagcagcaaccagcctgagcctgagcaccctgagaaggcctgcaccggccagaagagggtgaaggatgcccagggcggcggcagcagcagcaagaagcagaagaggagccacaaggccaccgtggtgaacaacaagaagaagggcaagggcaccaacagcagtgacagcgaggagctgtctgctggggagagcatcaccaagagccagcctgtgaagtctgtgtccacaggcatgaagagccacagcaccaagagccctgcccggacccagagccctggaaaatgtgggaagaatggagacaaggaccctgacctgaaggagcccagcaaccggctgcccaaggtgtacaagtggagcttccagatgtctgacctggagaacatgaccagcgctgagcgcatcaccatcctgcaggagaagctgcaggagatcaggaagcactacctgagcctgaagtctgaggtggccagcattgacagaagaaggaagaggctgaagaagaaggagcgggagagcgctgccaccagcagcagcagcagcagccccagcagcagcagcatcacagctgctgtgatgctgaccctggccgagcccagcatgagcagcgccagccagaatggcatgtctgtggagtgcaggtag

SEQ ID NO: 144222 - DNA, 3939 bp, synthetic construct; identical to SEQ ID NO: 144220
  misc_feature 1..3939: note = Description of Artificial Sequence: Synthetic coding sequence
  source 1..3939: mol_type = other DNA

SEQ ID NO: 144223 - DNA, 3462 bp, synthetic construct
  misc_feature 1..3462: note = Description of Artificial Sequence: Synthetic coding sequence
  source 1..3462: mol_type = other DNA
atgaaggccctggatgagcccccctacctgactgtgggcacagatgtgtctgccaagtacagaggagccttctgtgaggccaagatcaagacagccaagaggctggtgaaggtgaaggtgaccttcagacatgacagcagcacagtggaggtgcaggatgaccacatcaagggccccctgaaggtgggcgccatcgtggaggtgaagaacctggatggagcctaccaggaggccgtcatcaacaagctgacagatgcctcctggtacacagtggtgtttgatgatggagatgagaagaccctgcggcgcagcagcctgtgcctgaagggggagcggcactttgctgagagcgagaccctggaccagctgcccctgaccaaccctgagcacttcggcacccctgtgattggcaagaagaccaacagaggccgccgcagcaaccacatccctgaggaggagagcagcagcagcagcagtgatgaagatgaagatgacaggaagcagattgatgagctgctgggcaaggtggtgtgtgtggactacatcagcctggacaagaagaaggccctgtggttccctgccctggtggtgtgcccagactgcagtgatgaaattgctgtgaagaaggacaacatcctggtgcgctccttcaaggatggcaagttcacctctgtgcccaggaaggatgtgcatgagatcaccagtgacacagcccccaagccagatgctgtgctgaagcaggcctttgagcaggccctggagttccacaagagcaggaccatcccagccaactggaagacagagctgaaggaggacagcagcagcagcgaggccgaggaggaggaggaggaggaggatgatgagaaggagaaggaggacaacagcagcgaggaggaggaggagattgagcccttccctgaggagcgggagaacttcctgcagcagctgtacaagttcatggaggaccggggcacccccatcaacaagaggcctgtgctgggctacagaaacctgaacctcttcaagctgttccggctggtgcacaagctgggcggctttgacaacatcgagagcggggctgtgtggaagcaggtgtaccaggacctgggcatccctgtgctgaacagcgctgctggctacaacgtgaagtgtgcctacaagaagtacctgtatggctttgaggagtactgccgcagcgccaacatcgagttccagatggccctgcctgagaaggtggtgaacaagcagtgcaaggaatgtgaaaatgtgaaggagatcaaggtgaaggaggagaatgaaacagagatcaaggagatcaagatggaggaggagaggaacatcatcccccgggaggagaagcccattgaagatgaaattgaaagaaaagaaaacatcaagcccagcctgggcagcaagaagaacctgctggagagcatccccacccacagcgaccaggagaaggaggtgaacatcaagaagccagaagataatgaaaacctggatgacaaggatgatgacaccaccagggtggatgagagcctgaacatcaaggtggaggccgaggaggagaaggccaagtctggagatgagaccaacaaggaggaggatgaagatgatgaggaggccgaggaggaggaggaggaggaggaggaggaggaggatgaagatgatgatgacaacaatgaggaggaggagtttgagtgctacccacctggcatgaaggtgcaggtgcgctatggccggggcaagaaccagaagatgtatgaggccagcatcaaggacagtgatgtggagggcggggaggtgctgtacctggtgcactactgcggctggaatgtgcgctatgatgagtggatcaaggctgacaagatcgtgcggcctgctgacaagaatgtgcccaagatcaagcacaggaagaagatcaagaacaagctggacaaggagaaggacaaggatgagaagtacagccccaagaactgcaagctgcggcggctgagcaagccacccttccagaccaaccccagccctgagatggtgtccaagctggacctgacagatgccaagaacagcgacacagcccacatcaagagcattgagatcaccagcatcctgaatggcctgcaggccagcgagagcagcgcagaagattctgagcaggaggatgagcggggggcccaggacatggacaacaacgggaaggaggagagcaagattgaccacctgaccaacaacagaaatgacctgatcagcaaggaggagcagaacagcagcagcctgctggaggagaacaaggtgcatgctgacctggtgatcagcaagcctgtgtccaagagccctgagcggctgaggaaggacatcgaggtgctgtctgaggacacagattatgaagaagatgaggtgaccaagaagaggaaggatgtgaagaaggacaccacagacaagagcagcaagccccagatcaagaggggcaagaggcgctactgcaacacagaggagtgcctgaagacaggcagccctgggaagaaggaggagaaggccaagaacaaggagagcctgtgcatggagaacagcagcaacagcagcagtgatgaagatgaggaggagaccaaggccaagatgacccccaccaagaagtacaacggcctggaggagaagaggaagagcctgcggaccaccggcttctacagcggcttcagcgaggtggccgagaagaggatcaagctgctgaacaacagtgatgagcggctgcagaacagccgggccaaggacaggaaggatgtgtggagcagcatccagggccagtggcccaagaagaccctgaaggagctgttcagtgacagcgacacagaagctgctgccagccccccccacccagcccctgaggagggcgtggccgaggagagcctgcagacagtggccgaggaggagagctgcagccccagcgtggagctggagaagcccccacctgtgaatgtggacagcaagcccatcgaggagaagacagtggaggtgaatgacaggaaggccgagttccccagcagcggcagcaacagcgtgctgaacaccccacccaccaccccagagagccccagctctgtgacagtgacagagggcagccggcagcagagctctgtgacagtgtctgagcccctggcccccaaccaggaggaggtgcgcagcatcaagtcagaaacagacagcaccatcgaggtggacagcgtggccggggagctgcaggacctgcagagcgagggcaacagcagccctgctggctttgatgcctctgtgagcagcagcagcagcaaccagcctgagcctgagcaccctgagaaggcctgcaccggccagaagagggtgaaggatgcccagggcggcggcagcagcagcaagaagcagaagaggagccacaaggccaccgtggtgaacaacaagaagaagggcaagggcatcctgccccactag

SEQ ID NO: 144224 - DNA, 1452 bp, synthetic construct
  misc_feature 1..1452: note = Description of Artificial Sequence: Synthetic coding sequence
  source 1..1452: mol_type = other DNA
atgaaggccctggatgagcccccctacctgactgtgggcacagatgtgtctgccaagtacagaggagccttctgtgaggccaagatcaagacagccaagaggctggtgaaggtgaaggtgaccttcagacatgacagcagcacagtggaggtgcaggatgaccacatcaagggccccctgaaggtgggcgccatcgtggaggtgaagaacctggatggagcctaccaggaggccgtcatcaacaagctgacagatgcctcctggtacacagtggtgtttgatgatggagatgagaagaccctgcggcgcagcagcctgtgcctgaagggggagcggcactttgctgagagcgagaccctggaccagctgcccctgaccaaccctgagcacttcggcacccctgtgattggcaagaagaccaacagaggccgccgcagcaaccacatccctgaggaggagagcagcagcagcagcagtgatgaagatgaagatgacaggaagcagattgatgagctgctgggcaaggtggtgtgtgtggactacatcagcctggacaagaagaaggccctgtggttccctgccctggtggtgtgcccagactgcagtgatgaaattgctgtgaagaaggacaacatcctggtgcgctccttcaaggatggcaagttcacctctgtgcccaggaaggatgtgcatgagatcaccagtgacacagcccccaagccagatgctgtgctgaagcaggcctttgagcaggccctggagttccacaagagcaggaccatcccagccaactggaagacagagctgaaggaggacagcagcagcagcgaggccgaggaggaggaggaggaggaggatgatgagaaggagaaggaggacaacagcagcgaggaggaggaggagattgagcccttccctgaggagcgggagaacttcctgcagcagctgtacaagttcatggaggaccggggcacccccatcaacaagaggcctgtgctgggctacagaaacctgaacctcttcaagctgttccggctggtgcacaagctgggcggctttgacaacatcgagagcggggctgtgtggaagcaggtgtaccaggacctgggcatccctgtgctgaacagcgctgctggctacaacgtgaagtgtgcctacaagaagtacctgtatggctttgaggagtactgccgcagcgccaacatcgagttccagatggccctgcctgagaaggtggtgaacaagcagtgcaaggaatgtgaaaatgtgaaggagatcaaggtgaaggaggagaatgaaacagagatcaaggagatcaagatggaggaggagaggaacatcatcccccgggaggagaagcccattgaagatgaaattgaaagaaaagaaaacatcaagcccagcctgggcagcaagaagaacctgctggagagcatccccacccacagctag

SEQ ID NO: 144225 - DNA, 1968 bp, synthetic construct
  misc_feature 1..1968: note = Description of Artificial Sequence: Synthetic coding sequence
  source 1..1968: mol_type = other DNA
atgaaggccctggatgagcccccctacctgactgtgggcacagatgtgtctgccaagtacagaggagccttctgtgaggccaagatcaagacagccaagaggctggtgaaggtgaaggtgaccttcagacatgacagcagcacagtggaggtgcaggatgaccacatcaagggccccctgaaggtgggcgccatcgtggaggtgaagaacctggatggagcctaccaggaggccgtcatcaacaagctgacagatgcctcctggtacacagtggtgtttgatgatggagatgagaagaccctgcggcgcagcagcctgtgcctgaagggggagcggcactttgctgagagcgagaccctggaccagctgcccctgaccaaccctgagcacttcggcacccctgtgattggcaagaagaccaacagaggccgccgcagcaaccacatccctgaggaggagagcagcagcagcagcagtgatgaagatgaagatgacaggaagcagattgatgagctgctgggcaaggtggtgtgtgtggactacatcagcctggacaagaagaaggccctgtggttccctgccctggtggtgtgcccagactgcagtgatgaaattgctgtgaagaaggacaacatcctggtgcgctccttcaaggatggcaagttcacctctgtgcccaggaaggatgtgcatgagatcaccagtgacacagcccccaagccagatgctgtgctgaagcaggcctttgagcaggccctggagttccacaagagcaggaccatcccagccaactggaagacagagctgaaggaggacagcagcagcagcgaggccgaggaggaggaggaggaggaggatgatgagaaggagaaggaggacaacagcagcgaggaggaggaggagattgagcccttccctgaggagcgggagaacttcctgcagcagctgtacaagttcatggaggaccggggcacccccatcaacaagaggcctgtgctgggctacagaaacctgaacctcttcaagctgttccggctggtgcacaagctgggcggctttgacaacatcgagagcggggctgtgtggaagcaggtgtaccaggacctgggcatccctgtgctgaacagcgctgctggctacaacgtgaagtgtgcctacaagaagtacctgtatggctttgaggagtactgccgcagcgccaacatcgagttccagatggccctgcctgagaaggtggtgaacaagcagtgcaaggaatgtgaaaatgtgaaggagatcaaggtgaaggaggagaatgaaacagagatcaaggagatcaagatggaggaggagaggaacatcatcccccgggaggagaagcccattgaagatgaaattgaaagaaaagaaaacatcaagcccagcctgggcagcaagaagaacctgctggagagcatccccacccacagcgaccaggagaaggaggtgaacatcaagaagccagaagataatgaaaacctggatgacaaggatgatgacaccaccagggtggatgagagcctgaacatcaaggtggaggccgaggaggagaaggccaagtctggagatgagaccaacaaggaggaggatgaagatgatgaggaggccgaggaggaggaggaggaggaggaggaggaggaggatgaagatgatgatgacaacaatgaggaggaggagtttgagtgctacccacctggcatgaaggtgcaggtgcgctatggccggggcaagaaccagaagatgtatgaggccagcatcaaggacagtgatgtggagggcggggaggtgctgtacctggtgcactactgcggctggaatgtgcgctatgatgagtggatcaaggctgacaagatcgtgcggcctgctgacaagaatgtgcccaagatcaagcacaggaagaagatcaagaacagcgtgtacaagaagaagaagaagaagaagaacaagtag

SEQ ID NO: 144226 - DNA, 1785 bp, synthetic construct
  misc_feature 1..1785: note = Description of Artificial Sequence: Synthetic coding sequence
  source 1..1785: mol_type = other DNA
atggccgcccctgtgaagggcaacaggaagcagagcacagaaggagatgccctggaccccccagccagccccaagccagctgggaagcagaatggcatccagaaccccatcagcctggaggacagccctgaggccggcggggagcgggaggaggagcaggagcgggaggaggagcaggccttcctggtgtccctgtacaagttcatgaaggagcggcacacccccatcgagcgggtgccccacctgggcttcaagcagatcaacctgtggaagatctacaaggctgtggagaagctgggcgcctatgagctggtgacaggccggcggctgtggaagaatgtgtatgatgagctgggcggcagccctggcagcaccagcgctgccacctgcacccggcggcactatgagcggctggtgctgccctacgtgcgccacctgaagggagaagatgacaagcccctgcccaccagcaagcccaggaagcagtacaagatggccaaggagaacagaggagatgatggagccacagagcggcccaagaaggccaaggaggagaggaggatggaccagatgatgcctgggaagaccaaggcagatgctgctgaccctgcccccctgcccagccaggagcccccaagaaacagcacagagcagcagggcctggccagcggcagctctgtgtcctttgtgggcgccagcggctgcccagaggcctacaagaggctgctgagcagcttctactgcaagggcacccacggcatcatgagccccctggccaagaagaagctgctggcccaggtgtccaaggtggaggccctgcagtgccaggaggagggctgccgccacggggctgagccccaggccagccctgctgtgcacctgcctgagagcccccagagccccaagggcctgacagagaacagccgccaccggctgaccccccaggagggcctgcaggcccctgggggcagcctgcgggaggaggcccaggccggcccctgcccagctgcccccatcttcaagggctgcttctacacccaccccacagaggtgctgaagcctgtgtcccagcacccccgggacttcttcagccggctgaaggatggagtgctgctgggccccccaggcaaggagggcctgtctgtgaaggagccccagctggtgtggggcggagatgccaaccggcccagcgccttccacaagggcggcagcaggaagggcatcctgtaccccaagcccaaggcctgctgggtgagccccatggccaaggtgcctgctgagagccccaccctgccccccaccttccccagcagccctggcctgggcagcaagaggagcctggaggaggagggcgccgcccacagcggcaagaggctgcgggctgtgagccccttcctgaaggaggctgatgccaagaagtgtggggccaagccagctggcagcggcctggtgtcctgcctgctgggccctgccctgggccctgtgcccccagaggcctaccggggcaccatgctgcactgccccctgaacttcaccggcaccccaggccccctgaagggccaggccgccctgcccttcagccccctggtgatcccagccttccctgcccacttcctggccacagctggccccagccccatggctgctggcctgatgcacttcccccccaccagctttgattctgccctgcggcaccggctgtgcccagccagcagcgcctggcacgcccctcctgtgaccacctatgctgccccccacttcttccacctgaacaccaagctgtag

SEQ ID NO: 144227 - DNA, 1917 bp, synthetic construct
  misc_feature 1..1917: note = Description of Artificial Sequence: Synthetic coding sequence
  source 1..1917: mol_type = other DNA
atggccgcccctgtgaagggcaacaggaagcagagcacagaaggagatgccctggaccccccagccagccccaagccagctgggaagcagaatggcatccagaaccccatcagcctggaggacagccctgaggccggcggggagcgggaggaggagcaggagcgggaggaggagcaggccttcctggtgtccctgtacaagttcatgaaggagcggcacacccccatcgagcgggtgccccacctgggcttcaagcagatcaacctgtggaagatctacaaggctgtggagaagctgggcgcctatgagctggtgacaggccggcggctgtggaagaatgtgtatgatgagctgggcggcagccctggcagcaccagcgctgccacctgcacccggcggcactatgagcggctggtgctgccctacgtgcgccacctgaagggagaagatgacaagcccctgcccaccagcaagcccaggaagcagtacaagatggccaaggagaacagaggagatgatggagccacagagcggcccaagaaggccaaggaggagaggaggatggaccagatgatgcctgggaagaccaaggcagatgctgctgaccctgcccccctgcccagccaggagcccccaagaaacagcacagagcagcagggcctggccagcggcagctctgtgtcctttgtgggcgccagcggctgcccagaggcctacaagaggctgctgagcagcttctactgcaagggcacccacggcatcatgagccccctggccaagaagaagctgctggcccaggtgtccaaggtggaggccctgcagtgccaggaggagggctgccgccacggggctgagccccaggccagccctgctgtgcacctgcctgagagcccccagagccccaagggcctgacagagaacagccgccaccggctgaccccccaggagggcctgcaggcccctgggggcagcctgcgggaggaggcccaggccggcccctgcccagctgcccccatcttcaagggctgcttctacacccaccccacagaggtgctgaagcctgtgtcccagcacccccgggacttcttcagccggctgaaggatggagtgctgctgggccccccaggcaaggagggcctgtctgtgaaggagccccagctggtgtggggcggagatgccaaccggcccagcgccttccacaagggcggcagcaggaagggcatcctgtaccccaagcccaaggcctgctgggtgagccccatggccaaggtgcctgctgagagccccaccctgccccccaccttccccagcagccctggcctgggcagcaagaggagcctggaggaggagggcgccgcccacagcggcaagaggctgcgggctgtgagccccttcctgaaggaggctgatgccaagaagtgtggggccaagccagctggcagcggcctggtgtcctgcctgctgggccctgccctgggccctgtgcccccagaggcctaccggggcaccatgctgcactgccccctgaacttcaccggcacccaccaccagagccagcccatgcagaggcccaccagcagcaccagcacccccagctgcaggcctgcccatggagtggtgtacacagtggagagcactggagcctacaaccggcaggtgctgctgcccggcggcagcgagctggtgcctgccacccaggacacccgggccatgcccctggccggccagcccggcaccagcgaggaggagggcagcggcaagacaggcttcatcagccggcagcagcctgagcccaggagccggggccccagctgctacaaggccctgggagaagatggccagctgcccctgccccagagcggggcccggagcacccaggtggcccacggcaagagcaacaagaagacccctgtgtag

SEQ ID NO: 144228 - DNA, 1581 bp, synthetic construct
  misc_feature 1..1581: note = Description of Artificial Sequence: Synthetic coding sequence
  source 1..1581: mol_type = other DNA
atgaaggagcggcacacccccatcgagcgggtgccccacctgggcttcaagcagatcaacctgtggaagatctacaaggctgtggagaagctgggcgcctatgagctggtgacaggccggcggctgtggaagaatgtgtatgatgagctgggcggcagccctggcagcaccagcgctgccacctgcacccggcggcactatgagcggctggtgctgccctacgtgcgccacctgaagggagaagatgacaagcccctgcccaccagcaagcccaggaagcagtacaagatggccaaggagaacagaggagatgatggagccacagagcggcccaagaaggccaaggaggagaggaggatggaccagatgatgcctgggaagaccaaggcagatgctgctgaccctgcccccctgcccagccaggagcccccaagaaacagcacagagcagcagggcctggccagcggcagctctgtgtcctttgtgggcgccagcggctgcccagaggcctacaagaggctgctgagcagcttctactgcaagggcacccacggcatcatgagccccctggccaagaagaagctgctggcccaggtgtccaaggtggaggccctgcagtgccaggaggagggctgccgccacggggctgagccccaggccagccctgctgtgcacctgcctgagagcccccagagccccaagggcctgacagagaacagccgccaccggctgaccccccaggagggcctgcaggcccctgggggcagcctgcgggaggaggcccaggccggcccctgcccagctgcccccatcttcaagggctgcttctacacccaccccacagaggtgctgaagcctgtgtcccagcacccccgggacttcttcagccggctgaaggatggagtgctgctgggccccccaggcaaggagggcctgtctgtgaaggagccccagctggtgtggggcggagatgccaaccggcccagcgccttccacaagggcggcagcaggaagggcatcctgtaccccaagcccaaggcctgctgggtgagccccatggccaaggtgcctgctgagagccccaccctgccccccaccttccccagcagccctggcctgggcagcaagaggagcctggaggaggagggcgccgcccacagcggcaagaggctgcgggctgtgagccccttcctgaaggaggctgatgccaagaagtgtggggccaagccagctggcagcggcctggtgtcctgcctgctgggccctgccctgggccctgtgcccccagaggcctaccggggcaccatgctgcactgccccctgaacttcaccggcaccccaggccccctgaagggccaggccgccctgcccttcagccccctggtgatcccagccttccctgcccacttcctggccacagctggccccagccccatggctgctggcctgatgcacttcccccccaccagctttgattctgccctgcggcaccggctgtgcccagccagcagcgcctggcacgcccctcctgtgaccacctatgctgccccccacttcttccacctgaacaccaagctgtag

SEQ ID NO: 144229 - DNA, 3567 bp, synthetic construct
  misc_feature 1..3567: note = Description of Artificial Sequence: Synthetic coding sequence
  source 1..3567: mol_type = other DNA
atggagcccaacagcctgcagtgggtgggcagcccctgtggcctgcacggcccctacatcttctacaaggccttccagttccacctggagggcaagccccgcatcctgagcctgggggacttcttctttgtgcgctgcacccccaaggaccccatctgcatcgccgagctgcagctgctgtgggaggagaggaccagccggcagctgctgagcagcagcaagctgtacttcctgcctgaggacaccccccagggcaggaacagcgaccacggggaggatgaggtgattgctgtgtctgagaaggtgattgtgaagctggaggacctggtgaagtgggtgcacagcgacttcagcaagtggaggtgtggcttccacgccggccctgtgaagacagaggccctgggcagaaatggccagaaggaggccctgctgaagtaccggcagagcaccctgaacagcggcctgaacttcaaggatgtgctgaaggagaaggctgacctgggagaagatgaggaggagaccaacgtgattgtgctgagctacccccagtactgccgctaccgctccatgctgaagaggatccaggacaagcccagcagcatcctgacagaccagtttgccctggccctgggcggcattgctgtggtgtccaggaacccccagatcctgtactgccgggacacctttgaccaccccaccctgattgaaaatgaaagcatctgtgatgaatttgcccccaacctgaagggccggcccaggaagaagaagccctgcccccagaggcgggacagcttcagcggcgtgaaggacagcaacaacaacagtgatggcaaggctgtggccaaggtgaagtgtgaggcccggagcgccctgaccaagcccaagaacaaccacaactgcaagaaggtgtccaatgaggagaagcccaaggtggccatcggggaggagtgcagagcagatgagcaggccttcctggtggccctgtacaagtacatgaaggagaggaagacccccatcgagcgcatcccctacctgggcttcaagcagatcaacctgtggaccatgttccaggccgcccagaagctgggcggctatgagaccatcacagcccggcggcagtggaagcacatctatgatgagctgggcggcaaccctggcagcaccagcgctgccacctgcaccaggaggcactatgaaagactcatcctgccctatgagcgcttcatcaagggggaggaggacaagcccctgccccccatcaagcccaggaagcaggagaacagcagccaggagaatgaaaacaagaccaaggtgtctggcaccaagaggatcaagcatgagatccccaagagcaagaaggagaaggaaaatgcccccaagccccaggatgctgctgaggtgtcctctgagcaggagaaggagcaggagaccctcatcagccagaagagcatccctgagcccctgcctgctgctgacatgaagaagaagattgagggctaccaggagttcagcgccaagcccctggccagccgggtggaccctgagaaggacaatgaaacagaccagggcagcaacagcgagaaggtggccgaggaggccggggagaagggccccaccccacccctgcccagcgcccccctggcccctgagaaggacagcgccctggtgcctggggccagcaagcagcccctgaccagccccagcgccctggtggacagcaagcaggagagcaagctgtgctgcttcacagagagccctgagagcgagccccaggaggccagcttccccagcttccccaccacccagccccccctggccaaccagaatgaaacagaagatgacaagctgcctgccatggctgactacatcgccaactgcaccgtgaaggtggaccagctgggcagtgatgacatccacaatgccctgaagcagacccccaaggtgctggtggtgcagagctttgacatgttcaaggacaaggacctgaccggccccatgaatgaaaaccacggcctgaactacacccccctgctgtacagccggggcaaccctggcatcatgagccccctggccaagaagaagctgctgagccaggtgtctggggccagcctgagcagcagctacccctacggcagccccccacccctcatcagcaagaagaagctgattgccagagatgacctgtgcagcagcctgagccagacccaccacggccagagcacagaccacatggctgtgtcccggcccagcgtcatccagcacgtgcagagcttccgcagcaagcccagcgaggagaggaagaccatcaatgacatcttcaagcatgagaagctgagcagaagtgacccccaccgctgcagcttcagcaagcaccacctgaaccccctggccgacagctatgtgctgaagcaggagatccaggagggcaaggacaagctgctggagaagagggccctgccccacagccacatgcccagcttcctggccgacttctacagcagcccccacctgcacagcctgtaccgccacacagagcaccacctgcacaatgagcagaccagcaagtaccccagccgggacatgtaccgggagagcgagaacagcagcttccccagccaccgccaccaggagaagctgcacgtgaactacctgaccagcctgcacctgcaggacaagaagtctgctgctgctgaggcccccacagatgaccagcccacagacctgagcctgcccaagaacccccacaagcccaccgggaaggtgctgggcctggcccacagcaccaccggcccccaggagagcaagggcatcagccagttccaggtgctgggcagccagagccgggactgccaccccaaggcctgccgggtgagccccatgaccatgagcggccccaagaagtacccagagagcctgagccgcagcggcaagccccaccacgtgcggctggagaacttcaggaagatggagggcatggtgcaccccatcctgcacaggaagatgagcccccagaacatcggggccgcccggcccatcaagaggagcctggaggacctggacctggtgattgctgggaagaaggcccgggctgtgagccccctggaccccagcaaggaggtgtctgggaaggagaaggccagcgagcaggagagcgagggcagcaaggccgcccacggcggccacagcggcggcggcagcgagggccacaagctgcccctgagcagccccatcttccctggcctgtacagcggcagcctgtgcaacagcggcctgaacagccggctgcctgctggctacagccacagcctgcagtacctgaagaaccagacagtgctgagccccctgatgcagcccctggccttccacagcctggtgatgcagaggggcatcttcaccagccccaccaacagccagcagctgtaccgccacctggccgccgccacccctgtgggcagcagctatggagacctgctgcacaacagcatctaccccctggccgccatcaacccccaggccgccttccccagcagccagctgagctctgtgcaccccagcaccaagctgtag

SEQ ID NO: 144230 - DNA, 2838 bp, synthetic construct
  misc_feature 1..2838: note = Description of Artificial Sequence: Synthetic coding sequence
  source 1..2838: mol_type = other DNA
atggcccccaacctgaagggccggcccaggaagaagaagccctgcccccagaggcgggacagcttctctggagtgaaggacagcaacaacaacagtgatggcaaggctgtggccaaggtgaagtgtgaggcccggagcgccctgaccaagcccaagaacaaccacaactgcaagaaggtgtccaatgaggagaagcccaaggtggccatcggggaggagtgcagagcagatgagcaggccttcctggtggccctgtacaagtacatgaaggagaggaagacccccatcgagcgcatcccctacctgggcttcaagcagatcaacctgtggaccatgttccaggccgcccagaagctgggcggctatgagaccatcacagcccggcggcagtggaagcacatctatgatgagctgggcggcaaccctggcagcaccagcgctgccacctgcacccggcggcactatgagcggctcatcctgccctatgagcgcttcatcaagggggaggaggacaagcccctgccccccatcaagcccaggaagcaggagaacagcagccaggagaatgaaaacaagaccaaggtgtctggcaccaagaggatcaagcatgagatccccaagagcaagaaggagaaggaaaatgcccccaagccccaggatgctgctgaggtgagcagcgagcaggagaaggagcaggagaccctcatcagccagaagagcatccctgagcccctgcctgctgctgacatgaagaagaagattgagggctaccaggagttcagcgccaagcccctggccagccgggtggaccctgagaaggacaatgaaacagaccagggcagcaacagcgagaaggtggccgaggaggccggggagaagggccccaccccacccctgcccagcgcccccctggcccctgagaaggacagcgccctggtgcctggggccagcaagcagcccctgaccagccccagcgccctggtggacagcaagcaggagagcaagctgtgctgcttcacagagagccctgagagcgagccccaggaggccagcttccccagcttccccaccacccagccccccctggccaaccagaatgaaacagaagatgacaagctgcctgccatggctgactacatcgccaactgcaccgtgaaggtggaccagctgggcagtgatgacatccacaatgccctgaagcagacccccaaggtgctggtggtgcagagctttgacatgttcaaggacaaggacctgaccggccccatgaatgaaaatcatggcctgaactacacccccctgctgtacagccggggcaaccctggcatcatgagccccctggccaagaagaagctgctgagccaggtgtctggggccagcctgagcagcagctacccctacggcagccccccacccctcatcagcaagaagaagctgattgccagagatgacctgtgcagcagcctgagccagacccaccacggccagagcacagaccacatggctgtgtcccggcccagcgtcatccagcacgtgcagagcttccgcagcaagcccagcgaggagaggaagaccatcaatgacatcttcaagcatgagaagctgagcagaagtgacccccaccgctgcagcttcagcaagcaccacctgaaccccctggccgacagctatgtgctgaagcaggagatccaggagggcaaggacaagctgctggagaagagggccctgccccacagccacatgcccagcttcctggccgacttctacagcagcccccacctgcacagcctgtaccgccacacagagcaccacctgcacaatgagcagaccagcaagtaccccagccgggacatgtaccgggagagcgagaacagcagcttccccagccaccgccaccaggagaagctgcacgtgaactacctgaccagcctgcacctgcaggacaagaagtctgctgctgctgaggcccccacagatgaccagcccacagacctgagcctgcccaagaacccccacaagcccaccgggaaggtgctgggcctggcccacagcaccaccggcccccaggagagcaagggcatcagccagttccaggtgctgggcagccagagccgggactgccaccccaaggcctgccgggtgagccccatgaccatgagcggccccaagaagtacccagagagcctgagccgcagcggcaagccccaccacgtgcggctggagaacttcaggaagatggagggcatggtgcaccccatcctgcacaggaagatgagcccccagaacattggagctgcccggcccatcaagaggagcctggaggacctggacctggtgattgctgggaagaaggcccgggctgtgagccccctggaccccagcaaggaggtgtctgggaaggagaaggccagcgagcaggagagcgagggcagcaaggccgcccatggaggccacagcggcggcggcagcgagggccacaagctgcccctgagcagccccatcttccctggcctgtacagcggcagcctgtgcaacagcggcctgaacagccggctgcctgctggctacagccacagcctgcagtacctgaagaaccagacagtgctgagccccctgatgcagcccctggccttccacagcctggtgatgcagaggggcatcttcaccagccccaccaacagccagcagctgtaccgccacctggccgccgccacccctgtgggcagcagctatggagacctgctgcacaacagcatctaccccctggccgccatcaacccccaggccgccttccccagcagccagctgagctctgtgcaccccagcaccaagctgtag

SEQ ID NO: 144231 - DNA, 1134 bp, synthetic construct
  misc_feature 1..1134: note = Description of Artificial Sequence: Synthetic coding sequence
  source 1..1134: mol_type = other DNA
atgggcaccacagaggccaccctgaggatggagaatgtggatgtgaaggaggagtggcaggatgaggacctgccccggcccctgcctgaggagaccggggtggagctgctgggcagccctgtggaggacaccagcagcccccccaacaccctgaacttcaacggggcccacaggaagaggaagaccctggtggcccctgagatcaacatcagcctggaccagagcgagggcagcctgctgagtgatgacttcctggacaccccagatgacctggacatcaacgtggatgacatcgagaccccagatgaaacagacagcctggagttcctgggcaatggaaatgagctggagtgggaggatgacacccctgtggccacagccaagaacatgcctggggacagcgctgacctgtttggagatggcaccacagaagatggcagcgctgccaacggccgcctgtggaggacagtcatcattggagagcaggagcacagaattgacctgcacatgatccggccctacatgaaggtggtgacccacggcggctactacggggagggcctgaatgccatcatcgtgtttgctgcctgcttcctgcctgacagcagcctgcctgactaccactacatcatggagaacctcttcctgtatgtgatcagcagcctggagctgctggtggccgaggactacatgattgtgtacctgaatggagccaccccaagaagaaggatgcctggcatcggctggctgaagaagtgctaccagatgattgaccggcggctgaggaagaacctgaagagcctcatcatcgtgcaccccagctggttcatcagaacagtgctggccatcagccggcccttcatctctgtgaagttcatcaacaagatccagtatgtgcacagcctggaggacctggagcagctgatccccatggagcacgtgcagatcccagactgtgtgctgcagtatgaggaggagcggctgaaggcccggcgggagagcgcccggccccagcctgagtttgtgctgcccaggtctgaggagaagccagaggtggcccctgtggagaacagaagtgccctggtgtctgaggaccaggagaccagcctgcagcccctgcacaggagcagctag

SEQ ID NO: 144232 - DNA, 1116 bp, synthetic construct
  misc_feature 1..1116: note = Description of Artificial Sequence: Synthetic coding sequence
  source 1..1116: mol_type = other DNA
atgggcaccacagaggccaccctgaggatggagaatgtggatgtgaaggaggagtggcaggatgaggacctgccccggcccctgcctgaggagaccggggtggagctgctgggcagccctgtggaggacaccagcagcccccccaacaccctgaacttcaacggggcccacaggaagaggaagaccctggtggcccctgagatcaacatcagcctggaccagagcgagggcagcctgctgagtgatgacttcctggacaccccagatgacctggacatcaacgtggatgacatcgagaccccagatgaaacagacagcctggagttcctgggcaatggaaatgagctggagtgggaggatgacacccctgtggccacagccaagaacatgcctggggacagcgctgacctgtttggagatggcaccacagaagatggcagcgctgccaacggccgcctgtggaggacagtcatcattggagagcaggagcacagaattgacctgcacatgatccggccctacatgaaggtggtgacccacggcggctactacggggagggcctgaatgccatcatcgtgtttgctgcctgcttcctgcctgacagcagcctgcctgactaccactacatcatggagaacctcttcctgtatgtgatcagcagcctggagctgctggtggccgaggactacatgattgtgtacctgaatggagccaccccaagaagaaggatgcctggcatcggctggctgaagaagtgctaccagatgattgaccggcggctgaggaagaacctgaagagcctcatcatcgtgcaccccagctggttcatcagaacagtgctggccatcagccggcccttcatctctgtgaagttcatcaacaagatccagtatgtgcacagcctggaggacctggagcagctgatccccatggagcacgtgcagatcccagactgtgtgctgcagtatgaggaggagcggctgaaggcccggcgggagagcgcccggccccagcctgagtttgtgctgcccaggtctgaggagaagccagaggtggcccctgtggagaacagaagtgccctggtgtctgaggaccaggagaccaggatgtcctag

SEQ ID NO: 144233 - DNA, 1134 bp, synthetic construct
  misc_feature 1..1134: note = Description of Artificial Sequence: Synthetic coding sequence
  source 1..1134: mol_type = other DNA
atggccggccgccgcagcagccagcccggcatcgccctgcacaaccctggcaaccaccaggtgcagaacccccagggccgcctggagaccgtgcggcccctgcctgaggagaccggggtggagctgctgggcagccctgtggaggacaccagcagcccccccaacaccctgaacttcaacggggcccacaggaagaggaagaccctggtggcccctgagatcaacatcagcctggaccagagcgagggcagcctgctgagtgatgacttcctggacaccccagatgacctggacatcaacgtggatgacatcgagaccccagatgaaacagacagcctggagttcctgggcaatggaaatgagctggagtgggaggatgacacccctgtggccacagccaagaacatgcctggggacagcgctgacctgtttggagatggcaccacagaagatggcagcgctgccaacggccgcctgtggaggacagtcatcattggagagcaggagcacagaattgacctgcacatgatccggccctacatgaaggtggtgacccacggcggctactacggggagggcctgaatgccatcatcgtgtttgctgcctgcttcctgcctgacagcagcctgcctgactaccactacatcatggagaacctcttcctgtatgtgatcagcagcctggagctgctggtggccgaggactacatgattgtgtacctgaatggagccaccccaagaagaaggatgcctggcatcggctggctgaagaagtgctaccagatgattgaccggcggctgaggaagaacctgaagagcctcatcatcgtgcaccccagctggttcatcagaacagtgctggccatcagccggcccttcatctctgtgaagttcatcaacaagatccagtatgtgcacagcctggaggacctggagcagctgatccccatggagcacgtgcagatcccagactgtgtgctgcagtatgaggaggagcggctgaaggcccggcgggagagcgcccggccccagcctgagtttgtgctgcccaggtctgaggagaagccagaggtggcccctgtggagaacagaagtgccctggtgtctgaggaccaggagacctccatgtcctag

SEQ ID NO: 144234 - DNA, 1116 bp, synthetic construct
  misc_feature 1..1116: note = Description of Artificial Sequence: Synthetic coding sequence
  source 1..1116: mol_type = other DNA
atgggcaccacagaggccaccctgaggatggagaatgtggatgtgaaggaggagtggcaggatgaggacctgccccggcccctgcctgaggagaccggggtggagctgctgggcagccctgtggaggacaccagcagcccccccaacaccctgaacttcaacggggcccacaggaagaggaagaccctggtggcccctgagatcaacatcagcctggaccagagcgagggcagcctgctgagtgatgacttcctggacaccccagatgacctggacatcaacgtggatgacatcgagaccccagatgaaacagacagcctggagttcctgggcaatggaaatgagctggagtgggaggatgacacccctgtggccacagccaagaacatgcctggggacagcgctgacctgtttggagatggcaccacagaagatggcagcgctgccaacggccgcctgtggaggacagtcatcattggagagcaggagcacagaattgacctgcacatgatccggccctacatgaaggtggtgacccacggcggctactacggggagggcctgaatgccatcatcgtgtttgctgcctgcttcctgcctgacagcagcctgcctgactaccactacatcatggagaacctcttcctgtatgtgatcagcagcctggagctgctggtggccgaggactacatgattgtgtacctgaatggagccaccccaagaagaaggatgcctggcatcggctggctgaagaagtgctaccagatgattgaccggcggctgaggaagaacctgaagagcctcatcatcgtgcaccccagctggttcatcagaacagtgctggccatcagccggcccttcatctctgtgaagttcatcaacaagatccagtatgtgcacagcctggaggacctggagcagctgatccccatggagcacgtgcagatcccagactgtgtgctgcagtatgaggaggagcggctgaaggcccggcgggagagcgcccggccccagcctgagtttgtgctgcccaggtctgaggagaagccagaggtggcccctgtggagaacagaagtgccctggtgtctgaggaccaggagacctccatgtcctag

SEQ ID NO: 144235 - DNA, 1050 bp, synthetic construct
  misc_feature 1..1050: note = Description of Artificial Sequence: Synthetic coding sequence
  source 1..1050: mol_type = other DNA
atgggcaccacagaggccaccctgaggatggagaatgtggatgtgaaggaggagtggcaggatgaggaccccccacccaacaccctgaacttcaacggggcccacaggaagaggaagaccctggtggcccctgagatcaacatcagcctggaccagagcgagggcagcctgctgagtgatgacttcctggacaccccagatgacctggacatcaacgtggatgacatcgagaccccagatgaaacagacagcctggagttcctgggcaatggaaatgagctggagtgggaggatgacacccctgtggccacagccaagaacatgcctggggacagcgctgacctgtttggagatggcaccacagaagatggcagcgctgccaacggccgcctgtggaggacagtcatcattggagagcaggagcacagaattgacctgcacatgatccggccctacatgaaggtggtgacccacggcggctactacggggagggcctgaatgccatcatcgtgtttgctgcctgcttcctgcctgacagcagcctgcctgactaccactacatcatggagaacctcttcctgtatgtgatcagcagcctggagctgctggtggccgaggactacatgattgtgtacctgaatggagccaccccaagaagaaggatgcctggcatcggctggctgaagaagtgctaccagatgattgaccggcggctgaggaagaacctgaagagcctcatcatcgtgcaccccagctggttcatcagaacagtgctggccatcagccggcccttcatctctgtgaagttcatcaacaagatccagtatgtgcacagcctggaggacctggagcagctgatccccatggagcacgtgcagatcccagactgtgtgctgcagtatgaggaggagcggctgaaggcccggcgggagagcgcccggccccagcctgagtttgtgctgcccaggtctgaggagaagccagaggtggcccctgtggagaacagaagtgccctggtgtctgaggaccaggagaccaggatgtcctag

SEQ ID NO: 144236 - DNA, 2448 bp, synthetic construct
  misc_feature 1..2448: note = Description of Artificial Sequence: Synthetic coding sequence
  source 1..2448: mol_type = other DNA
atgaagagcaaccaggagaggagcaatgaatgtctgccccccaagaagcgggagatcccagccaccagccgcagcagcgaggagaaggcccccaccctgcccagcgacaaccaccgggtggagggcacagcctggctgcccggcaaccctgggggccggggccatggaggcggccgccacggccctgctggcacctctgtggagctgggcctgcagcagggcatcggcctgcacaaggccctgagcacaggcctggactacagccccccatctgcccccaggtctgtgcctgtggccaccaccctgcctgctgcctatgccaccccccagcccggcacccctgtgtcccctgtgcagtatgcccacctgccccacaccttccagttcatcggcagcagccagtacagcggcacctacgccagcttcatccccagccagctgatccccccaacagccaaccctgtgaccagcgctgtggccagcgctgctggggccaccacccccagccagaggagccagctggaggcctacagcaccctgctggccaacatgggcagcctgagccagaccccaggccacaaggccgagcagcagcagcagcagcagcagcagcagcagcagcagcaccagcaccagcagcagcagcagcagcagcagcagcagcagcagcagcagcacctgagccgggcccctggcctcatcaccccaggcagccccccaccagcccagcagaaccagtatgtgcacatcagcagcagcccccagaacacaggccgcacagccagccccccagccatccctgtgcacctgcacccccaccagaccatgatcccccacaccctgaccctgggcccccccagccaggtggtgatgcagtatgctgacagcggcagccactttgtgccccgggaggccaccaagaaggccgagagcagccggctgcagcaggccatccaggccaaggaggtgctgaatggagagatggagaagagccgccgctacggggcccccagcagcgctgacctgggcctgggcaaggccggcggcaagtctgtgccccacccctatgagagccgccacgtggtggtgcaccccagccccagcgactacagcagccgggaccccagcggcgtgcgggcctctgtgatggtgctgcccaacagcaacaccccagctgctgacctggaggtgcagcaggccacccaccgggaggccagccccagcaccctgaatgacaagagcggcctgcacctgggcaagccaggccacaggagctatgccctgagcccccacacagtcatccagaccacccacagcgccagcgagcccctgcctgtgggcctgcctgccacagccttctacgccggcacccagccccctgtgattggctacctgagcggccagcagcaggccatcacctacgccggcagcctgccccagcacctggtgattcctggcacccagcccctgctgatccctgtgggcagcacagacatggaggccagcggggccgccccagccatcgtgaccagcagcccccagtttgctgctgtgccccacacctttgtgaccacagccctgcccaagtctgagaacttcaaccctgaggccctggtgacccaggccgcctacccagccatggtgcaggcccagatccacctgcctgtggtgcagagcgtggccagccctgctgctgccccacccaccctgcccccctacttcatgaagggcagcatcatccagctggccaacggggagctgaagaaggtggaggacctgaagacagaggacttcatccagagcgctgagatcagcaatgacctgaagattgacagcagcacagtggagagaattgaggacagccacagccctggggtggccgtcatccagtttgctgtgggggagcaccgggcccaggtgtctgtggaggtgctggtggagtaccccttctttgtgtttggccagggctggagcagctgctgcccagagaggaccagccagctgtttgacctgccctgcagcaagctgtctgtgggagatgtgtgcatcagcctgaccctgaagaacctgaagaatggatctgtgaagaagggccagcctgtggaccctgcctctgtgctgctgaagcacagcaaggcagatggcctggccggcagccgccacagatatgcagagcaggagaatggcatcaaccagggcagcgcccagatgctgtctgaaaatggagagctgaagtttcctgagaagatgggcctgcctgctgcccccttcctgaccaagattgagcccagcaagccagctgccaccaggaagaggcgctggagcgcccctgagagcaggaagctggagaagtcagaagatgagccccccctgaccctgcccaagcccagcctcatcccccaggaggtgaagatctgcatcgagggccgcagcaatgtgggcaagtag

SEQ ID NO: 144237 - DNA, 2448 bp, synthetic construct; identical to SEQ ID NO: 144236
  misc_feature 1..2448: note = Description of Artificial Sequence: Synthetic coding sequence
  source 1..2448: mol_type = other DNA

SEQ ID NO: 144238 - DNA, 2448 bp, synthetic construct; identical to SEQ ID NO: 144236
  misc_feature 1..2448: note = Description of Artificial Sequence: Synthetic coding sequence
  source 1..2448: mol_type = other DNA

SEQ ID NO: 144239 - DNA, 1428 bp, synthetic construct
  misc_feature 1..1428: note = Description of Artificial Sequence: Synthetic coding sequence
  source 1..1428: mol_type = other DNA
atggccgccccccggcccccaccagcccggctgagcggcgtgatggtgcctgcccccatccaggacctggaggccctgcgggccctgacagccctcttcaaggagcagaggaaccgggagacagcccccaggaccatcttccagagggtgctggacatcctgaagaagagcagccatgctgtggagctggcctgccgggaccccagccaggtggagaacctggccagcagcctgcagctgatcacagagtgcttccgctgcctgagaaatgcctgcatcgagtgcagcgtgaaccagaacagcatccggaacctggacaccatcggcgtggccgtggacctgatcctgctcttccgggagctgcgggtggagcaggagagcctgctgacagccttccgctgtggcctgcagttcctgggcaacatcgccagcagaaatgaagacagccagagcatcgtgtgggtgcacgccttccctgagctgttcctgagctgcctgaaccacccagacaagaagatcgtggcctacagctccatgatcctcttcaccagcctgaaccacgagaggatgaaggagctggaggagaacctgaacatcgccattgatgtgattgatgcctaccagaagcaccctgagagcgagtggcccttcctgatcatcacagacctcttcctgaagagccctgagctggtgcaggccatgttccccaagctgaacaaccaggagcgggtgaccctgctggacctgatgattgccaagatcaccagtgatgagcccctgaccaaggatgacatccctgtgttcctgcggcatgctgagctgattgccagcacctttgtggaccagtgcaagacagtgctgaagctggccagcgaggagcccccagatgatgaggaggccctggccaccatccggctgctggatgtgctgtgtgagatgacagtgaacacagagctgctgggctacctgcaggtgtttcctggcctgctggagagggtcatcgacctgctgcgggtcatccacgtggccggcaaggagaccaccaacatcttcagcaactgtggctgtgtgcgggcagagggggacatcagcaatgtggccaacggcttcaagagccacctgatccgcctcatcggcaacctgtgctacaagaacaaggacaaccaggacaaggtgaatgagctggatggcatccccctcatcctggacaactgcaacatcagtgacagcaaccccttcctgacccagtgggtgatctatgccatccggaacctgacagaggacaacagccagaaccaggacctgattgccaagatggaggagcagggcctggctgatgccagcctgctgaagaaggtgggctttgaggtggagaagaagggggagaagctgatcctgaagagcacccgggacacccccaagccctag

SEQ ID NO: 144240 - DNA, 1236 bp, synthetic construct
  misc_feature 1..1236: note = Description of Artificial Sequence: Synthetic coding sequence
  source 1..1236: mol_type = other DNA
atggccgccccccggcccccaccagcccggctgagcggcgtgatggtgcctgcccccatccaggacctggaggccctgcgggccctgacagccctcttcaaggagcagaggaacagaaacctggacaccatcggcgtggccgtggacctgatcctgctcttccgggagctgcgggtggagcaggagagcctgctgacagccttccgctgtggcctgcagttcctgggcaacatcgccagcagaaatgaagacagccagagcatcgtgtgggtgcacgccttccctgagctgttcctgagctgcctgaaccacccagacaagaagatcgtggcctacagctccatgatcctcttcaccagcctgaaccacgagaggatgaaggagctggaggagaacctgaacatcgccattgatgtgattgatgcctaccagaagcaccctgagagcgagtggcccttcctgatcatcacagacctcttcctgaagagccctgagctggtgcaggccatgttccccaagctgaacaaccaggagcgggtgaccctgctggacctgatgattgccaagatcaccagtgatgagcccctgaccaaggatgacatccctgtgttcctgcggcatgctgagctgattgccagcacctttgtggaccagtgcaagacagtgctgaagctggccagcgaggagcccccagatgatgaggaggccctggccaccatccggctgctggatgtgctgtgtgagatgacagtgaacacagagctgctgggctacctgcaggtgtttcctggcctgctggagagggtcatcgacctgctgcgggtcatccacgtggccggcaaggagaccaccaacatcttcagcaactgtggctgtgtgcgggcagagggggacatcagcaatgtggccaacggcttcaagagccacctgatccgcctcatcggcaacctgtgctacaagaacaaggacaaccaggacaaggtgaatgagctggatggcatccccctcatcctggacaactgcaacatcagtgacagcaaccccttcctgacccagtgggtgatctatgccatccggaacctgacagaggacaacagccagaaccaggacctgattgccaagatggaggagcagggcctggctgatgccagcctgctgaagaaggtgggctttgaggtggagaagaagggggagaagctgatcctgaagagcacccgggacacccccaagccctag

SEQ ID NO: 144241 - DNA, 1362 bp, synthetic construct
  misc_feature 1..1362: note = Description of Artificial Sequence: Synthetic coding sequence
  source 1..1362: mol_type = other DNA
atggccgccccccggcccccaccagcccggctgagcggcgtgatggtgcctgcccccatccaggacctggaggccctgcgggccctgacagccctcttcaaggagcagaggaaccgggagacagcccccaggaccatcttccagagggtgctggacatcctgaagaagagcagccatgctgtggagctggcctgccgggaccccagccaggtggagaacctggccagcagcctgcagctgatcacagagtgcttccgctgcctgagaaatgcctgcatcgagtgcagcgtgaaccagaacagcatccggaacctggacaccatcggcgtggccgtggacctgatcctgctcttccgggagctgcgggtggagcaggagagcctgctgacagccttccgctgtggcctgcagttcctgggcaacatcgccagcagaaatgaagacagccagagcatcgtgtgggtgcacgccttccctgagctgttcctgagctgcctgaaccacccagacaagaagatcgtggcctacagctccatgatcctcttcaccagcctgaaccacgagaggatgaaggagctggaggagaacctgaacatcgccattgatgtgattgatgcctaccagaagcaccctgagagcgagtggcccttcctgatcatcacagacctcttcctgaagagccctgagctggtgcaggccatgttccccaagctgaacaaccaggagcgggtgaccctgctggacctgatgattgccaagatcaccagtgatgagcccctgaccaaggatgacatccctgtgttcctgcggcatgctgagctgattgccagcacctttgtggaccagtgcaagacagtgctgaagctggccagcgaggagccccctgtgatgtacccctacatgagaattgtgggcaagttccggctgctggatgtgctgtgtgagatgacagtgaacacagagctgctgggctacctgcaggtgtttcctggcctgctggagcgggtgattgacctgctgcgggtcatccacgtggccggcaaggagaccaccaacatcttcagcaactgtggctgtgtgcgggcagagggggacatcagcaatgtggccaacggcttcaagagccacctgatccggctgattggcaacctgtgctacaagaacaaggacaaccaggacaaggtgaatgagctggatggcatccccctcatcctggacaactgcaacatcagtgacagcaacccctgcagcgaccctgtgggggacatctgccaccccaagccctaccgccggcagcagcccaagcccaggtttgactgcaaggatggcggcactggagctggccgctgcatccccacctag

SEQ ID NO: 144242 - DNA, 2070 bp, synthetic construct
  misc_feature 1..2070: note = Description of Artificial Sequence: Synthetic coding sequence
  source 1..2070: mol_type = other DNA
atgaagcctgtgcatgagaggagccaggagtgcctgccccccaagaagagggacctgcctgtgaccagcgaggacatgggccgcaccaccagctgcagcaccaaccacacccccagcagtgatgccagcgagtggagccggggcgtggtggtggccggccagagccaggccggggcccgggtgtccctgggcggagatggagctgaggccatcaccggcctgactgtggaccagtatggcatgctgtacaaggtggccgtgcccccagccaccttcagccccaccggcctgcccagcgtggtgaacatgagccccctgccccccaccttcaacgtggccagcagcctcatccagcaccctggcatccactacccacccctgcactacgcccagctgcccagcaccagcctgcagttcatcggcagcccctacagcctgccctatgctgtgccccccaacttcctgcccagccccctgctgagccccagcgccaacctggccaccagccacctgccccactttgtgccctatgccagcctgctggccgagggcgccaccccaccaccccaggcccccagccctgcccacagcttcaacaaggcccccagcgccaccagccccagcggccagctgccccaccacagcagcacccagcccctggacctggcccctggccgcatgcccatctactaccagatgagccggctgcctgctggctacaccctgcacgagaccccacctgctggggccagccctgtgctgaccccccaggagagccagagcgccctggaggccgctgctgccaatggaggccagaggccccgggagaggaacctggtgagaagagagagcgaggccctggacagccccaacagcaaaggagagggccagggcctggtgcctgtggtggagtgtgtggtggatggccagctgttcagcggcagccagaccccccgggtggaggtggccgccccagcccaccggggcaccccagacacagacctggaggtgcagagggtggtgggcgccctggccagccaggactacagagtggtggccgcccagaggaaggaggagcccagccccctgaacctgagccaccacaccccagaccaccagggcgagggccggggcagcgccagaaatcctgctgagctggccgagaagagccaggcccggggcttctacccccagagccaccaggagcctgtgaagcaccggcccctgcccaaggccatggtggtggccaatggaaacctggtgcccactggaacagattctggcctgctgcctgtgggcagcgagatcctggtggccagcagcctggatgtgcaggcccgggccaccttcccagacaaggagcccaccccaccacccatcaccagcagccacctgcccagccacttcatgaagggggccatcatccagctggccactggagagctgaagagggtggaggacctgcagacccaggactttgtgcgctctgctgaggtgtctgggggcctgaagattgacagcagcacagtggtggacatccaggagagccagtggccaggctttgtgatgctgcactttgtggtgggggagcagcagagcaaggtgtccattgaggtgcccccagagcaccccttctttgtgtatggccagggctggagcagctgcagccctggccgcaccacccagctgttcagcctgccctgccaccggctgcaggtgggagatgtgtgcatcagcatcagcctgcagagcctgaacagcaacagcgtgtcccaggccagctgtgccccacccagccagctgggccccccccgggagaggcctgagaggacagtgctgggcagccgggagctgtgtgacagcgagggcaagagccagcctgctggggagggcagccgggtggtggagcccagccagcctgagagcggggcccaggcctgctggccagcccccagcttccagcgctacagcatgcagggcgaggaggcccgggccgccctgctgcggcccagcttcatcccccaggaggtgaagctgagcattgagggccgcagcaatgccggcaagtag

SEQ ID NO: 144243 - DNA, 3942 bp, synthetic construct
  misc_feature 1..3942: note = Description of Artificial Sequence: Synthetic coding sequence
  source 1..3942: mol_type = other DNA
atgaggtctgctgctgctgcccccaggagccctgctgtggccacagagagccgccgctttgctgctgcccgctggccaggctggaggagcctgcagaggcctgcccggcgcagcggccggggcggcggcggggccgcccctggcccctaccccagcgctgcccctcctcctcctggccctggccccccacccagccggcagagcagcccccccagcgccagtgactgcttcggcagcaatggaaatggaggaggagccttccggcccggcagccggcggctgctgggcctgggcggccccccccggccctttgtggtgctgctgctgcccctggccagccctggggcccctcctgctgcccccacccgggccagccccctgggcgcccgggccagccccccaagaagtggagtgtccctggcccggcctgcccctggctgccccaggcctgcctgtgagcctgtgtatggccccctgaccatgagcctgaagccccagcagcagcagcagcagcagcagcagcagcagcagcagcagcagcagcagcagcagcagcagcagcagcccccacctgctgctgccaacgtgaggaagccaggcggcagcggcctgctggccagccctgctgctgcccccagccccagcagcagctctgtgagcagcagcagcgccacagcccccagctctgtggtggccgccaccagcggcggcggccggcccggcctgggccggggcaggaacagcaacaagggcctgccccagagcaccatcagctttgatggcatctatgccaacatgaggatggtgcacatcctgacctctgtggtgggcagcaaatgtgaggtgcaggtgaagaatggaggcatctatgagggcgtcttcaagacctacagccccaagtgtgacctggtgctggatgctgcccacgagaagagcacagagagcagcagcggccccaagcgggaggagatcatggagagcatcctcttcaagtgcagcgactttgtggtggtgcagttcaaggacatggacagcagctatgccaagagagatgccttcacagacagcgccatcagcgccaaggtgaatggagagcacaaggagaaggacctggagccctgggatgctggggagctgacagccaatgaggagctggaggccctggagaatgatgtgtccaatggctgggaccccaatgacatgttccgctacaatgaagaaaattatggagtggtgtccacctatgacagcagcctgagcagctacacagtgcccctggagcgggacaacagcgaggagttcctgaagcgggaggcccgggccaaccagctggccgaggagattgagagcagcgcccagtacaaggcccgggtggccctggagaatgatgacagaagtgaggaggagaagtacacagctgtgcagaggaacagcagcgagcgggagggccacagcatcaacacccgggagaacaagtacatccccccaggccagaggaaccgggaggtgatctcctggggcagcggccggcagaacagccccaggatgggccagcccggcagcggctccatgcccagccgcagcaccagccacaccagtgacttcaaccccaacagcggcagtgaccagagggtggtgaatggaggagtgccctggcccagcccctgccccagccccagcagcaggcctcccagccgctaccagagcggccccaacagcctgcccccccgggccgccacccccacccggccccccagccggccccccagccggcccagcaggcctcccagccaccccagcgcccacggcagccctgcccctgtgtccaccatgcccaagaggatgagcagcgagggcccccccaggatgagccccaaggcccagaggcaccccaggaaccaccgggtgtctgctggccggggcagcatcagcagcggcctggagtttgtgagccacaacccccccagcgaggccgccaccccacctgtggcccggaccagccccagcggcggcacctggagctctgtggtgtctggagtgccccggctgagccccaagacccaccggcccaggagcccccggcagaacagcatcggcaacaccccatctggccctgtgctggccagcccccaggccggcatcatccccacagaagctgtggccatgcccatcccagctgccagccccaccccagccagccctgccagcaacagagctgtgacccccagcagcgaggccaaggacagccggctgcaggaccagaggcagaacagccctgctggcaacaaggagaacatcaagcccaatgagaccagccccagcttcagcaaggcagaaaataaaggcatcagccctgtggtgtctgagcacaggaagcagattgatgacctgaagaagttcaagaatgacttccggctgcagcccagcagcaccagcgagagcatggaccagctgctgaacaagaaccgggagggggagaagagccgggacctgatcaaggacaagattgagcccagcgccaaggacagcttcatcgagaacagcagcagcaactgcaccagcggcagcagcaagcccaacagccccagcatcagccccagcatcctgagcaacacagagcacaagaggggccctgaggtgaccagccagggcgtgcagaccagcagccctgcctgcaagcaggagaaggatgacaaggaggagaagaaggatgctgctgagcaggtgaggaagagcaccctgaaccccaatgccaaggagttcaaccccaggagcttcagccagcccaagcccagcaccacccccaccagcccccggccccaggcccagcccagccccagcatggtgggccaccagcagcccacccctgtgtacacccagcctgtgtgctttgcccccaacatgatgtaccctgtgcctgtgtcccctggggtgcagcccctgtaccccatccccatgacccccatgcctgtgaaccaggccaagacctacagagctgtgcccaacatgccccagcagaggcaggaccagcaccaccagagcgccatgatgcacccagccagcgctgctggcccccccatcgccgccaccccaccagcctacagcacccagtatgtggcctacagcccccagcagttccccaaccagcccctggtgcagcacgtgccccactaccagagccagcacccccacgtgtacagccctgtgatccagggcaatgccaggatgatggccccacccacccacgcccagcccggcctggtgagcagcagcgccacccagtatggagcccacgagcagacccacgccatgtatgcctgccccaagctgccctacaacaaggagaccagccccagcttctactttgccatcagcacaggcagcctggcccagcagtatgcccaccccaatgccaccctgcacccccacaccccccacccccagcccagcgccacccccaccggccagcagcagagccagcacggcggcagccacccagcccccagccctgtgcagcaccaccagcaccaggccgcccaggccctgcacctggccagcccccagcagcagagcgccatctaccacgccggcctggcccccaccccacccagcatgaccccagccagcaacacccagagcccccagaacagcttccctgctgcccagcagaccgtcttcaccatccaccccagccacgtgcagcctgcctacaccaaccccccccacatggcccacgtgccccaggcccacgtgcagagcggcatggtgcccagccaccccacagcccacgcccccatgatgctgatgaccacccagcccccaggcggcccccaggccgccctggcccagagcgccctgcagcccatccctgtgtccaccacagcccacttcccctacatgacccaccccagcgtgcaggcccaccaccagcagcagctgtag

SEQ ID NO: 144244 - DNA, 2988 bp, synthetic construct
  misc_feature 1..2988: note = Description of Artificial Sequence: Synthetic coding sequence
  source 1..2988: mol_type = other DNA
atgaggtctgctgctgctgcccccaggagccctgctgtggccacagagagccgccgctttgctgctgcccgctggccaggctggaggagcctgcagaggcctgcccggcgcagcggccggggcggcggcggggccgcccctggcccctaccccagcgctgcccctcctcctcctggccctggccccccacccagccggcagagcagcccccccagcgccagtgactgcttcggcagcaatggaaatggaggaggagccttccggcccggcagccggcggctgctgggcctgggcggccccccccggccctttgtggtgctgctgctgcccctggccagccctggggcccctcctgctgcccccacccgggccagccccctgggcgcccgggccagccccccaagaagtggagtgtccctggcccggcctgcccctggctgccccaggcctgcctgtgagcctgtgtatggccccctgaccatgagcctgaagccccagcagcagcagcagcagcagcagcagcagcagcagcagcagcagcagcagcagcagcagcagcagcagcccccacctgctgctgccaacgtgaggaagccaggcggcagcggcctgctggccagccctgctgctgcccccagccccagcagcagctctgtgagcagcagcagcgccacagcccccagctctgtggtggccgccaccagcggcggcggccggcccggcctgggccggggcaggaacagcaacaagggcctgccccagagcaccatcagctttgatggcatctatgccaacatgaggatggtgcacatcctgacctctgtggtgggcagcaaatgtgaggtgcaggtgaagaatggaggcatctatgagggcgtcttcaagacctacagccccaagtgtgacctggtgctggatgctgcccacgagaagagcacagagagcagcagcggccccaagcgggaggagatcatggagagcatcctcttcaagtgcagcgactttgtggtggtgcagttcaaggacatggacagcagctatgccaagagagatgccttcacagacagcgccatcagcgccaaggtgaatggagagcacaaggagaaggacctggagccctgggatgctggggagctgacagccaatgaggagctggaggccctggagaatgatgtgtccaatggctgggaccccaatgacatgttccgctacaatgaagaaaattatggagtggtgtccacctatgacagcagcctgagcagctacacagtgcccctggagcgggacaacagcgaggagttcctgaagcgggaggcccgggccaaccagctggccgaggagattgagagcagcgcccagtacaaggcccgggtggccctggagaatgatgacagaagtgaggaggagaagtacacagctgtgcagaggaacagcagcgagcgggagggccacagcatcaacacccgggagaacaagtacatccccccaggccagaggaaccgggaggtgatctcctggggcagcggccggcagaacagccccaggatgggccagcccggcagcggctccatgcccagccgcagcaccagccacaccagtgacttcaaccccaacagcggcagtgaccagagggtggtgaatggaggagtgccctggcccagcccctgccccagccccagcagcaggcctcccagccgctaccagagcggccccaacagcctgcccccccgggccgccacccccacccggccccccagccggccccccagccggcccagcaggcctcccagccaccccagcgcccacggcagccctgcccctgtgtccaccatgcccaagaggatgagcagcgagggcccccccaggatgagccccaaggcccagaggcaccccaggaaccaccgggtgtctgctggccggggcagcatcagcagcggcctggagtttgtgagccacaacccccccagcgaggccgccaccccacctgtggcccggaccagccccagcggcggcacctggagctctgtggtgtctggagtgccccggctgagccccaagacccaccggcccaggagcccccggcagaacagcatcggcaacaccccatctggccctgtgctggccagcccccaggccggcatcatccccacagaagctgtggccatgcccatcccagctgccagccccaccccagccagccctgccagcaacagagctgtgacccccagcagcgaggccaaggacagccggctgcaggaccagaggcagaacagccctgctggcaacaaggagaacatcaagcccaatgagaccagccccagcttcagcaaggcagaaaataaaggcatcagccctgtggtgtctgagcacaggaagcagattgatgacctgaagaagttcaagaatgacttccggctgcagcccagcagcaccagcgagagcatggaccagctgctgaacaagaaccgggagggggagaagagccgggacctgatcaaggacaagattgagcccagcgccaaggacagcttcatcgagaacagcagcagcaactgcaccagcggcagcagcaagcccaacagccccagcatcagccccagcatcctgagcaacacagagcacaagaggggccctgaggtgaccagccagggcgtgcagaccagcagccctgcctgcaagcaggagaaggatgacaaggaggagaagaaggatgctgctgagcaggtgaggaagagcaccctgaaccccaatgccaaggagttcaaccccaggagcttcagccagcccaagcccagcaccacccccaccagcccccggccccaggcccagcccagccccagcatggtgggccaccagcagcccacccctgtgtacacccagcctgtgtgctttgcccccaacatgatgtaccctgtgcctgtgtcccctggggtgcagtaccagatctgccccaacagcggcaagaccagcatcatccgggtgccctag

SEQ ID NO: 144245 - DNA, 3189 bp, synthetic construct
  misc_feature 1..3189: note = Description of Artificial Sequence: Synthetic coding sequence
  source 1..3189: mol_type = other DNA
atgctgaagccccagcccctgcagcagcccagccagccccagcagcccccacccacccagcaggccgtggcccggcggcccccaggcggcaccagccccccaaatggaggcctgcccggccccctggccaccagcgctgcccctcctggccccccagctgctgccagcccctgcctgggccctgtggccgctgctggcagcggcctgcggagaggagctgagggcatcctggccccccagcccccaccaccccagcagcaccaggagaggcctggagctgctgccatcggcagcgcccggggccagagcacaggcaagggccccccccagagccctgtgtttgagggcgtgtacaacaacagcaggatgctgcacttcctgacagctgtggtgggcagcacctgtgatgtgaaggtgaagaatggcaccacctatgagggcatcttcaagaccctgagcagcaagtttgagctggccgtggatgctgtgcacaggaaggccagcgagcctgctgggggccccaggagagaagatattgtggacaccatggtgttcaagcccagtgatgtgatgctggtgcacttcagaaatgtggacttcaactatgccaccaaggacaagttcacagattctgccatcgccatgaacagcaaggtgaatggagagcacaaggagaaggtgctgcagcgctgggagggcggggacagcaacagtgatgattatgacctggagagtgacatgagcaatggctgggaccccaatgagatgttcaagttcaatgaggagaactacggcgtgaagaccacctatgacagcagcctgagcagctacacagtgcccctggagaaggacaacagcgaggagttccggcagcgggagctgcgggccgcccagctggcccgggagattgagagcagcccccagtaccgcctgagaattgccatggagaatgatgatggccgcacagaggaggagaagcacagcgctgtgcagaggcagggcagcggccgggagagccccagcctggccagccgggagggcaagtacatccccctgccccagagggtgcgggagggcccccggggcggcgtgcgctgcagcagcagcagaggaggccggcccggcctgagcagcctgcccccccggggcccccaccacctggacaacagcagccctggccctggcagcgaggcccggggcatcaatggaggccccagcaggatgagccccaaggcccagaggcccctgcggggggccaagaccctgagcagccccagcaaccggcccagcggggagacctctgtgcccccacctcctgctgtgggccgcatgtacccacccaggagccccaagtctgctgccccagcccccatcagcgccagctgcccagagccccccatcggcagcgctgtgcccaccagcagcgccagcatccctgtgaccagctctgtgtctgaccccggggtgggcagcatcagccctgccagccccaagatcagcctggcccccacagatgtgaaggagctgagcaccaaggagcccggccgcaccctggagccccaggagctggccagaattgctgggaaggtgcccggcctgcagaatgagcagaagcgcttccagctggaggagctgaggaagtttggagcccagttcaagctgcagcccagcagcagccctgagaacagcctggaccccttccccccacgcatcctgaaggaggagcccaagggcaaggagaaggaggtggatggcctgctgaccagcgagcccatgggcagccctgtgagcagcaagacagagagcgtgtctgacaaggaggacaagccacccctggcccccagcggcggcacagagggccctgagcagcccccaccaccctgccccagccagacaggcagcccccctgtgggcctcatcaagggggaggacaaggatgagggccctgtggccgagcaggtgaagaagagcaccctgaaccccaatgccaaggagttcaaccccaccaagcccctgctgtctgtgaacaagagcaccagcacccccaccagccctggccccaggacccacagcacccccagcatccctgtgctgacagctggccagagcggcctgtacagcccccagtacatctcctacatcccccagatccacatgggccctgctgtgcaggccccccagatgtacccctaccctgtgagcaacagcgtgcccggccagcagggcaagtacagaggagccaagggcagcctgcccccccagaggagtgaccagcaccagcctgccagcgccccacccatgatgcaggccgctgctgctgctggcccccccctggtggccgccaccccctacagcagctacatcccctacaacccccagcagtttcctggccagcctgccatgatgcagcccatggcccactaccccagccagcctgtgtttgcccccatgctgcagagcaaccccaggatgctgaccagcggcagccacccccaggccatcgtgagcagcagcaccccccagtaccccagcgctgagcagcccaccccccaggccctgtatgccaccgtgcaccagagctacccccaccacgccacccagctgcacgcccaccagccccagcctgccaccacccccaccggcagccagccccagagccagcacgccgcccccagccctgtgcagcaccaggccggccaggccccccacctgggcagcggccagccccagcagaacctgtaccaccctggggccctgaccggcaccccacccagcctgcccccaggccccagcgcccagagcccccagagcagcttcccccagcctgctgctgtgtatgccatccaccaccagcagctgccccacggcttcaccaacatggcccacgtgacccaggcccacgtgcagacaggcatcacagctgcccccccaccccaccctggggccccccaccccccccaggtgatgctgctgcaccccccccagagccatggaggccccccccagggcgctgtgccccagagcggcgtgcctgccctgagcgccagcacccccagcccctacccctacatcggccacccccagggcgagcagcccggccaggcccctggcttccctggaggagcagatgaccgcatcccccccctgcccccacctggagagctgaagatcgtgctggccgccacctag

SEQ ID NO: 144246 - DNA, 3228 bp, synthetic construct
  misc_feature 1..3228: note = Description of Artificial Sequence: Synthetic coding sequence
  source 1..3228: mol_type = other DNA
atgctgaagccccagcccctgcagcagcccagccagccccagcagcccccacccacccagcaggccgtggcccggcggcccccaggcggcaccagccccccaaatggaggcctgcccggccccctggccaccagcgctgcccctcctggccccccagctgctgccagcccctgcctgggccctgtggccgctgctggcagcggcctgcggagaggagctgagggcatcctggccccccagcccccaccaccccagcagcaccaggagaggcctggagctgctgccatcggcagcgcccggggccagagcacaggcaagggccccccccagagccctgtgtttgagggcgtgtacaacaacagcaggatgctgcacttcctgacagctgtggtgggcagcacctgtgatgtgaaggtgaagaatggcaccacctatgagggcatcttcaagaccctgagcagcaagtttgagctggccgtggatgctgtgcacaggaaggccagcgagcctgctgggggccccaggagagaagatattgtggacaccatggtgttcaagcccagtgatgtgatgctggtgcacttcagaaatgtggacttcaactatgccaccaaggacaagttcacagattctgccatcgccatgaacagcaaggtgaatggagagcacaaggagaaggtgctgcagcgctgggagggcggggacagcaacagtgatgattatgacctggagagtgacatgagcaatggctgggaccccaatgagatgttcaagttcaatgaggagaactacggcgtgaagaccacctatgacagcagcctgagcagctacacagtgcccctggagaaggacaacagcgaggagttccggcagcgggagctgcgggccgcccagctggcccgggagattgagagcagcccccagtaccgcctgagaattgccatggagaatgatgatggccgcacagaggaggagaagcacagcgctgtgcagaggcagggcagcggccgggagagccccagcctggccagccgggagggcaagtacatccccctgccccagagggtgcgggagggcccccggggcggcgtgcgctgcagcagcagcagaggaggccggcccggcctgagcagcctgcccccccggggcccccaccacctggacaacagcagccctggccctggcagcgaggcccggggcatcaatggaggccccagcaggatgagccccaaggcccagaggcccctgcggggggccaagaccctgagcagccccagcaaccggcccagcggggagacctctgtgcccccacctcctgctgtgggccgcatgtacccacccaggagccccaagtctgctgccccagcccccatcagcgccagctgcccagagccccccatcggcagcgctgtgcccaccagcagcgccagcatccctgtgaccagctctgtgtctgaccccggggtgggcagcatcagccctgccagccccaagatcagcctggcccccacagatgtgaaggagctgagcaccaaggagcccggccgcaccctggagccccaggagctggccagaattgctgggaaggtgcccggcctgcagaatgagcagaagcgcttccagctggaggagctgaggaagtttggagcccagttcaagctgcagcccagcagcagccctgagaacagcctggaccccttccccccacgcatcctgaaggaggagcccaagggcaaggagaaggaggtggatggcctgctgaccagcgagcccatgggcagccctgtgagcagcaagacagagagcgtgtctgacaaggaggacaagccacccctggcccccagcggcggcacagagggccctgagcagcccccaccaccctgccccagccagacaggcagcccccctgtgggcctcatcaagggggaggacaaggatgagggccctgtggccgagcaggtgaagaagagcaccctgaaccccaatgccaaggagttcaaccccaccaagcccctgctgtctgtgaacaagagcaccagcacccccaccagccctggccccaggacccacagcacccccagcatccctgtgctgacagctggccagagcggcctgtacagcccccagtacatctcctacatcccccagatccacatgggccctgctgtgcaggccccccagatgtacccctaccctgtgagcaacagcgtgcccggccagcagggcaagtacagaggagccaagggcagcctgcccccccagaggagtgaccagcaccagcctgccagcgccccacccatgatgcaggccgctgctgctgctggcccccccctggtggccgccaccccctacagcagctacatcccctacaacccccagcagtttcctggccagcctgccatgatgcagcccatggcccactaccccagccagcctgtgtttgcccccatgctgcagagcaaccccaggatgctgaccagcggcagccacccccaggccatcgtgagcagcagcaccccccagtaccccagcgctgagcagcccaccccccaggccctgtatgccaccgtgcaccagagctacccccaccacgccacccagctgcacgcccaccagccccagcctgccaccacccccaccggcagccagccccagagccagcacgccgcccccagccctgtgcagcaccaggccggccaggccccccacctgggcagcggccagccccagcagaacctgtaccaccctggggccctgaccggcaccccacccagcctgcccccaggccccagcgcccagagcccccagagcagcttcccccagcctgctgctgtgtatgccatccaccaccagcagctgccccacggcttcaccaacatggcccacgtgacccaggcccacgtgcagacaggcatcacagctgcccccccaccccaccctggggccccccaccccccccaggtgatgctgctgcaccccccccagagccatggaggccccccccagggcgctgtgccccagagcggcgtgcctgccctgagcgccagcacccccagcccctacccctacatcggccacccccagggcgagcagcccggccaggcccctggcttccctggaggagcagatgaccgcatccgggagttcagcctggccggcggcatctggcacggccgggcagagggcctgcaggtgggccaggatgcccgggtgctgggcggggagtag

SEQ ID NO: 144247 - DNA, 3135 bp, synthetic construct
  misc_feature 1..3135: note = Description of Artificial Sequence: Synthetic coding sequence
  source 1..3135: mol_type = other DNA
atgctgaagccccagcccctgcagcagcccagccagccccagcagcccccacccacccagcaggccgtggcccggcggcccccaggcggcaccagccccccaaatggaggcctgcccggccccctggccaccagcgctgcccctcctggccccccagctgctgccagcccctgcctgggccctgtggccgctgctggcagcggcctgcggagaggagctgagggcatcctggccccccagcccccaccaccccagcagcaccaggagaggcctggagctgctgccatcggcagcgcccggggccagagcacaggcaagggccccccccagagccctgtgtttgagggcgtgtacaacaacagcaggatgctgcacttcctgacagctgtggtgggcagcacctgtgatgtgaaggtgaagaatggcaccacctatgagggcatcttcaagaccctgagcagcaagtttgagctggccgtggatgctgtgcacaggaaggccagcgagcctgctgggggccccaggagagaagatattgtggacaccatggtgttcaagcccagtgatgtgatgctggtgcacttcagaaatgtggacttcaactatgccaccaaggacaagttcacagattctgccatcgccatgaacagcaaggtgaatggagagcacaaggagaaggtgctgcagcgctgggagggcggggacagcaacagtgatgattatgacctggagagtgacatgagcaatggctgggaccccaatgagatgttcaagttcaatgaggagaactacggcgtgaagaccacctatgacagcagcctgagcagctacacagtgcccctggagaaggacaacagcgaggagttccggcagcgggagctgcgggccgcccagctggcccgggagattgagagcagcccccagtaccgcctgagaattgccatggagaatgatgatggccgcacagaggaggagaagcacagcgctgtgcagaggcagggcagcggccgggagagccccagcctggccagccgggagggcaagtacatccccctgccccagagggtgcgggagggcccccggggcggcgtgcgctgcagcagcagcagaggaggccggcccggcctgagcagcctgcccccccggggcccccaccacctggacaacagcagccctggccctggcagcgaggcccggggcatcaatggaggccccagcaggatgagccccaaggcccagaggcccctgcggggggccaagaccctgagcagccccagcaaccggcccagcggggagacctctgtgcccccacctcctgctgtgggccgcatgtacccacccaggagccccaagtctgctgccccagcccccatcagcgccagctgcccagagccccccatcggcagcgctgtgcccaccagcagcgccagcatccctgtgaccagctctgtgtctgaccccggggtgggcagcatcagccctgccagccccaagatcagcctggcccccacagatgtgaaggagctgagcaccaaggagcccggccgcaccctggagccccaggagctggccagaattgctgggaaggtgcccggcctgcagaatgagcagaagcgcttccagctggaggagctgaggaagtttggagcccagttcaagctgcagcccagcagcagccctgagaacagcctggaccccttccccccacgcatcctgaaggaggagcccaagggcaaggagaaggaggtggatggcctgctgaccagcgagcccatgggcagccctgtgagcagcaagacagagagcgtgtctgacaaggaggacaagccacccctggcccccagcggcggcacagagggccctgagcagcccccaccaccctgccccagccagacaggcagcccccctgtgggcctcatcaagggggaggacaaggatgagggccctgtggccgagcaggtgaagaagagcaccctgaaccccaatgccaaggagttcaaccccaccaagcccctgctgtctgtgaacaagagcaccagcacccccaccagccctggccccaggacccacagcacccccagcatccctgtgctgacagctggccagagcggcctgtacagcccccagtacatctcctacatcccccagatccacatgggccctgctgtgcaggccccccagatgtacccctaccctgtgagcaacagcgtgcccggccagcagggcaagtacagaggagccaagggcagcctgcccccccagaggagtgaccagcaccagcctgccagcgccccacccatgatgcaggccgctgctgctgctggcccccccctggtggccgccaccccctacagcagctacatcccctacaacccccagcagtttcctggccagcctgccatgatgcagcccatggcccactaccccagccagcctgtgtttgcccccatgctgcagagcaaccccaggatgctgaccagcggcagccacccccaggccatcgtgagcagcagcaccccccagtaccccagcgctgagcagcccaccccccaggccctgtatgccaccgtgcaccagagctacccccaccacgccacccagctgcacgcccaccagccccagcctgccaccacccccaccggcagccagccccagagccagcacgccgcccccagccctgtgcagcaccaggccggccaggccccccacctgggcagcggccagccccagcagaacctgtaccaccctggggccctgaccggcaccccacccagcctgcccccaggccccagcgcccagagcccccagagcagcttcccccagcctgctgctgtgtatgccatccaccaccagcagctgccccacggcttcaccaacatggcccacgtgacccaggcccacgtgcagacaggcatcacagctgcccccccaccccaccctggggccccccaccccccccaggtgatgctgctgcaccccccccagagccatggaggccccccccagggcgctgtgccccagagcggcgtgcctgccctgagcgccagcacccccagcccctacccctacatcggccacccccaggtgcagagccaccccagccagcagctgcccttccaccccccaggcaactag

SEQ ID NO: 144248 - DNA, 1203 bp, synthetic construct
  misc_feature 1..1203: note = Description of Artificial Sequence: Synthetic coding sequence
  source 1..1203: mol_type = other DNA
atgctgaagccccagcccctgcagcagcccagccagccccagcagcccccacccacccagcaggccgtggcccggcggcccccaggcggcaccagccccccaaatggaggcctgcccggccccctggccaccagcgctgcccctcctggccccccagctgctgccagcccctgcctgggccctgtggccgctgctggcagcggcctgcggagaggagctgagggcatcctggccccccagcccccaccaccccagcagcaccaggagaggcctggagctgctgccatcggcagcgcccggggccagagcacaggcaagggccccccccagagccctgtgtttgagggcgtgtacaacaacagcaggatgctgcacttcctgacagctgtggtgggcagcacctgtgatgtgaaggtgaagaatggcaccacctatgagggcatcttcaagaccctgagcagcaagtttgagctggccgtggatgctgtgcacaggaaggccagcgagcctgctgggggccccaggagagaagatattgtggacaccatggtgttcaagcccagtgatgtgatgctggtgcacttcagaaatgtggacttcaactatgccaccaaggacaagttcacagattctgccatcgccatgaacagcaaggtgaatggagagcacaaggagaaggtgctgcagcgctgggagggcggggacagcaacagtgatgattatgacctggagagtgacatgagcaatggctgggaccccaatgagatgttcaagttcaatgaggagaactacggcgtgaagaccacctatgacagcagcctgagcagctacacagtgcccctggagaaggacaacagcgaggagttccggcagcgggagctgcgggccgcccagctggcccgggagattgagagcagcccccagtaccgcctgagaattgccatggagaatgatgatggccgcacagaggaggagaagcacagcgctgtgcagaggcagggcagcggccgggagagccccagcctggccagccgggagggcaagtacatccccctgcccccccaccggggccagggccagggccctgctggggtgggcggcagctgcagcgccccagcccggccccaccctgtgctgcccagccaccccctcatctacagccctgctggagatggccgctccttcatcttctactacctgtag

SEQ ID NO: 144249 - DNA, 3135 bp, synthetic construct
  misc_feature 1..3135: note = Description of Artificial Sequence: Synthetic coding sequence
  source 1..3135: mol_type = other DNA
atgctgaagccccagcccctgcagcagcccagccagccccagcagcccccacccacccagcaggccgtggcccggcggcccccaggcggcaccagccccccaaatggaggcctgcccggccccctggccaccagcgctgcccctcctggccccccagctgctgccagcccctgcctgggccctgtggccgctgctggcagcggcctgcggagaggagctgagggcatcctggccccccagcccccaccaccccagcagcaccaggagaggcctggagctgctgccatcggcagcgcccggggccagagcacaggcaagggccccccccagagccctgtgtttgagggcgtgtacaacaacagcaggatgctgcacttcctgacagctgtggtgggcagcacctgtgatgtgaaggtgaagaatggcaccacctatgagggcatcttcaagaccctgagcagcaagtttgagctggccgtggatgctgtgcacaggaaggccagcgagcctgctgggggccccaggagagaagatattgtggacaccatggtgttcaagcccagtgatgtgatgctggtgcacttcagaaatgtggacttcaactatgccaccaaggacaagttcacagattctgccatcgccatgaacagcaaggtgaatggagagcacaaggagaaggtgctgcagcgctgggagggcggggacagcaacagtgatgattatgacctggagagtgacatgagcaatggctgggaccccaatgagatgttcaagttcaatgaggagaactacggcgtgaagaccacctatgacagcagcctgagcagctacacagtgcccctggagaaggacaacagcgaggagttccggcagcgggagctgcgggccgcccagctggcccgggagattgagagcagcccccagtaccgcctgagaattgccatggagaatgatgatggccgcacagaggaggagaagcacagcgctgtgcagaggcagggcagcggccgggagagccccagcctggccagccgggagggcaagtacatccccctgccccagagggtgcgggagggcccccggggcggcgtgcgctgcagcagcagcagaggaggccggcccggcctgagcagcctgcccccccggggcccccaccacctggacaacagcagccctggccctggcagcgaggcccggggcatcaatggaggccccagcaggatgagccccaaggcccagaggcccctgcggggggccaagaccctgagcagccccagcaaccggcccagcggggagacctctgtgcccccacctcctgctgtgggccgcatgtacccacccaggagccccaagtctgctgccccagcccccatcagcgccagctgcccagagccccccatcggcagcgctgtgcccaccagcagcgccagcatccctgtgaccagctctgtgtctgaccccggggtgggcagcatcagccctgccagccccaagatcagcctggcccccacagatgtgaaggagctgagcaccaaggagcccggccgcaccctggagccccaggagctggccagaattgctgggaaggtgcccggcctgcagaatgagcagaagcgcttccagctggaggagctgaggaagtttggagcccagttcaagctgcagcccagcagcagccctgagaacagcctggaccccttccccccacgcatcctgaaggaggagcccaagggcaaggagaaggaggtggatggcctgctgaccagcgagcccatgggcagccctgtgagcagcaagacagagagcgtgtctgacaaggaggacaagccacccctggcccccagcggcggcacagagggccctgagcagcccccaccaccctgccccagccagacaggcagcccccctgtgggcctcatcaagggggaggacaaggatgagggccctgtggccgagcaggtgaagaagagcaccctgaaccccaatgccaaggagttcaaccccaccaagcccctgctgtctgtgaacaagagcaccagcacccccaccagccctggccccaggacccacagcacccccagcatccctgtgctgacagctggccagagcggcctgtacagcccccagtacatctcctacatcccccagatccacatgggccctgctgtgcaggccccccagatgtacccctaccctgtgagcaacagcgtgcccggccagcagggcaagtacagaggagccaagggcagcctgcccccccagaggagtgaccagcaccagcctgccagcgccccacccatgatgcaggccgctgctgctgctggcccccccctggtggccgccaccccctacagcagctacatcccctacaacccccagcagtttcctggccagcctgccatgatgcagcccatggcccactaccccagccagcctgtgtttgcccccatgctgcagagcaaccccaggatgctgaccagcggcagccacccccaggccatcgtgagcagcagcaccccccagtaccccagcgctgagcagcccaccccccaggccctgtatgccaccgtgcaccagagctacccccaccacgccacccagctgcacgcccaccagccccagcctgccaccacccccaccggcagccagccccagagccagcacgccgcccccagccctgtgcagcaccaggccggccaggccccccacctgggcagcggccagccccagcagaacctgtaccaccctggggccctgaccggcaccccacccagcctgcccccaggccccagcgcccagagcccccagagcagcttcccccagcctgctgctgtgtatgccatccaccaccagcagctgccccacggcttcaccaacatggcccacgtgacccaggcccacgtgcagacaggcatcacagctgcccccccaccccaccctggggccccccaccccccccaggtgatgctgctgcaccccccccagagccatggaggccccccccagggcgctgtgccccagagcggcgtgcctgccctgagcgccagcacccccagcccctacccctacatcggccacccccaggcccccctgcccccacctggagagctgaagatcgtgctggccgccacctag

SEQ ID NO: 144250 - DNA, 3294 bp, synthetic construct
  misc_feature 1..3294: note = Description of Artificial Sequence: Synthetic coding sequence
  source 1..3294: mol_type = other DNA
atgctgaagccccagcccctgcagcagcccagccagccccagcagcccccacccacccagcaggccgtggcccggcggcccccaggcggcaccagccccccaaatggaggcctgcccggccccctggccaccagcgctgcccctcctggccccccagctgctgccagcccctgcctgggccctgtggccgctgctggcagcggcctgcggagaggagctgagggcatcctggccccccagcccccaccaccccagcagcaccaggagaggcctggagctgctgccatcggcagcgcccggggccagagcacaggcaagggccccccccagagccctgtgtttgagggcgtgtacaacaacagcaggatgctgcacttcctgacagctgtggtgggcagcacctgtgatgtgaaggtgaagaatggcaccacctatgagggcatcttcaagaccctgagcagcaagtttgagctggccgtggatgctgtgcacaggaaggccagcgagcctgctgggggccccaggagagaagatattgtggacaccatggtgttcaagcccagtgatgtgatgctggtgcacttcagaaatgtggacttcaactatgccaccaaggacaagttcacagattctgccatcgccatgaacagcaaggtgaatggagagcacaaggagaaggtgctgcagcgctgggagggcggggacagcaacagtgatgattatgacctggagagtgacatgagcaatggctgggaccccaatgagatgttcaagttcaatgaggagaactacggcgtgaagaccacctatgacagcagcctgagcagctacacagtgcccctggagaaggacaacagcgaggagttccggcagcgggagctgcgggccgcccagctggcccgggagattgagagcagcccccagtaccgcctgagaattgccatggagaatgatgatggccgcacagaggaggagaagcacagcgctgtgcagaggcagggcagcggccgggagagccccagcctggccagccgggagggcaagtacatccccctgccccagagggtgcgggagggcccccggggcggcgtgcgctgcagcagcagcagaggaggccggcccggcctgagcagcctgcccccccggggcccccaccacctggacaacagcagccctggccctggcagcgaggcccggggcatcaatggaggccccagcaggatgagccccaaggcccagaggcccctgcggggggccaagaccctgagcagccccagcaaccggcccagcggggagacctctgtgcccccacctcctgctgtgggccgcatgtacccacccaggagccccaagtctgctgccccagcccccatcagcgccagctgcccagagccccccatcggcagcgctgtgcccaccagcagcgccagcatccctgtgaccagctctgtgtctgaccccggggtgggcagcatcagccctgccagccccaagatcagcctggcccccacagatgtgaaggagctgagcaccaaggagcccggccgcaccctggagccccaggagctggccagaattgctgggaaggtgcccggcctgcagaatgagcagaagcgcttccagctggaggagctgaggaagtttggagcccagttcaagctgcagcccagcagcagccctgagaacagcctggaccccttccccccacgcatcctgaaggaggagcccaagggcaaggagaaggaggtggatggcctgctgaccagcgagcccatgggcagccctgtgagcagcaagacagagagcgtgtctgacaaggaggacaagccacccctggcccccagcggcggcacagagggccctgagcagcccccaccaccctgccccagccagacaggcagcccccctgtgggcctcatcaagggggaggacaaggatgagggccctgtggccgagcaggtgaagaagagcaccctgaaccccaatgccaaggagttcaaccccaccaagcccctgctgtctgtgaacaagagcaccagcacccccaccagccctggccccaggacccacagcacccccagcatccctgtgctgacagctggccagagcggcctgtacagcccccagtacatctcctacatcccccagatccacatgggccctgctgtgcaggccccccagatgtacccctaccctgtgagcaacagcgtgcccggccagcagggcaagtacagaggagccaagggcagcctgcccccccagaggagtgaccagcaccagcctgccagcgccccacccatgatgcaggccgctgctgctgctggcccccccctggtggccgccaccccctacagcagctacatcccctacaacccccagcagtttcctggccagcctgccatgatgcagcccatggcccactaccccagccagcctgtgtttgcccccatgctgcagagcaaccccaggatgctgaccagcggcagccacccccaggccatcgtgagcagcagcaccccccagtaccccagcgctgagcagcccaccccccaggccctgtatgccaccgtgcaccagagctacccccaccacgccacccagctgcacgcccaccagccccagcctgccaccacccccaccggcagccagccccagagccagcacgccgcccccagccctgtgcagcaccaggccggccaggccccccacctgggcagcggccagccccagcagaacctgtaccaccctggggccctgaccggcaccccacccagcctgcccccaggccccagcgcccagagcccccagagcagcttcccccagcctgctgctgtgtatgccatccaccaccagcagctgccccacggcttcaccaacatggcccacgtgacccaggcccacgtgcagacaggcatcacagctgcccccccaccccaccctggggccccccaccccccccaggtgatgctgctgcaccccccccagagccatggaggccccccccagggcgctgtgccccagagcggcgtgcctgccctgagcgccagcacccccagcccctacccctacatcggccacccccagggcgagcagcccggccaggcccctggcttccctggaggagcagatgaccgcatcctgtgccgggtgggccgcagccacagcagaagacggcagggcctggcccctggctctgtgctgtgcttcccccccagcagcctgagctgtgaccctgctgcccccctgcccacagccagccctgccctgagtgaccctgactgcctgctgacctag

SEQ ID NO: 144251 - DNA, 2679 bp, synthetic construct
  misc_feature 1..2679: note = Description of Artificial Sequence: Synthetic coding sequence
  source 1..2679: mol_type = other DNA
atgtctgaaagagctgctgatgatgtgcggggggagccccggcgggctgctgctgctgctgggggcgctgctgctgctgctgcccggcagcagcagcagcagcagcagcagcagcagcccccaccaccccagccccagaggcagcagcaccccccacctccacccaggaggaccaggccagaagatggcggccctggagctgccagcaccagcgctgctgccatggccaccgtgggggagcggcggcccctgcccagccctgaggtgatgctgggccagagctggaacctgtgggtggaggccagcaagctgcccgggaaggatggaacagagctggatgagagcttcaaggagtttgggaagaaccgggaggtgatgggcctgtgccgggaggacatgcccatcttcggcttctgcccagcccatgatgacttctacctggtggtgtgcaatgactgcaaccaggtggtgaagccccaggccttccagagccactatgaaagaagacacagcagcagcagcaagccacccctggccgtgccccccaccagcgtcttctccttcttccccagcctgagcaagagcaagggcggcagcgccagcggcagcaacagaagcagcagcggcggcgtgctgagcgccagcagcagcagcagcaagctgctgaagagccccaaggagaagctgcagctgcggggcaacacccggcccatgcaccccatccagcagagccgggtgccccacggccgcatcatgaccccatctgtgaaggtggagaagatccaccccaagatggatggcaccctgctgaagtctgctgtgggccccacctgcccagccaccgtgagcagcctggtgaagccaggcctgaactgccccagcatccccaagcccaccctgcccagccctggccagatcctgaatggcaagggcctgcctgccccacccaccctggagaagaagccagaggacaacagcaacaacaggaagttcctgaacaagaggctgtctgagcgggagtttgatcctgacatccactgtggggtcatcgacctggacaccaagaagccctgcaccaggagcctgacctgcaagacccacagcctgacccagaggagagctgtgcagggccgcaggaagagatttgatgtgctgctggccgagcacaagaacaagacccgggagaaggagctgatccgccacccagacagccagcagcccccccagcccctgcgggacccccacccagccccacccaggaccagccaggagccccaccagaacccccacggcgtcatccccagcgagagcaagccctttgtggccagcaagcccaagccccacacccccagcctgcccaggcctcctggctgcccagcccagcagggcggcagcgcccccatcgaccccccacctgtgcatgagagcccccacccccccctgcctgccacagagcccgccagccggctgagcagcgaggagggggagggagatgacaaggaggagagcgtggagaagctggactgccactacagcggccaccacccccagcctgccagcttctgcaccttcggcagccggcagatcggccggggctactacgtgtttgacagccgctggaaccggctgcgctgtgccctgaacctgatggtggagaagcacctgaatgcccagctgtggaagaagatcccccctgtgcccagcaccaccagccccatcagcacccgcatcccccacaggaccaacagcgtgcccaccagccagtgtggggtgtcctacctggccgccgccaccgtgtccaccagccctgtgctgctgagcagcacctgcatcagccccaacagcaagtctgtgcctgcccacggcaccaccctgaatgcccagcctgctgccagcggggccatggaccctgtgtgcagcatgcagagccggcaggtgagcagcagcagcagcagccccagcaccccatctggcctgagctctgtgcccagcagccccatgagcaggaagccccagaagctgaagagcagcaagagcctgcggcccaaggagagcagcggcaacagcaccaactgccagaatgccagcagcagcaccagcggcggcagcggcaagaagaggaagaacagcagccccctgctggtgcacagcagcagcagcagcagcagcagcagcagcagcagccacagcatggagagcttcaggaagaactgtgtggcccacagcggccccccctaccccagcacagtgaccagcagccacagcatcggcctgaactgtgtgaccaacaaggccaatgctgtgaatgtgagacatgaccagagcggccggggccccccaacaggcagccctgctgagagcatcaagaggatgtctgtgatggtgaacagcagtgacagcaccctgagcctgggccccttcatccaccagagcaatgagctgcctgtgaacagccacggcagcttcagccacagccacacccccctggacaagctgattggcaagaagaggaagtgcagccccagcagcagcagcatcaacaacagcagcagcaagcccaccaaggtggccaaggtgcctgctgtgaacaacgtgcacatgaagcacacaggcaccatccctggggcccagggcctgatgaacagcagcctgctgcaccagcccaaggcccggccctag

SEQ ID NO: 144252 - DNA, 2838 bp, synthetic construct
  misc_feature 1..2838: note = Description of Artificial Sequence: Synthetic coding sequence
  source 1..2838: mol_type = other DNA
atgtctgaaagagctgctgatgatgtgcggggggagccccggcgggctgctgctgctgctgggggcgctgctgctgctgctgcccggcagcagcagcagcagcagcagcagcagcagcccccaccaccccagccccagaggcagcagcaccccccacctccacccaggaggaccaggccagaagatggcggccctggagctgccagcaccagcgctgctgccatggccaccgtgggggagcggcggcccctgcccagccctgaggtgatgctgggccagagctggaacctgtgggtggaggccagcaagctgcccgggaaggatggaacagagctggatgagagcttcaaggagtttgggaagaaccgggaggtgatgggcctgtgccgggaggacatgcccatcttcggcttctgcccagcccatgatgacttctacctggtggtgtgcaatgactgcaaccaggtggtgaagccccaggccttccagagccactatgaaagaagacacagcagcagcagcaagccacccctggccgtgccccccaccagcgtcttctccttcttccccagcctgagcaagagcaagggcggcagcgccagcggcagcaacagaagcagcagcggcggcgtgctgagcgccagcagcagcagcagcaagctgctgaagagccccaaggagaagctgcagctgcggggcaacacccggcccatgcaccccatccagcagagccgggtgccccacggccgcatcatgaccccatctgtgaaggtggagaagatccaccccaagatggatggcaccctgctgaagtctgctgtgggccccacctgcccagccaccgtgagcagcctggtgaagccaggcctgaactgccccagcatccccaagcccaccctgcccagccctggccagatcctgaatggcaagggcctgcctgccccacccaccctggagaagaagccagaggacaacagcaacaacaggaagttcctgaacaagaggctgtctgagcgggagtttgatcctgacatccactgtggggtcatcgacctggacaccaagaagccctgcaccaggagcctgacctgcaagacccacagcctgacccagaggagagctgtgcagggccgcaggaagagatttgatgtgctgctggccgagcacaagaacaagacccgggagaaggagctgatccgccacccagacagccagcagcccccccagcccctgcgggacccccacccagccccacccaggaccagccaggagccccaccagaacccccacggcgtcatccccagcgagagcaagccctttgtggccagcaagcccaagccccacacccccagcctgcccaggcctcctggctgcccagcccagcagggcggcagcgcccccatcgaccccccacctgtgcatgagagcccccacccccccctgcctgccacagagcccgccagccggctgagcagcgaggagggggagggagatgacaaggaggagagcgtggagaagctggactgccactacagcggccaccacccccagcctgccagcttctgcaccttcggcagccggcagatcggccggggctactacgtgtttgacagccgctggaaccggctgcgctgtgccctgaacctgatggtggagaagcacctgaatgcccagctgtggaagaagatcccccctgtgcccagcaccaccagccccatcagcacccgcatcccccacaggaccaacagcgtgcccaccagccagtgtggggtgtcctacctggccgccgccaccgtgtccaccagccctgtgctgctgagcagcacctgcatcagccccaacagcaagtctgtgcctgcccacggcaccaccctgaatgcccagcctgctgccagcggggccatggaccctgtgtgcagcatgcagagccggcaggtgagcagcagcagcagcagccccagcaccccatctggcctgagctctgtgcccagcagccccatgagcaggaagccccagaagctgaagagcagcaagagcctgcggcccaaggagagcagcggcaacagcaccaactgccagaatgccagcagcagcaccagcggcggcagcggcaagaagaggaagaacagcagccccctgctggtgcacagcagcagcagcagcagcagcagcagcagcagcagccacagcatggagagcttcaggaagaactgtgtggcccacagcggccccccctaccccagcacagtgaccagcagccacagcatcggcctgaactgtgtgaccaacaaggccaatgctgtgaatgtgagacatgaccagagcggccggggccccccaacaggcagccctgctgagagcatcaagaggatgtctgtgatggtgaacagcagtgacagcaccctgagcctgggccccttcatccaccagagcaatgagctgcctgtgaacagccacggcagcttcagccacagccacacccccctggacaagctgattggcaagaagaggaagtgcagccccagcagcagcagcatcaacaacagcagcagcaagcccaccaaggtggccaaggtgcctgctgtgaacaacgtgcacatgaagcacacaggcaccatccctggggcccagggcctgatgaacagcagcctgctgcaccaggacatcagcagcccctgcctgaggacaggcatcagcgccaccagcccccagagcccagacctgaagagcaagggcaccagcctgacagctgagaacagcactggaagaaataatgctgacacctttgaggacaagctgcacctgcacagcgccctgtggaccccccgctgcctgtag

SEQ ID NO: 144253 - DNA, 81 bp, synthetic construct
  misc_feature 1..81: note = Description of Artificial Sequence: Synthetic coding sequence
  source 1..81: mol_type = other DNA
atgtctgaaagagctgctgatgatgtgcggggggagccccggcgggctgctgctgctgctgggggcgctgctgctgcctag

SEQ ID NO: 144254 - DNA, 2679 bp, synthetic construct; identical to SEQ ID NO: 144251
  misc_feature 1..2679: note = Description of Artificial Sequence: Synthetic coding sequence
  source 1..2679: mol_type = other DNA

SEQ ID NO: 144255 - DNA, 2838 bp, synthetic construct; identical to SEQ ID NO: 144252
  misc_feature 1..2838: note = Description of Artificial Sequence: Synthetic coding sequence
  source 1..2838: mol_type = other DNA

SEQ ID NO: 144256 - DNA, 393 bp, synthetic construct
  misc_feature 1..393: note = Description of Artificial Sequence: Synthetic coding sequence
  source 1..393: mol_type = other DNA
atgtctgaaagagctgctgatgatgtgcggggggagccccggcgggctgctgctgctgctgggggcgctgctgctgctgctgcccggcagcagcagcagcagcagcagcagcagcagcccccaccaccccagccccagaggcagcagcaccccccacctccacccaggaggaccaggccagaagatggcggccctggagctgccagcaccagcgctgctgccatggccaccgtgggggagcggcggcccctgcccagccctgaggtgatgctgggccagagctggaacctgtgggtggaggccagcaagctgcccgggaaggatggagaccgcatcggcaggaagttccagggcgtgtggaaccgggaggtgatgggcctgtgccgggagtag

SEQ ID NO: 144257 - DNA, 2244 bp, synthetic construct
  misc_feature 1..2244: note = Description of Artificial Sequence: Synthetic coding sequence
  source 1..2244: mol_type = other DNA
atggagggcagcaagacccccctgcagagcagccccagcgcccaggagctgaaggcccccctggagaggaggcacagcagcagcagcaagccacccctggccgtgccccccacctctgtgttctccttcttccccagcctgagcaagagcaaaggaggcagcgccagcggcagcaacagaagcagcagtggaggagtgctgagcgccagcagcagcagcagcaagctgctgaagagccccaaggagaagctgcagctgcggggcaacacccggcccatgcaccccatccagcagagccgggtgccccacggccgcatcatgacccccagcgtgaaggtggagaagatccaccccaagatggatggcaccctgctgaagtctgctgtgggccccacctgcccagccaccgtgagcagcctggtgaagccaggcctgaactgccccagcatccccaagcccaccctgcccagccctggccagatcctgaatggcaagggcctgcctgccccacccaccctggagaagaagccagaggacaacagcaacaacaggaagttcctgaacaagaggctgtctgagcgggagtttgatcctgacatccactgcggcgtgattgacctggacaccaagaagccctgcaccaggagcctgacctgcaagacccacagcctgacccagaggagagctgtgcagggccgcaggaagagatttgatgtgctgctggccgagcacaagaacaagacccgggagaaggagctgatccgccacccagacagccagcagcccccccagcccctgcgggacccccacccagccccacccaggaccagccaggagccccaccagaacccccatggagtcatccccagcgagagcaagccctttgtggccagcaagcccaagccccacacccccagcctgccccggcccccaggctgcccagcccagcagggcggcagcgcccccattgatcctcctcctgtgcatgagagcccccacccccccctgcctgccacagagcccgccagccggctgagcagcgaggagggggagggagatgacaaggaggagagcgtggagaagctggactgccactacagcggccaccacccccagcctgccagcttctgcaccttcggcagccggcagatcggccggggctactacgtgtttgacagccgctggaaccggctgcgctgtgccctgaacctgatggtggagaagcacctgaatgcccagctgtggaagaagatcccccctgtgcccagcaccaccagccccatcagcacccgcatcccccacaggaccaacagcgtgcccaccagccagtgtggggtgtcctacctggccgccgccaccgtgtccaccagccctgtgctgctgagcagcacctgcatcagccccaacagcaagtctgtgcctgcccacggcaccaccctgaatgcccagcctgctgccagcggggccatggaccctgtgtgcagcatgcagagccggcaggtgagcagcagcagcagcagccccagcacccccagcggcctgagctctgtgcccagcagccccatgagcaggaagccccagaagctgaagagcagcaagagcctgcggcccaaggagagcagcggcaacagcaccaactgccagaatgccagcagcagcaccagcggcggcagcggcaagaagaggaagaacagcagccccctgctggtgcacagcagcagcagcagcagcagcagcagcagcagcagccacagcatggagagcttcaggaagaactgtgtggcccacagcggccccccctaccccagcacagtgaccagcagccacagcatcggcctgaactgtgtgaccaacaaggccaatgctgtgaatgtgagacatgaccagagcggccggggcccccccaccggcagccctgctgagagcatcaagaggatgtctgtgatggtgaacagcagtgacagcaccctgagcctgggccccttcatccaccagagcaatgagctgcctgtgaacagccacggcagcttcagccacagccacacccccctggacaagctgattggcaagaagaggaagtgcagccccagcagcagcagcatcaacaacagcagcagcaagcccaccaaggtggccaaggtgcctgctgtgaacaacgtgcacatgaagcacacaggcaccatccctggggcccagggcctgatgaacagcagcctgctgcaccagcccaaggcccggccctag

SEQ ID NO: 144258 - DNA, 663 bp, synthetic construct
  misc_feature 1..663: note = Description of Artificial Sequence: Synthetic coding sequence
  source 1..663: mol_type = other DNA
atggaggaggatgagttcatcggggagaagaccttccagcgctactgtgccgagttcatcaagcacagccagcagatcggggacagctgggagtggaggcccagcaaggactgcagtgatggctacatgtgcaagatccacttccagatcaagaatggatctgtgatgagccacctgggcgccagcacccacggccagacctgcctgcccatggaggaggcctttgagctgcccctggatgactgtgaggtgattgaaacagctgctgccagcgaggtgatcaagtatgagtaccacgtgctgtacagctgcagctaccaggtgcctgtgctgtacttccgggccagcttcctggatggccggcccctgaccctgaaggacatctgggagggcgtgcatgagtgctacaagatgaggctgctgcagggcccctgggacaccatcacccagcaggagcaccccatcctgggccagcccttctttgtgctgcacccctgcaagaccaatgagttcatgacccctgtgctgaagaacagccagaagatcaacaagaatgtgaactacatcacctcctggctgagcatcgtgggccctgtggtgggcctgaacctgcccctgtcctatgccaaggccaccagccaggatgaaagaaatgtgccctag

SEQ ID NO: 144259 - DNA, 378 bp, synthetic construct
  misc_feature 1..378: note = Description of Artificial Sequence: Synthetic coding sequence
  source 1..378: mol_type = other DNA
atggaggaggatgagttcatcggggagaagaccttccagcgctactgtgccgagttcatcaagcacagccagcagatcggggacagctgggagtggaggcccagcaaggactgcagtgatggctacatgtgcaagatccacttccagatcaagaatggatctgtgatgagccacctgggcgccagcacccacggccagacctgcctgcccatggaggtgaagagctgcagcgtgacccaggccggcgtgcagctgcgggacctgagcagcctgcagcccccacccagcggcttcaagcagttcagctgcctgagcctgcccagcaactgggactaccggggcagccccctgcacctggccaacttcctgtacttctag

SEQ ID NO: 144260 - DNA, 663 bp, synthetic construct; identical to SEQ ID NO: 144258
  misc_feature 1..663: note = Description of Artificial Sequence: Synthetic coding sequence
  source 1..663: mol_type = other DNA

SEQ ID NO: 144261 - DNA, 882 bp, synthetic construct
  misc_feature 1..882: note = Description of Artificial Sequence: Synthetic coding sequence
  source 1..882: mol_type = other DNA
atggacagaagagtgaagctgtgggaggtgtttggagagaagtgtgagttcaagggcagcctgagcggcagcaatgccggcatcaccagcattgaatttgattctgctggcagctacctgctggccgccagcaatgactttgccagccgcatctggacagtggatgactaccgcctgcggcacaccctgaccggccacagcggcaaggtgctgagcgccaagttcctgctggacaatgcccgcatcgtgtctggcagccatgacaggaccctgaagctgtgggacctgcggagcaaggtgtgcatcaagacagtgtttgctggcagcagctgcaatgacatcgtgtgcacagagcagtgtgtgatgagcggccactttgacaagaagatccgcttctgggacatccgctctgagagcatcgtgcgggagatggagctgctgggcaagatcacagccctggacctgaaccctgagaggacagagctgctgagctgcagcagagatgacctgctgaaggtgattgacctgcggaccaatgccatcaagcagaccttcagcgcccctggcttcaagtgtggcagtgactggaccagggtggtgttctccccagatggcagctatgtggccgccggcagcgctgagggcagcctgtacatctggagcgtgctgaccgggaaggtggagaaggtgctgagcagcagcacagcccaccccagcatgcgctggaggggccggcccctggcccggaccctgtctgtgtggaccaaggatgccaagctgtgctgcggccacagcacagatggagccctgcgggccggccgcacccctgtgcccagcagcgaggaggcccacggcctgctgcagccctgccctggaagatag

SEQ ID NO: 144262 - DNA, 1335 bp, synthetic construct
  misc_feature 1..1335: note = Description of Artificial Sequence: Synthetic coding sequence
  source 1..1335: mol_type = other DNA
atgagcagcggcctgcgggctgctgacttcccccgctggaagaggcacatcagcgagcagctgcggcggcgggaccggctgcagaggcaggcctttgaggagatcatcctgcagtacaacaagctgctggagaagagtgacctgcacagcgtgctggcccagaagctgcaggccgagaagcatgatgtgcccaacagacatgagatcagaagacggcaggcccggctgcagaaggagctggccgaggccgccaaggagcccctgcctgtggagcaggatgatgacatcgaggtgattgtggatgagaccagtgaccacacagaggagaccagccctgtgcgggccatcagcagagctgccacccggcgctctgtgtcctccttccctgtgccccaggacaacgtggacacccaccctggcagcggcaaggaggtgcgggtgcctgccacagccctgtgtgtgtttgatgcccatgatggagaggtgaatgctgtgcagttcagccctggcagccggctgctggccaccggcggcatggacagaagagtgaagctgtgggaggtgtttggagagaagtgtgagttcaagggcagcctgagcggcagcaatgccggcatcaccagcattgaatttgattctgctggcagctacctgctggccgccagcaatgactttgccagccgcatctggacagtggatgactaccgcctgcggcacaccctgaccggccacagcggcaaggtgctgagcgccaagttcctgctggacaatgcccgcatcgtgtctggcagccatgacaggaccctgaagctgtgggacctgcggagcaaggtgtgcatcaagacagtgtttgctggcagcagctgcaatgacatcgtgtgcacagagcagtgtgtgatgagcggccactttgacaagaagatccgcttctgggacatccgctctgagagcatcgtgcgggagatggagctgctgggcaagatcacagccctggacctgaaccctgagaggacagagctgctgagctgcagcagagatgacctgctgaaggtgattgacctgcggaccaatgccatcaagcagaccttcagcgcccctggcttcaagtgtggcagtgactggaccagggtggtgttctccccagatggcagctatgtggccgccggcagcgctgagggcagcctgtacatctggagcgtgctgaccgggaaggtggagaaggtgctgagcaagcagcacagcagcagcatcaatgctgtggcctggagccccagcggcagccacgtggtgtctgtggacaagggctgcaaggctgtgctgtgggcccagtactag

SEQ ID NO: 144263 - DNA, 1287 bp, synthetic construct
  misc_feature 1..1287: note = Description of Artificial Sequence: Synthetic coding sequence
  source 1..1287: mol_type = other DNA
atgagcagcggcctgcgggctgctgacttcccccgctggaagaggcacatcagcgagcagctgcggcggcgggaccggctgcagaggcaggcctttgaggagatcatcctgcagtacaacaagctgctggagaagagtgacctgcacagcgtgctggcccagaagctgcaggccgagaagcatgatgtgcccaacagacatgagatcagaagacggcaggcccggctgcagaaggagctggccgaggccgccaaggagcccctgcctgtggagcaggatgatgacatcgaggtgattgtggatgagaccagtgaccacacagaggagaccagccctgtgcgggccatcagcagagctgccaccaagaggctgagccagcctgctgggggcctgctggacagcatcaccaacatctttggaagaagatctgtgagcagcttccctgtgccccaggacaacgtggacacccaccctggcagcggcaaggaggtgcgggtgcctgccacagccctgtgtgtgtttgatgcccatgatggagaggtgaatgctgtgcagttcagccctggcatcaccagcattgaatttgattctgctggcagctacctgctggccgccagcaatgactttgccagccgcatctggacagtggatgactaccgcctgcggcacaccctgaccggccacagcggcaaggtgctgagcgccaagttcctgctggacaatgcccgcatcgtgtctggcagccatgacaggaccctgaagctgtgggacctgcggagcaaggtgtgcatcaagacagtgtttgctggcagcagctgcaatgacatcgtgtgcacagagcagtgtgtgatgagcggccactttgacaagaagatccgcttctgggacatccgctctgagagcatcgtgcgggagatggagctgctgggcaagatcacagccctggacctgaaccctgagaggacagagctgctgagctgcagcagagatgacctgctgaaggtgattgacctgcggaccaatgccatcaagcagaccttcagcgcccctggcttcaagtgtggcagtgactggaccagggtggtgttctccccagatggcagctatgtggccgccggcagcgctgagggcagcctgtacatctggagcgtgctgaccgggaaggtggagaaggtgctgagcaagcagcacagcagcagcatcaatgctgtggcctggagccccagcggcagccacgtggtgtctgtggacaagggctgcaaggctgtgctgtgggcccagtactag

SEQ ID NO: 144264 - DNA, 1824 bp, synthetic construct
  misc_feature 1..1824: note = Description of Artificial Sequence: Synthetic coding sequence
  source 1..1824: mol_type = other DNA
atgagcagcggcctgcgggctgctgacttcccccgctggaagaggcacatcagcgagcagctgcggcggcgggaccggctgcagaggcaggcctttgaggagatcatcctgcagtacaacaagctgctggagaagagtgacctgcacagcgtgctggcccagaagctgcaggccgagaagcatgatgtgcccaacagacatgagatcagccctggccatgatggcacctggaatgacaaccagctgcaggagatggcccagctgcgcatcaagcaccaggaggagctgacagagctgcacaagaagagaggagagctggcccagctggtgattgacctgaacaaccagatgcagaggaaggaccgggagatgcagatgaatgaggccaagattgctgaatgtctgcagaccatcagtgacctggagacagagtgcctggacctgcggaccaagctgtgtgacctggagcgggccaaccagaccctgaaggatgaatatgatgccctgcagatcaccttcaccgccctggagggcaagctgaggaagaccacagaggagaaccaggagctggtgacccgctggatggccgagaaggcccaggaggccaaccggctgaatgcagaaaatgagaaggacagcagaagacggcaggcccggctgcagaaggagctggccgaggccgccaaggagcccctgcctgtggagcaggatgatgacatcgaggtgattgtggatgagaccagtgaccacacagaggagaccagccctgtgcgggccatcagcagagctgccaccaagaggctgagccagcctgctgggggcctgctggacagcatcaccaacatctttggaagaagatctgtgagcagcttccctgtgccccaggacaacgtggacacccaccctggcagcggcaaggaggtgcgggtgcctgccacagccctgtgtgtgtttgatgcccatgatggagaggtgaatgctgtgcagttcagccctggcagccggctgctggccactggaggcatggaccggcgggtgaagctgtgggaggtgtttggagagaagtgtgagttcaagggcagcctgagcggcagcaatgccggcatcaccagcattgaatttgacagcgctggcagctacctgctggccgccagcaatgactttgccagccgcatctggacagtggatgactaccgcctgcggcacaccctgaccggccacagcggcaaggtgctgagcgccaagttcctgctggacaatgccagaattgtgtctggcagccatgacaggaccctgaagctgtgggacctgcggagcaaggtgtgcatcaagacagtgtttgctggcagcagctgcaatgacatcgtgtgcacagagcagtgtgtgatgagcggccactttgacaagaagatccgcttctgggacatccgctctgagagcatcgtgcgggagatggagctgctgggcaagatcacagccctggacctgaaccctgagaggacagagctgctgagctgcagcagagatgacctgctgaaggtgattgacctgcggaccaatgccatcaagcagaccttcagcgcccctggcttcaagtgtggcagtgactggaccagggtggtgttctccccagatggcagctatgtggccgccggcagcgctgagggcagcctgtacatctggagcgtgctgaccgggaaggtggagaaggtgctgagcaagcagcacagcagcagcatcaatgctgtggcctggagccccagcggcagccacgtggtgtctgtggacaagggctgcaaggctgtgctgtgggcccagtactag

SEQ ID NO: 144265 - DNA, 1875 bp, synthetic construct
  misc_feature 1..1875: note = Description of Artificial Sequence: Synthetic coding sequence
  source 1..1875: mol_type = other DNA
atgagcagcggcctgcgggctgctgacttcccccgctggaagaggcacatcagcgagcagctgcggcggcgggaccggctgcagaggcaggcctttgaggagatcatcctgcagtacaacaagctgctggagaagagtgacctgcacagcgtgctggcccagaagctgcaggccgagaagcatgatgtgcccaacagacatgagatcagccctggccatgatggcacctggaatgacaaccagctgcaggagatggcccagctgcgcatcaagcaccaggaggagctgacagagctgcacaagaagagaggagagctggcccagctggtgattgacctgaacaaccagatgcagaggaaggaccgggagatgcagatgaatgaggccaagattgctgaatgtctgcagaccatcagtgacctggagacagagtgcctggacctgcggaccaagctgtgtgacctggagcgggccaaccagaccctgaaggatgaatatgatgccctgcagatcaccttcaccgccctggagggcaagctgaggaagaccacagaggagaaccaggagctggtgacccgctggatggccgagaaggcccaggaggccaaccggctgaatgcagaaaatgagaaggacagcagaagacggcaggcccggctgcagaaggagctggccgaggccgccaaggagcccctgcctgtggagcaggatgatgacatcgaggtgattgtggatgagaccagtgaccacacagaggagaccagccctgtgcgggccatcagcagagctgccaccaagaggctgagccagcctgctgggggcctgctggacagcatcaccaacatcttcggcctgtctgagagccccctgctgggccaccacagcagcagtgatgctgcccggcggcgctctgtgtcctccttccctgtgccccaggacaacgtggacacccaccctggcagcggcaaggaggtgcgggtgcctgccacagccctgtgtgtgtttgatgcccatgatggagaggtgaatgctgtgcagttcagccctggcagccggctgctggccaccggcggcatggacagaagagtgaagctgtgggaggtgtttggagagaagtgtgagttcaagggcagcctgagcggcagcaatgccggcatcaccagcattgaatttgattctgctggcagctacctgctggccgccagcaatgactttgccagccgcatctggacagtggatgactaccgcctgcggcacaccctgaccggccacagcggcaaggtgctgagcgccaagttcctgctggacaatgcccgcatcgtgtctggcagccatgacaggaccctgaagctgtgggacctgcggagcaaggtgtgcatcaagacagtgtttgctggcagcagctgcaatgacatcgtgtgcacagagcagtgtgtgatgagcggccactttgacaagaagatccgcttctgggacatccgctctgagagcatcgtgcgggagatggagctgctgggcaagatcacagccctggacctgaaccctgagaggacagagctgctgagctgcagcagagatgacctgctgaaggtgattgacctgcggaccaatgccatcaagcagaccttcagcgcccctggcttcaagtgtggcagtgactggaccagggtggtgttctccccagatggcagctatgtggccgccggcagcgctgagggcagcctgtacatctggagcgtgctgaccgggaaggtggagaaggtgctgagcaagcagcacagcagcagcatcaatgctgtggcctggagccccagcggcagccacgtggtgtctgtggacaagggctgcaaggctgtgctgtgggcccagtactag

SEQ ID NO: 144266 - DNA, 1767 bp, synthetic construct
  misc_feature 1..1767: note = Description of Artificial Sequence: Synthetic coding sequence
  source 1..1767: mol_type = other DNA
atgagcagcggcctgcgggctgctgacttcccccgctggaagaggcacatcagcgagcagctgcggcggcgggaccggctgcagaggcaggcctttgaggagatcatcctgcagtacaacaagctgctggagaagagtgacctgcacagcgtgctggcccagaagctgcaggccgagaagcatgatgtgcccaacagacatgagatcagccctggccatgatggcacctggaatgacaaccagctgcaggagatggcccagctgcgcatcaagcaccaggaggagctgacagagctgcacaagaagagaggagagctggcccagctggtgattgacctgaacaaccagatgcagaggaaggaccgggagatgcagatgaatgaggccaagattgctgaatgtctgcagaccatcagtgacctggagacagagtgcctggacctgcggaccaagctgtgtgacctggagcgggccaaccagaccctgaaggatgaatatgatgccctgcagatcaccttcaccgccctggagggcaagctgaggaagaccacagaggagaaccaggagctggtgacccgctggatggccgagaaggcccaggaggccaaccggctgaatgcagaaaatgagaaggacagcagaagacggcaggcccggctgcagaaggagctggccgaggccgccaaggagcccctgcctgtggagcaggatgatgacatcgaggtgattgtggatgagaccagtgaccacacagaggagaccagccctgtgcgggccatcagcagagctgccacccggcgctctgtgtcctccttccctgtgccccaggacaacgtggacacccaccctggcagcggcaaggaggtgcgggtgcctgccacagccctgtgtgtgtttgatgcccatgatggagaggtgaatgctgtgcagttcagccctggcagccggctgctggccaccggcggcatggacagaagagtgaagctgtgggaggtgtttggagagaagtgtgagttcaagggcagcctgagcggcagcaatgccggcatcaccagcattgaatttgattctgctggcagctacctgctggccgccagcaatgactttgccagccgcatctggacagtggatgactaccgcctgcggcacaccctgaccggccacagcggcaaggtgctgagcgccaagttcctgctggacaatgcccgcatcgtgtctggcagccatgacaggaccctgaagctgtgggacctgcggagcaaggtgtgcatcaagacagtgtttgctggcagcagctgcaatgacatcgtgtgcacagagcagtgtgtgatgagcggccactttgacaagaagatccgcttctgggacatccgctctgagagcatcgtgcgggagatggagctgctgggcaagatcacagccctggacctgaaccctgagaggacagagctgctgagctgcagcagagatgacctgctgaaggtgattgacctgcggaccaatgccatcaagcagaccttcagcgcccctggcttcaagtgtggcagtgactggaccagggtggtgttctccccagatggcagctatgtggccgccggcagcgctgagggcagcctgtacatctggagcgtgctgaccgggaaggtggagaaggtgctgagcaagcagcacagcagcagcatcaatgctgtggcctggagccccagcggcagccacgtggtgtctgtggacaagggctgcaaggctgtgctgtgggcccagtactag

SEQ ID NO: 144267 - DNA, 2520 bp, synthetic construct
  misc_feature 1..2520: note = Description of Artificial Sequence: Synthetic coding sequence
  source 1..2520: mol_type = other DNA
atggcccagtttgacacagagtaccagaggctggaggccagctacagcgacagccccccaggagaggaggacctgctggtgcacgtggccgagggcagcaagagcccctggcaccacatcgagaacctggacctcttcttcagccgggtgtacaacctgcaccagaagaatggcttcacctgcatgctgattggagagatctttgagctgatgcagttcctgtttgtggtggccttcaccaccttcctggtgtcctgtgtggactatgacatcctgtttgccaacaagatggtgaaccacagcctgcaccccacagagcctgtgaaggtgaccctgcctgatgccttcctgcctgcccaggtgtgcagcgcccgcatccaggagaatggcagcctcatcaccatcctggtgattgctggggtcttctggatccacaggctcatcaagttcatctacaacatctgctgctactgggagatccacagcttctacctgcacgccctgcgcatccccatgtctgccctgccctactgcacctggcaggaggtgcaggccagaattgtgcagacccagaaggagcaccagatctgcatccacaagcgggagctgacagagctggacatctaccaccgcatcctgcgcttccagaactacatggtggccctggtgaacaagagcctgctgcccctgcgcttccggctgcccggcctgggggaggccgtgttcttcacccggggcctgaagtacaactttgagctgatcctcttctggggccctggcagcctcttcctgaatgagtggagcctgaaggccgagtacaagaggggcggccagaggctggagctggcccagaggctgagcaaccgcatcctgtggattggaattgccaacttcctgctgtgccccctcatcctgatctggcagatcctgtatgccttcttctcctatgcagaggtgctgaagcgggagcccggggccctgggcgcccgctgctggagcctgtatggccgctgctacctgcggcacttcaatgagctggagcacgagctgcagagccggctgaacagaggctacaagccagccagcaagtacatgaactgcttcctgagccccctgctgaccctgctggccaagaatggagccttctttgctggcagcatcctggccgtgctgattgccctgaccatctatgatgaagatgtgctggccgtggagcacgtgctgaccaccgtgaccctgctgggcgtgacagtgacagtgtgccgctccttcatcccagaccagcacatggtgttctgcccagagcagctgctgcgggtcatcctggcccacatccactacatgccagaccactggcagggcaatgcccacaggagccagaccagagatgaatttgcccagctgttccagtacaaggctgtgttcatcctggaggagctgctgagccccatcgtgacccccctcatcctgatcttctgcctgcggccccgggccctggagatcatcgacttcttcaggaacttcaccgtggaggtggtgggcgtgggggacacctgcagctttgcccagatggatgtgcggcagcacggccacccccagtggctgtctgctggccagacagaggcctctgtgtaccagcaggctgaagatggcaagacagagctgagcctgatgcactttgccatcaccaaccctggctggcagcccccccgggagagcacagccttcctgggcttcctgaaggagcaggtgcagagagatggagctgctgccagcctggcccagggcggcctgctgcctgaaaatgccctcttcaccagcatccagagcctgcagagcgagagcgagcccctgagcctgattgccaacgtggtggccggcagcagctgccggggcccccccctgccccgggacctgcagggcagccgccacagagctgaggtggccagcgccctgcggagcttcagccccctgcagcccggccaggcccccaccggccgggcccacagcaccatgactggaagtggagtggatgccaggacagccagcagcggcagctctgtgtgggagggccagctgcagagcctggtgctgtctgaatatgccagcacagagatgagcctgcacgccctgtacatgcaccagctgcacaagcagcaggcccaggccgagcctgagcggcacgtgtggcaccggcgggagagtgatgagagcggggagagcgccccagatgagggcggggagggcgcccgggccccccagagcatccccaggtctgccagctacccctgtgccgcccccaggcctggggcccctgagaccacagccctgcacggcggcttccagaggagatatggaggcatcacagatcctggcaccgtgccccgggtgcccagccacttcagccggctgcccctgggcggctgggccgaggatggccagagcgccagccgccaccctgagcctgtgcctgaggagggctctgaagatgagctgcccccccaggtgcacaaggtgtag

SEQ ID NO: 144268 - DNA, 2520 bp, synthetic construct; identical to SEQ ID NO: 144267
  misc_feature 1..2520: note = Description of Artificial Sequence: Synthetic coding sequence
  source 1..2520: mol_type = other DNA

SEQ ID NO: 144269 - DNA, 2337 bp, synthetic construct
  misc_feature 1..2337: note = Description of Artificial Sequence: Synthetic coding sequence
  source 1..2337: mol_type = other DNA
atgctgattggagagatctttgagctgatgcagttcctgtttgtggtggccttcaccaccttcctggtgtcctgtgtggactatgacatcctgtttgccaacaagatggtgaaccacagcctgcaccccacagagcctgtgaaggtgaccctgcctgatgccttcctgcctgcccaggtgtgcagcgcccgcatccaggagaatggcagcctcatcaccatcctggtgattgctggggtcttctggatccacaggctcatcaagttcatctacaacatctgctgctactgggagatccacagcttctacctgcacgccctgcgcatccccatgtctgccctgccctactgcacctggcaggaggtgcaggcccgcatcgtgcagacccagaaggagcaccagatctgcatccacaagcgggagctgacagagctggacatctaccaccgcatcctgcgcttccagaactacatggtggccctggtgaacaagagcctgctgcccctgcgcttccggctgcccggcctgggggaggccgtgttcttcacccggggcctgaagtacaactttgagctgatcctcttctggggccctggcagcctcttcctgaatgagtggagcctgaaggccgagtacaagagaggaggccagaggctggagctggcccagaggctgagcaaccgcatcctgtggattggcatcgccaacttcctgctgtgccccctcatcctgatctggcagatcctgtatgccttcttctcctatgcagaggtgctgaagcgggagcccggggccctgggcgcccgctgctggagcctgtatggccgctgctacctgcggcacttcaatgagctggagcacgagctgcagagccggctgaacagaggctacaagccagccagcaagtacatgaactgcttcctgagccccctgctgaccctgctggccaagaatggagccttctttgctggcagcatcctggccgtgctgattgccctgaccatctatgatgaagatgtgctggccgtggagcacgtgctgaccaccgtgaccctgctgggcgtgacagtgacagtgtgccgctccttcatcccagaccagcacatggtgttctgcccagagcagctgctgcgggtcatcctggcccacatccactacatgccagaccactggcagggcaatgcccacaggagccagaccagagatgaatttgcccagctgttccagtacaaggctgtgttcatcctggaggagctgctgagccccatcgtgacccccctcatcctgatcttctgcctgcggccccgggccctggagatcatcgacttcttcaggaacttcaccgtggaggtggtgggcgtgggggacacctgcagctttgcccagatggatgtgcggcagcacggccacccccagtggctgtctgctggccagacagaggcctctgtgtaccagcaggccgaggatggcaagacagagctgagcctgatgcactttgccatcaccaaccctggctggcagcccccccgggagagcacagccttcctgggcttcctgaaggagcaggtgcagagagatggagctgctgccagcctggcccagggcggcctgctgcctgaaaatgccctcttcaccagcatccagagcctgcagagcgagagcgagcccctgagcctcatcgccaacgtggtggccggcagcagctgccggggcccccccctgccccgggacctgcagggcagccgccacagagctgaggtggccagcgccctgcgctccttcagccccctgcagcccggccaggcccccaccggccgggcccacagcaccatgacaggcagcggcgtggatgccaggacagccagcagcggcagctctgtgtgggagggccagctgcagagcctggtgctgtctgaatatgccagcacagagatgagcctgcacgccctgtacatgcaccagctgcacaagcagcaggcccaggccgagcctgagagacatgtgtggcacagaagagaaagtgatgaaagtggagagagcgccccagatgaaggaggagagggcgcccgggccccccagagcatccccaggtctgccagctacccctgtgccgcccccaggcctggggcccctgagaccacagccctgcatggaggcttccagaggagatatggaggcatcacagaccccggcaccgtgccccgggtgcccagccacttcagccggctgcccctgggcggctgggccgaggatggccagagcgccagccgccaccctgagcctgtgcctgaggagggctctgaagatgagctgcccccccaggtgcacaaggtgtag

SEQ ID NO: 144270 - DNA, 2520 bp, synthetic construct; identical to SEQ ID NO: 144267
  misc_feature 1..2520: note = Description of Artificial Sequence: Synthetic coding sequence
  source 1..2520: mol_type = other DNA

SEQ ID NO: 144271 - DNA, 510 bp, synthetic construct
  misc_feature 1..510: note = Description of Artificial Sequence: Synthetic coding sequence
  source 1..510: mol_type = other DNA
atggcccagtttgacacagagtaccagaggctggaggccagctacagcgacagccccccaggagaggaggacctgctggtgcacgtggccgagggcagcaagagcccctggcaccacatcgagaacctggacctcttcttcagccgggtgtacaacctgcaccagaagaatggcttcacctgcatgctgattggagagatctttgagctgatgcagttcctgtttgtggtggccttcaccaccttcctggtgtcctgtgtggactatgacatcctgtttgccaacaagatggtgaaccacagcctgcaccccacagagcctgtgaaggtgaccctgcctgatgccttcctgcctgcccaggtgtgcagcgcccgcatccaggagaatggcagcctcatcaccatcctggtgattgctggggtcttctggatccacaggctcatcaagttcatctacaacatctgctgctactgggagatccacagcttctacctgcacgccctgaggtag

SEQ ID NO: 144272 - DNA, 435 bp, synthetic construct
  misc_feature 1..435: note = Description of Artificial Sequence: Synthetic coding sequence
  source 1..435: mol_type = other DNA
atggcccagtttgacacagagtaccagaggctggaggccagctacagcgacagccccccaggagaggaggacctgctggtgcacgtggccgagggcagcaagagcccctggcaccacatcgagaacctggacctcttcttcagccgggtgtacaacctgcaccagaagaatggcttcacctgcatgctgattggagagatctttgagctgatgcagttcctgtttgtggtggccttcaccaccttcctggtgtcctgtgtggactatgacatcctgtttgccaacaagatggtgaaccacagcctgcaccccacagagcctgtgaaggtgaccctgcctgatgccttcctgcctgcccaggtgtgcagcgcccgcatccaggagaatggcagcctcatcaccatcctggtgattgctggggtcttctggatctag

SEQ ID NO: 144273 - DNA, 282 bp, synthetic construct
  misc_feature 1..282: note = Description of Artificial Sequence: Synthetic coding sequence
  source 1..282: mol_type = other DNA
atggcccagtttgacacagagtaccagaggctggaggccagctacagcgacagccccccaggagaggaggacctgctggtgcacgtggccgagggcagcaagagcccctggcaccacatcgagaacctggacctcttcttcagccgggtgtacaacctgcaccagaagaatggcttcacctgcatgctgattggagagatctttgagctgatgcagttcctgtttgtggtggccttcaccaccttcctggtgtcctgtgtggactatgacatcctcttctag

SEQ ID NO: 144274 - DNA, 567 bp, synthetic construct
  misc_feature 1..567: note = Description of Artificial Sequence: Synthetic coding sequence
  source 1..567: mol_type = other DNA
atggcccagtttgacacagagtaccagaggctggaggccagctacagcgacagccccccaggagaggaggacctgctggtgcacgtggccgagggcagcaagagcccctggcaccacatcgagaacctggacctcttcttcagccgggtgtacaacctgcaccagaagaatggcttcacctgcatgctgattggagagatctttgagctgatgcagttcctgtttgtggtggccttcaccaccttcctggtgtcctgtgtggactatgacatcctgtttgccaacaagatggtgaaccacagcctgcaccccacagagcctgtgaaggtgaccctgcctgatgccttcctgcctgcccaggtgtgcagcgcccgcatccaggagaatggcagcctcatcaccatcctggtgattgctggggtcttctggatccacaggctcatcaagttcatctacaacatctgctgctactgggagatccacagcttctacctgcacgccctgcgcatccccatgtctgccctgccctactgcacctggcaggaggtgcaggccagaattgtgtag

SEQ ID NO: 144275 - DNA, 396 bp, synthetic construct
  misc_feature 1..396: note = Description of Artificial Sequence: Synthetic coding sequence
  source 1..396: mol_type = other DNA
atggcccagtttgacacagagtaccagaggctggaggccagctacagcgacagccccccaggagaggaggacctgctggtgcacgtggccgagggcagcaagagcccctggcaccacatcgagaacctggacctcttcttcagccgggtgtacaacctgcaccagaagaatggcttcacctgcatgctgattggagagatctttgagctgatgcagttcctgtttgtggtggccttcaccaccttcctggtgtcctgtgtggactatgacatcctgtttgccaacaagatggtgaaccacagcctgcaccccacagagcctgtgaaggtgaccctgcctgatgccttcctgcctgcccaggtgtgcagcgcccgcatccaggagaatggcagctag

SEQ ID NO: 144276 - DNA, 294 bp, synthetic construct
  misc_feature 1..294: note = Description of Artificial Sequence: Synthetic coding sequence
  source 1..294: mol_type = other DNA
atggcccagtttgacacagagtaccagaggctggaggccagctacagcgacagccccccaggagaggaggacctgctggtgcacgtggccgagggcagcaagagcccctggcaccacatcgagaacctggacctcttcttcagccgggtgtacaacctgcaccagaagaatggcttcacctgcatgctgattggagagatctttgagctgatgcagttcctgtttgtggtggccttcaccaccttcctggtgtcctgtgtggactatgacatcctgtttgccaacaagatgtag

SEQ ID NO: 144277 - DNA, 519 bp, synthetic construct
  misc_feature 1..519: note = Description of Artificial Sequence: Synthetic coding sequence
  source 1..519: mol_type = other DNA
atggcccagtttgacacagagtaccagaggctggaggccagctacagcgacagccccccaggagaggaggacctgctggtgcacgtggccgagggcagcaagagcccctggcaccacatcgagaacctggacctcttcttcagccgggtgtacaacctgcaccagaagaatggcttcacctgcatgctgattggagagatctttgagctgatgcagttcctgtttgtggtggccttcaccaccttcctggtgtcctgtgtggactatgacatcctgtttgccaacaagatggtgaaccacagcctgcaccccacagagcctgtgaaggtgaccctgcctgatgccttcctgcctgcccaggtgtgcagcgcccgcatccaggagaatggcagcctcatcaccatcctggtgattgctggggtcttctggatccacaggctcatcaagttcatctacaacatctgctgctactgggagatccacagcttctacctgcacgccctgcgcatccccatgtag

SEQ ID NO: 144278 - DNA, 1662 bp, synthetic construct
  misc_feature 1..1662: note = Description of Artificial Sequence: Synthetic coding sequence
  source 1..1662: mol_type = other DNA
atggccaagaacagaagagacaggaacagctggggcggcttcagcgagaagacctatgagtggagcagcgaggaggaggagcctgtgaagaaggccggccctgtgcaggtgctgattgtgaaggatgaccacagctttgagctggatgaaacagccctgaaccgcatcctgctgtctgaggccgtgcgggacaaggaggtggtggccgtgtctgtggccggggccttcaggaagggcaagagcttcctgatggacttcatgctgcgctacatgtacaaccaggagagcgtggactgggtgggggactacaatgagcccctgaccggcttctcctggaggggcggcagcgagcgggagaccaccggcatccagatctggagcgagatcttcctgatcaacaagccagatggcaagaaggtggccgtgctgctgatggacacccagggcacctttgacagccagagcaccctgcgggacagcgccaccgtgtttgccctgagcaccatgatcagcagcatccaggtgtacaacctgagccagaatgtgcaggaggatgacctgcagcacctgcagctgttcacagaatatggccgcctggccatggaggagaccttcctgaagcccttccagagcctcatcttcctggtgcgggactggagcttcccctatgagttctcctatggagcagatggaggagccaagttcctggagaagaggctgaaggtgtctggcaaccagcacgaggagctgcagaatgtgaggaagcacatccacagctgcttcaccaacatcagctgcttcctgctgccccaccctggcctgaaggtggccaccaaccccaactttgatggcaagctgaaggagattgatgatgagttcatcaagaacctgaagatcctgatcccctggctgctgagccctgagagcctggacatcaaggagatcaatggaaacaagatcacctgccggggcctggtggagtacttcaaggcctacatcaagatctaccagggcgaggagctgccccaccccaagtccatgctgcaggccacagctgaggccaacaacctggccgctgtggccacagccaaggacacctacaacaagaagatggaggagatctgtggcggggacaagcccttcctggccccaaatgacctgcagaccaagcacctgcagctgaaggaggagagcgtgaagctgttccggggcgtgaagaagatgggcggggaggagttcagccgccgctacctgcagcagctggagagcgagattgatgagctgtacatccagtacatcaagcacaatgacagcaagaacatcttccacgccgcccggaccccagccaccctgtttgtggtgatcttcatcacctacgtgattgctggggtgacaggcttcatcggcctggacatcatcgccagcctgtgcaacatgatcatgggcctgaccctcatcaccctgtgcacctgggcctacatccgctacagcggggagtaccgggagctgggcgctgtgattgaccaggtggccgccgccctgtgggaccaggccctgtacaagctgtacagcgctgctgccacccaccgccacctgtaccaccaggccttccccacccccaagtctgagagcacagagcagagcgagaagaagaagatgtag

SEQ ID NO: 144279 - DNA, 1677 bp, synthetic construct
  misc_feature 1..1677: note = Description of Artificial Sequence: Synthetic coding sequence
  source 1..1677: mol_type = other DNA
atggccaagaacagaagagacaggaacagctggggcggcttcagcgagaagacctatgagtggagcagcgaggaggaggagcctgtgaagaaggccggccctgtgcaggtgctgattgtgaaggatgaccacagctttgagctggatgaaacagccctgaaccgcatcctgctgtctgaggccgtgcgggacaaggaggtggtggccgtgtctgtggccggggccttcaggaagggcaagagcttcctgatggacttcatgctgcgctacatgtacaaccaggagagcgtggactgggtgggggactacaatgagcccctgaccggcttctcctggaggggcggcagcgagcgggagaccaccggcatccagatctggagcgagatcttcctgatcaacaagccagatggcaagaaggtggccgtgctgctgatggacacccagggcacctttgacagccagagcaccctgcgggacagcgccaccgtgtttgccctgagcaccatgatcagcagcatccaggtgtacaacctgagccagaatgtgcaggaggatgacctgcagcacctgcagctgttcacagaatatggccgcctggccatggaggagaccttcctgaagcccttccagagcctcatcttcctggtgcgggactggagcttcccctatgagttctcctatggagcagatggaggagccaagttcctggagaagaggctgaaggtgtctggcaaccagcacgaggagctgcagaatgtgaggaagcacatccacagctgcttcaccaacatcagctgcttcctgctgccccaccctggcctgaaggtggccaccaaccccaactttgatggcaagctgaaggagattgatgatgagttcatcaagaacctgaagatcctgatcccctggctgctgagccctgagagcctggacatcaaggagatcaatggaaacaagatcacctgccggggcctggtggagtacttcaaggcctacatcaagatctaccagggcgaggagctgccccaccccaagtccatgctgcaggccacagctgaggccaacaacctggccgctgtggccacagccaaggacacctacaacaagaagatggaggagatctgtggcggggacaagcccttcctggccccaaatgacctgcagaccaagcacctgcagctgaaggaggagagcgtgaagctgttccggggcgtgaagaagatgggcggggaggagttcagccgccgctacctgcagcagctggagagcgagattgatgagctgtacatccagtacatcaagcacaatgacagcaagaacatcttccacgccgcccggaccccagccaccctgtttgtggtgatcttcatcacctacgtgattgctggggtgacaggcttcatcggcctggacatcatcgccagcctgtgcaacatgatcatgggcctgaccctcatcaccctgtgcacctgggcctacatccgctacagcggggagtaccgggagctgggcgctgtgattgaccaggtggccgccgccctgtgggaccagggccccagccaccaggccctgtacaagctgtacagcgctgctgccacccaccgccacctgtaccaccaggccttccccacccccaagtctgagagcacagagcagagcgagaagaagaagatgtag

SEQ ID NO: 144280 - DNA, 1677 bp, synthetic construct
  misc_feature 1..1677: note = Description of Artificial Sequence: Synthetic coding sequence
  source 1..1677: mol_type = other DNA
atggccaagaacagaagagacaggaacagctggggcggcttcagcgagaagacctatgagtggagcagcgaggaggaggagcctgtgaagaaggccggccctgtgcaggtgctgattgtgaaggatgaccacagctttgagctggatgaaacagccctgaaccgcatcctgctgtctgaggccgtgcgggacaaggaggtggtggccgtgtctgtggccggggccttcaggaagggcaagagcttcctgatggacttcatgctgcgctacatgtacaaccaggagagcgtggactgggtgggggactacaatgagcccctgaccggcttctcctggaggggcggcagcgagcgggagaccaccggcatccagatctggagcgagatcttcctgatcaacaagccagatggcaagaaggtggccgtgctgctgatggacacccagggcacctttgacagccagagcaccctgcgggacagcgccaccgtgtttgccctgagcaccatgatcagcagcatccaggtgtacaacctgagccagaatgtgcaggaggatgacctgcagcacctgcagctgttcacagaatatggccgcctggccatggaggagaccttcctgaagcccttccagagcctcatcttcctggtgcgggactggagcttcccctatgagttctcctatggagcagatggaggagccaagttcctggagaagaggctgaaggtgtctggcaaccagcacgaggagctgcagaatgtgaggaagcacatccacagctgcttcaccaacatcagctgcttcctgctgccccaccctggcctgaaggtggccaccaaccccaactttgatggcaagctgaaggagattgatgatgagttcatcaagaacctgaagatcctgatcccctggctgctgagccctgagagcctggacatcaaggagatcaatggaaacaagatcacctgccggggcctggtggagtacttcaaggcctacatcaagatctaccagggcgaggagctgccccaccccaagtccatgctgcaggccacagctgaggccaacaacctggccgctgtggccacagccaaggacacctacaacaagaagatggaggagatctgtggcggggacaagcccttcctggccccaaatgacctgcagaccaagcacctgcagctgaaggaggagagcgtgaagctgttccggggcgtgaagaagatgggcggggaggagttcagccgccgctacctgcagcagctggagagcgagattgatgagctgtacatccagtacatcaagcacaatgacagcaagaacatcttccacgccgcccggaccccagccaccctgtttgtggtgatcttcatcacctacgtgattgctggggtgacaggcttcatcggcctggacatcatcgccagcctgtgcaacatgatcatgggcctgaccctcatcaccctgtgcacctgggcctacatccgctacagcggggagtaccgggagctgggcgctgtgattgaccaggtggccgccgccctgtgggaccagggcagcaccaatgaggccctgtacaagctgtacagcgctgctgccacccaccgccacctgtaccaccaggccttccccacccccaagtctgagagcacagagcagagcgagaagaagaagatgtag

SEQ ID NO: 144281 - DNA, 1662 bp, synthetic construct; identical to SEQ ID NO: 144278
  misc_feature 1..1662: note = Description of Artificial Sequence: Synthetic coding sequence
  source 1..1662: mol_type = other DNA

SEQ ID NO: 144282 - DNA, 90 bp, synthetic construct
  misc_feature 1..90: note = Description of Artificial Sequence: Synthetic coding sequence
  source 1..90: mol_type = other DNA
atggccaagaacagaagagacaggaacagctggggcggcttcagcgagaagacctatgagtggagcagcgaggaggaggagcctgtgtag

SEQ ID NO: 144283 - DNA, 303 bp, synthetic construct
  misc_feature 1..303: note = Description of Artificial Sequence: Synthetic coding sequence
  source 1..303: mol_type = other DNA
atggccaagaacagaagagacaggaacagctggggcggcttcagcgagaagacctatgagtggagcagcgaggaggaggagcctgtgaagaaggccggccctgtgcaggtgctgattgtgaaggatgaccacagctttgagctggatgaaacagccctgaaccgcatcctgctgtctgaggccgtgcgggacaaggaggtggtggccgtgtctgtggccggggccttcaggaagggcaagagcttcctgatggacttcatgctgcgctacatgtacaaccaggagagcgtggactgggtgtag

SEQ ID NO: 144284 - DNA, 1701 bp, synthetic construct
  misc_feature 1..1701: note = Description of Artificial Sequence: Synthetic coding sequence
  source 1..1701: mol_type = other DNA
atggtgctgaagaagggcatcaagttcttccagaggctcatcaacagcaagagcctgcgctttggagaaaattatgaagatgatgacctggtgaacagtgatgaggtgatgaagaagccctgccctgtgcagatcgtgctggcccatgaagatgaccacaactttgagctggatgaggaggccctggagcagatcctgctgcaggagcacatccgggacctgaacatcgtggtggtgtctgtggccggggccttcaggaagggcaagagcttcctgctggacttcatgctgcgctacatgtacaacaaggacagccagagctggattggaggcaacaatgagcccctgaccggcttcacctggaggggcggctgtgagcgggagaccaccggcatccaggtgtggaatgaggtgtttgtgattgaccggcccaacggcaccaaggtggccgtgctgctgatggacacccagggcgcctttgacagccagagcaccatcaaggactgtgccaccgtgtttgccctgagcaccatgaccagctctgtgcaggtgtacaacctgagccagaacatccaggaggatgacctgcagcacctgcagctgttcacagaatatggccgcctggccatggaggagatctaccagaagcccttccagaccctgatgttcctgatccgggactggagctacccctatgagcacagctatggcctggagggcggcaagcagttcctggagaagaggctgcaggtgaagcagaaccagcacgaggagctgcagaatgtgaggaagcacatccacaactgcttcagcaacctgggctgcttcctgctgccccaccctggcctgaaggtggccaccaaccccagctttgatggccgcctgaaggacattgatgaggacttcaagcgggagctgaggaacctggtgcccctgctgctggcccctgagaacctggtggagaaggagatcagcggcagcaaggtgacctgccgggacctggtggagtacttcaaggcctacatcaagatctaccagggcgaggagctgccccaccccaagtccatgctgcaggccacagctgaggccaacaacctggccgctgtggccggggcccgggacacctactgcaagtccatggagcaggtgtgtggcggggacaagccctacatcgcccccagcgacctggagaggaagcacctggacctgaaggaggtggccatcaagcagttccgctctgtgaagaagatgggaggagatgagttctgccgccgctaccaggaccagctggaggccgagattgaggagacctacgccaacttcatcaagcacaatgatggcaagaacatcttctatgctgcccggaccccagccaccctgtttgctgtgatgtttgccatgtacatcatcagcggcctgaccggcttcatcggcctgaacagcattgctgtgctgtgcaacctggtgatgggcctggccctgatcttcctgtgcacctgggcctacgtgaagtacagcggggagttccgggagatcggcaccgtcatcgaccagattgctgagaccctgtgggagcagaggagccccaggaaggtgttcagcaagctgtttgaggtgaccaggaggaggatggtgcaccgggccctgagcagcgcccagaggcagaggctgagcagcaacaacaacaagaagaagaactag

SEQ ID NO: 144285 - DNA, 1752 bp, synthetic construct
  misc_feature 1..1752: note = Description of Artificial Sequence: Synthetic coding sequence
  source 1..1752: mol_type = other DNA
atggccgagggagatgaagctgcccggggccagcagccccaccagggcctgtggaggagaagaaggaccagtgaccccagcgctgctgtgaaccacgtgagcagcaccaccagcctgggagaaaattatgaagatgatgacctggtgaacagtgatgaggtgatgaagaagccctgccctgtgcagatcgtgctggcccatgaagatgaccacaactttgagctggatgaggaggccctggagcagatcctgctgcaggagcacatccgggacctgaacatcgtggtggtgtctgtggccggggccttcaggaagggcaagagcttcctgctggacttcatgctgcgctacatgtacaacaaggacagccagagctggattggaggcaacaatgagcccctgaccggcttcacctggaggggcggctgtgagcgggagaccaccggcatccaggtgtggaatgaggtgtttgtgattgaccggcccaacggcaccaaggtggccgtgctgctgatggacacccagggcgcctttgacagccagagcaccatcaaggactgtgccaccgtgtttgccctgagcaccatgaccagctctgtgcaggtgtacaacctgagccagaacatccaggaggatgacctgcagcacctgcagctgttcacagaatatggccgcctggccatggaggagatctaccagaagcccttccagaccctgatgttcctgatccgggactggagctacccctatgagcacagctatggcctggagggcggcaagcagttcctggagaagaggctgcaggtgaagcagaaccagcacgaggagctgcagaatgtgaggaagcacatccacaactgcttcagcaacctgggctgcttcctgctgccccaccctggcctgaaggtggccaccaaccccagctttgatggccgcctgaaggacattgatgaggacttcaagcgggagctgaggaacctggtgcccctgctgctggcccctgagaacctggtggagaaggagatcagcggcagcaaggtgacctgccgggacctggtggagtacttcaaggcctacatcaagatctaccagggcgaggagctgccccaccccaagtccatgctgcaggccacagctgaggccaacaacctggccgctgtggccggggcccgggacacctactgcaagtccatggagcaggtgtgtggcggggacaagccctacatcgcccccagcgacctggagaggaagcacctggacctgaaggaggtggccatcaagcagttccgctctgtgaagaagatgggaggagatgagttctgccgccgctaccaggaccagctggaggccgagattgaggagacctacgccaacttcatcaagcacaatgatggcaagaacatcttctatgctgcccggaccccagccaccctgtttgctgtgatgtttgccatgtacatcatcagcggcctgaccggcttcatcggcctgaacagcattgctgtgctgtgcaacctggtgatgggcctggccctgatcttcctgtgcacctgggcctacgtgaagtacagcggggagttccgggagatcggcaccgtcatcgaccagattgctgagaccctgtgggagcaggtgctgaagcccctgggggacaacctgatggaggagaacatccggcagagcgtgaccaacagcatcaaggccggcctgacagaccaggtgagccaccacgcccggctgaagacagactag

SEQ ID NO: 144286 - DNA, 1239 bp, synthetic construct
  misc_feature 1..1239: note = Description of Artificial Sequence: Synthetic coding sequence
  source 1..1239: mol_type = other DNA
atggacacccagggcgcctttgacagccagagcaccatcaaggactgtgccaccgtgtttgccctgagcaccatgaccagctctgtgcaggtgtacaacctgagccagaacatccaggaggatgacctgcagcacctgcagctgttcacagaatatggccgcctggccatggaggagatctaccagaagcccttccagaccctgatgttcctgatccgggactggagctacccctatgagcacagctatggcctggagggcggcaagcagttcctggagaagaggctgcaggtgaagcagaaccagcacgaggagctgcagaatgtgaggaagcacatccacaactgcttcagcaacctgggctgcttcctgctgccccaccctggcctgaaggtggccaccaaccccagctttgatggccgcctgaaggacattgatgaggacttcaagcgggagctgaggaacctggtgcccctgctgctggcccctgagaacctggtggagaaggagatcagcggcagcaaggtgacctgccgggacctggtggagtacttcaaggcctacatcaagatctaccagggcgaggagctgccccaccccaagtccatgctgcaggccacagctgaggccaacaacctggccgctgtggccggggcccgggacacctactgcaagtccatggagcaggtgtgtggcggggacaagccctacatcgcccccagcgacctggagaggaagcacctggacctgaaggaggtggccatcaagcagttccgctctgtgaagaagatgggaggagatgagttctgccgccgctaccaggaccagctggaggccgagattgaggagacctacgccaacttcatcaagcacaatgatggcaagaacatcttctacgccgcccggaccccagccaccctgtttgctgtgatgtttgccatgtacatcatcagcggcctgaccggcttcatcggcctgaacagcattgctgtgctgtgcaacctggtgatgggcctggccctgatcttcctgtgcacctgggcctacgtgaagtacagcggggagttccgggagattggaacagtgattgaccagattgctgagaccctgtgggagcaggtgctgaagcccctgggggacaacctgatggaggagaacatccggcagagcgtgaccaacagcatcaaggccggcctgacagaccaggtgagccaccacgcccggctgaagacagactag

SEQ ID NO: 144287 - DNA, 1740 bp, synthetic construct
  misc_feature 1..1740: note = Description of Artificial Sequence: Synthetic coding sequence
  source 1..1740: mol_type = other DNA
atggccgagggagatgaagctgcccggggccagcagccccaccagggcctgtggaggagaagaaggaccagtgaccccagcgctgctgtgaaccacgtgagcagcaccaccagcctgggagaaaattatgaagatgatgacctggtgaacagtgatgaggtgatgaagaagccctgccctgtgcagatcgtgctggcccatgaagatgaccacaactttgagctggatgaggaggccctggagcagatcctgctgcaggagcacatccgggacctgaacatcgtggtggtgtctgtggccggggccttcaggaagggcaagagcttcctgctggacttcatgctgcgctacatgtacaacaaggacagccagagctggattggaggcaacaatgagcccctgaccggcttcacctggaggggcggctgtgagcgggagaccaccggcatccaggtgtggaatgaggtgtttgtgattgaccggcccaacggcaccaaggtggccgtgctgctgatggacacccagggcgcctttgacagccagagcaccatcaaggactgtgccaccgtgtttgccctgagcaccatgaccagctctgtgcaggtgtacaacctgagccagaacatccaggaggatgacctgcagcacctgcagctgttcacagaatatggccgcctggccatggaggagatctaccagaagcccttccagaccctgatgttcctgatccgggactggagctacccctatgagcacagctatggcctggagggcggcaagcagttcctggagaagaggctgcaggtgaagcagaaccagcacgaggagctgcagaatgtgaggaagcacatccacaactgcttcagcaacctgggctgcttcctgctgccccaccctggcctgaaggtggccaccaaccccagctttgatggccgcctgaaggacattgatgaggacttcaagcgggagctgaggaacctggtgcccctgctgctggcccctgagaacctggtggagaaggagatcagcggcagcaaggtgacctgccgggacctggtggagtacttcaaggcctacatcaagatctaccagggcgaggagctgccccaccccaagtccatgctgcaggccacagctgaggccaacaacctggccgctgtggccggggcccgggacacctactgcaagtccatggagcaggtgtgtggcggggacaagccctacatcgcccccagcgacctggagaggaagcacctggacctgaaggaggtggccatcaagcagttccgctctgtgaagaagatgggaggagatgagttctgccgccgctaccaggaccagctggaggccgagattgaggagacctacgccaacttcatcaagcacaatgatggcaagaacatcttctatgctgcccggaccccagccaccctgtttgctgtgatgtttgccatgtacatcatcagcggcctgaccggcttcatcggcctgaacagcattgctgtgctgtgcaacctggtgatgggcctggccctgatcttcctgtgcacctgggcctacgtgaagtacagcggggagttccgggagatcggcaccgtcatcgaccagattgctgagaccctgtgggagcaggtgttcagcaagctgtttgaggtgaccaggaggaggatggtgcaccgggccctgagcagcgcccagaggcagaggctgagcagcaacaacaacaagaagaagaactag

SEQ ID NO: 144288 - DNA, 1239 bp, synthetic construct; identical to SEQ ID NO: 144286
  misc_feature 1..1239: note = Description of Artificial Sequence: Synthetic coding sequence
  source 1..1239: mol_type = other DNA

SEQ ID NO: 144289 - DNA, 1242 bp, synthetic construct
  misc_feature 1..1242: note = Description of Artificial Sequence: Synthetic coding sequence
  source 1..1242: mol_type = other DNA
atggacacccagggcgcctttgacagccagagcaccatcaaggactgtgccaccgtgtttgccctgagcaccatgaccagctctgtgcaggtgtacaacctgagccagaacatccaggaggatgacctgcagcacctgcagctgttcacagaatatggccgcctggccatggaggagatctaccagaagcccttccagaccctgatgttcctgatccgggactggagctacccctatgagcacagctatggcctggagggcggcaagcagttcctggagaagaggctgcaggtgaagcagaaccagcacgaggagctgcagaatgtgaggaagcacatccacaactgcttcagcaacctgggctgcttcctgctgccccaccctggcctgaaggtggccaccaaccccagctttgatggccgcctgaaggacattgatgaggacttcaagcgggagctgaggaacctggtgcccctgctgctggcccctgagaacctggtggagaaggagatcagcggcagcaaggtgacctgccgggacctggtggagtacttcaaggcctacatcaagatctaccagggcgaggagctgccccaccccaagtccatgctgcaggccacagctgaggccaacaacctggccgctgtggccggggcccgggacacctactgcaagtccatggagcaggtgtgtggcggggacaagccctacatcgcccccagcgacctggagaggaagcacctggacctgaaggaggtggccatcaagcagttccgctctgtgaagaagatgggaggagatgagttctgccgccgctaccaggaccagctggaggccgagattgaggagacctacgccaacttcatcaagcacaatgatggcaagaacatcttctacgccgcccggaccccagccaccctgtttgctgtgatgtttgccatgtacatcatcagcggcctgaccggcttcatcggcctgaacagcattgctgtgctgtgcaacctggtgatgggcctggccctgatcttcctgtgcacctgggcctacgtgaagtacagcggggagttccgggagattggaacagtgattgaccagattgctgagaccctgtgggagcagaggagccccaggaaggtgttcagcaagctgtttgaggtgaccaggaggaggatggtgcaccgggccctgagcagcgcccagaggcagaggctgagcagcaacaacaacaagaagaagaactag

SEQ ID NO: 144290 - DNA, 1707 bp, synthetic construct
  misc_feature 1..1707: note = Description of Artificial Sequence: Synthetic coding sequence
  source 1..1707: mol_type = other DNA
atgaggacagctggccgggaccctgtgtctgctggcctgcagttccccaaggatggcagcacccagaggcctgccaacagagccaggtttgtgcctgcccggacccggcccagccccctgcacccctgctgcttctgctttgaaggaggcggctccatgctgagcccccagagggtggccgccgccgccagcagaggagcagatgatgccatggagagcagcaacatcctgctgcaggaccacatccgggacctggatgtggtggtggtgtctgtggccggggccttcaggaagggcaagagcttcatcctggacttcatgctgcgctacctgtacagccagaaggagagcggccacagcaactggctgggggaccctgaggagcccctgaccggcttctcctggaggggcggcagtgaccctgagaccaccggcatccagatctggagcgaggtgttcaccgtggagaagccaggcggcaagaaggtggccgtggtgctgatggacacccagggcgcctttgacagccagagcacagtgaaggactgtgccaccatctttgccctgagcaccatgaccagctctgtgcagatctacaacctgagccagaacatccaggaggatgacctgcagcagctgcagctgttcacagaatatggccgcctggccatggatgagatcttccagaagcccttccagaccctgatgttcctggtgcgggactggagcttcccctatgagtacagctatggcctgcagggcggcatggccttcctggacaagaggctgcaggtgaaggagcaccagcacgaggagatccagaatgtgaggaaccacatccacagctgcttcagtgatgtgacctgcttcctgctgccccaccctggcctgcaggtggccaccagcccagactttgatggcaagctgaaggacattgctggggagttcaaggagcagctgcaggccctgatcccctacgtgctgaaccccagcaagctgatggagaaggagatcaatggcagcaaggtgacctgccggggcctgctggagtacttcaaggcctacatcaagatctaccagggcgaggacctgccccaccccaagtccatgctgcaggccacagctgaggccaacaacctggccgctgctgccagcgccaaggacatctactacaacaacatggaggaggtgtgtggcggggagaagccctacctgagcccagacatcctggaggagaagcactgtgagttcaagcagctggccctggaccacttcaagaagaccaagaagatgggcggcaaggacttctccttccgctaccagcaggagctggaggaggagatcaaggagctgtatgagaacttctgcaagcacaacggcagcaagaatgtgttcagcaccttccgcaccccagctgtgctcttcaccggcatcgtggccctgtacatcgccagcggcctgaccggcttcatcggcctggaggtggtggcccagctgttcaactgcatggtgggcctgctgctgattgccctgctgacctggggctacatccgctacagcggccagtaccgggagctgggcggggccatcgactttggagctgcctacgtgctggagcaggccagcagccacatcggcaacagcacccaggccaccgtgagagatgctgtggtgggccggcccagcatggacaagaaggcccagtag

SEQ ID NO: 144291 - DNA, 1626 bp, synthetic construct
  misc_feature 1..1626: note = Description of Artificial Sequence: Synthetic coding sequence
  source 1..1626: mol_type = other DNA
atgctgagcccccagagggtggccgccgccgccagcagaggagcagatgatgccatggagagcagcaagccaggccctgtgcaggtggtgctggtgcagaaggaccagcacagctttgagctggatgagaaggccctggccagcatcctgctgcaggaccacatccgggacctggatgtggtggtggtgtctgtggccggggccttcaggaagggcaagagcttcatcctggacttcatgctgcgctacctgtacagccagaaggagagcggccacagcaactggctgggggaccctgaggagcccctgaccggcttctcctggaggggcggcagtgaccctgagaccaccggcatccagatctggagcgaggtgttcaccgtggagaagccaggcggcaagaaggtggccgtggtgctgatggacacccagggcgcctttgacagccagagcacagtgaaggactgtgccaccatctttgccctgagcaccatgaccagctctgtgcagatctacaacctgagccagaacatccaggaggatgacctgcagcagctgcagctgttcacagaatatggccgcctggccatggatgagatcttccagaagcccttccagaccctgatgttcctggtgcgggactggagcttcccctatgagtacagctatggcctgcagggcggcatggccttcctggacaagaggctgcaggtgaaggagcaccagcacgaggagatccagaatgtgaggaaccacatccacagctgcttcagtgatgtgacctgcttcctgctgccccaccctggcctgcaggtggccaccagcccagactttgatggcaagctgaaggacattgctggggagttcaaggagcagctgcaggccctgatcccctacgtgctgaaccccagcaagctgatggagaaggagatcaatggcagcaaggtgacctgccggggcctgctggagtacttcaaggcctacatcaagatctaccagggcgaggacctgccccaccccaagtccatgctgcaggccacagctgaggccaacaacctggccgccgccgccagcgccaaggacatctactacaacaacatggaggaggtgtgtggcggggagaagccctacctgagcccagacatcctggaggagaagcactgtgagttcaagcagctggccctggaccacttcaagaagaccaagaagatgggcggcaaggacttctccttccgctaccagcaggagctggaggaggagatcaaggagctgtatgagaacttctgcaagcacaacggcagcaagaatgtgttcagcaccttccgcaccccagctgtgctcttcaccggcatcgtggccctgtacatcgccagcggcctgaccggcttcatcggcctggaggtggtggcccagctgttcaactgcatggtgggcctgctgctgattgccctgctgacctggggctacatccgctacagcggccagtaccgggagctgggcggggccatcgactttggagctgcctacgtgctggagcaggccagcagccacatcggcaacagcacccaggccaccgtgagagatgctgtggtgggccggcccagcatggacaagaaggcccagtag

SEQ ID NO: 144292 - DNA, 1065 bp, synthetic construct
  misc_feature 1..1065: note = Description of Artificial Sequence: Synthetic coding sequence
  source 1..1065: mol_type = other DNA
atgagccggctgctgcatgctgaggagtgggccgaggtgaaggagctgggggaccaccaccggcagccccagccccaccacctgccccagcccccacctccaccccagcccccagccaccctgcaggcccgggagcaccctgtgtacccacctgagctgagcctgctggacagcacagacccccgggcctggctggcccccaccctgcagggcatctgcacagcccgggccgcccagtacctgctgcacagccctgagctgggcgccagcgaggccgccgcccccagagatgaggtggatggccgcggggagctggtgagaagaagcagcggcggggccagcagcagcaagagccctggccctgtgaaggtgcgggagcagctgtgcaagctgaagggcggcgtggtggtggatgagctgggctgcagccggcagagggcccccagcagcaagcaggtgaatggagtgcagaagcagaggcggctggccgccaatgcccgggagaggaggaggatgcacggcctgaaccacgcctttgaccagctgagaaatgtcatccccagcttcaacaatgacaagaagctgagcaaatatgagaccctgcagatggcccagatctacatcaatgccctgtctgagctgctgcagaccccatctggaggagagcagcccccacctcctccagccagctgcaagagtgaccaccaccacctgaggacagctgccagctatgagggcggcgctggaaatgccacagctgctggggcccagcaggccagcggcggcagccagaggcccaccccacctggcagctgcaggacccgcttcagcgccccagccagcgctgggggctacagcgtgcagctggatgccctgcacttcagcacctttgaggacagcgccctgacagccatgatggcccagaagaacctgagccccagcctgcccggcagcatcctgcagcctgtgcaggaggagaacagcaagaccagccccaggagccacagaagtgatggagagttcagcccccacagccactacagcgacagtgatgaggccagctag

SEQ ID NO: 144293 - DNA, 459 bp, synthetic construct
  misc_feature 1..459: note = Description of Artificial Sequence: Synthetic coding sequence
  source 1..459: mol_type = other DNA
atgaagagctgcaagcccagcggccccccagctggggcccgggtggccccaccctgtgccggcggcacagaatgtgccggcacctgtgccggggccggccgcctggagagcgctgcccggcggcggctggccgccaatgcccgggagaggaggaggatgcagggcctgaacacagcctttgaccggctgcggcgggtggtgccccagtggggccaggacaagaagctgagcaaatatgagaccctgcagatggccctgagctacatcatggccctgacccgcatcctggccgaggccgagcgcttcggcagcgagcgggactgggtgggcctgcactgtgagcacttcggccgggaccactacctgcccttccctggggccaagctgcccggggagagcgagctgtacagccagaggctgtttggcttccagcctgagcccttccagatggccacctag

SEQ ID NO: 144294 - DNA, 627 bp, synthetic construct
  misc_feature 1..627: note = Description of Artificial Sequence: Synthetic coding sequence
  source 1..627: mol_type = other DNA
atgtggaggagctgcctgcggctgagagatggcggccgccgcctgctgaacagacctgctgggggccccagcgcctccatgagccctggccccaccatccccagccctgcccgggcctatgccccacccacagagaggaagcgcttctaccagaatgtgtccatcacccagggcgagggcggctttgagatcaacctggaccacaggaagctgaagaccccccaggccaagctgttcaccgtgcccagcgaggccctggccatcgctgtggccacagagtgggacagccagcaggacaccatcaagtactacaccatgcacctgaccaccctgtgcaacaccagcctggacaaccccacccagaggaacaaggaccagctgatccgggctgctgtgaagttcctggacacagacaccatctgctacagagtggaggagcctgagaccctggtggagctgcagagaaatgagtgggaccccatcatcgagtgggccgagaagagatatggagtggagatcagcagcagcaccagcatcatgggccccagcatcccagccaagacccgggaggtgctggtgagccacctggccagctacaacacctgggccctgcagggcatggactag

SEQ ID NO: 144295 - DNA, 618 bp, synthetic construct
  misc_feature 1..618: note = Description of Artificial Sequence: Synthetic coding sequence
  source 1..618: mol_type = other DNA
atgtggaggagctgcctgcggctgagagatggcggccgccgcctgctgaacagacctgctgggggccccagcgcctccatgagccctggccccaccatccccagccctgcccgggcctatgccccacccacagagaggaagcgcttctaccagaatgtgtccatcacccagggcgagggcggctttgagatcaacctggaccacaggaagctgaagaccccccaggccaagctgttcaccgtgcccagcgaggccctggccatcgctgtggccacagagtgggacagccagcaggacaccatcaagtactacaccatgcacctgaccaccctgtgcaacaccagcctggacaaccccacccagaggaacaaggaccagctgatccgggctgctgtgaagttcctggacacagacaccatctgctacagagtggaggagcctgagaccctggtggagctgcagagaaatgagtgggaccccatcatcgagtgggccgagaagagatatggagtggagatcagcagcagcaccagcatcatgggccccagcatcccagccaagacccgggaggtgctggtgagccacctggccagctacaacacctgggccctgcagtag

SEQ ID NO: 144296 - DNA, 870 bp, synthetic construct
  misc_feature 1..870: note = Description of Artificial Sequence: Synthetic coding sequence
  source 1..870: mol_type = other DNA
atgtggaggagctgcctgcggctgagagatggcggccgccgcctgctgaacagacctgctgggggccccagcgcctccatgagccctggccccaccatccccagccctgcccgggcctatgccccacccacagagaggaagcgcttctaccagaatgtgtccatcacccagggcgagggcggctttgagatcaacctggaccacaggaagctgaagaccccccaggccaagctgttcaccgtgcccagcgaggccctggccatcgctgtggccacagagtgggacagccagcaggacaccatcaagtactacaccatgcacctgaccaccctgtgcaacaccagcctggacaaccccacccagaggaacaaggaccagctgatccgggctgctgtgaagttcctggacacagacaccatctgctacagagtggaggagcctgagaccctggtggagctgcagagaaatgagtgggaccccatcatcgagtgggccgagaagagatatggagtggagatcagcagcagcaccagcatcatgggccccagcatcccagccaagacccgggaggtgctggtgagccacctggccagctacaacacctgggccctgcagggcattgaatttgtggccgcccagctgaagtccatggtgctgaccctgggcctgattgacctgcggctgactgtggagcaggccgtgctgctgagccggctggaggaggagtaccagatccagaagtggggcaacatcgagtgggcccatgactatgagctgcaggagctgcgggccaggacagctgctggcaccctcttcatccacctgtgcagcgagagcaccaccgtgaagcacaagctgctgaaggagtag

SEQ ID NO: 144297 - DNA, 1590 bp, synthetic construct
  misc_feature 1..1590: note = Description of Artificial Sequence: Synthetic coding sequence
  source 1..1590: mol_type = other DNA
atgctgggctttgtgggccgggtggccgccgccccagccagcggggccctgcggcggctgaccccatctgccagcctgcccccagcccagctgctgctgcgggccgcccccacagctgtgcaccctgtgcgggactatgctgcccagaccagccccagccccaaggccggggccgccaccggcagaattgtggccgtgattggagctgtggtggatgtgcagtttgatgagggcctgccccccatcctgaatgccctggaggtgcagggccgggagacccggctggtgctggaggtggcccagcacctgggggagagcacagtgaggaccatcgccatggatggaacagagggcctggtgcggggccagaaggtgctggacagcggggcccccatcaagatccctgtgggccctgagaccctgggccgcatcatgaatgtcatcggggagcccattgatgagcggggccccatcaagaccaagcagtttgcccccatccacgccgaggcccctgagttcatggagatgtctgtggagcaggagatcctggtgacaggcatcaaggtggtggacctgctggccccctatgccaagggcggcaagattggcctgtttggaggagctggggtgggcaagacagtgctgatcatggagctgatcaacaacgtggccaaggcccatggaggctacagcgtgtttgctggggtgggggagaggacccgggagggcaatgacctgtaccacgagatgattgaaagtggagtcatcaacctgaaggatgccaccagcaaggtggccctggtgtatggccagatgaatgaacctcctggggcccgggcccgggtggccctgaccggcctgactgtggccgagtacttccgggaccaggagggccaggatgtgctgctcttcatcgacaacatcttccgcttcacccaggccggcagcgaggtgtctgccctgctgggccgcatccccagcgctgtgggctaccagcccaccctggccacagacatgggcaccatgcaggagcgcatcaccaccaccaagaagggcagcatcacctctgtgcaggccatctacgtgcctgcagatgacctgacagatcctgccccagccaccacctttgcccacctggatgccaccaccgtgctgagccgggccatcgccgagctgggcatctacccagctgtggaccccctggacagcaccagccgcatcatggaccccaacatcgtgggcagcgagcactatgatgtggcccggggcgtgcagaagatcctgcaggactacaagagcctgcaggacatcatcgccatcctgggcatggatgagctgtctgaggaggacaagctgactgtgtcccgggccaggaagatccagcgcttcctgagccagcccttccaggtggccgaggtgttcaccggccacatgggcaagctggtgcccctgaaggagaccatcaagggcttccagcagatcctggccggggagtatgaccacctgcctgagcaggccttctacatggtgggccccatcgaggaggccgtggccaaggctgacaagctggccgaggagcacagcagctag

SEQ ID NO: 144298 - DNA, 156 bp, synthetic construct
  misc_feature 1..156: note = Description of Artificial Sequence: Synthetic coding sequence
  source 1..156: mol_type = other DNA
atggtggcctactggaggcaggccggcctgagctacatccgctacagccagatctgtgccaaggctgtgagagatgccctgaagacagagttcaaggccaatgctgagaagaccagcggcagcaatgtgaagatcgtgaaggtgaagaaggagtag

SEQ ID NO: 144299 - DNA, 156 bp, synthetic construct; identical to SEQ ID NO: 144298
  misc_feature 1..156: note = Description of Artificial Sequence: Synthetic coding sequence
  source 1..156: mol_type = other DNA

SEQ ID NO: 144300 - DNA, 156 bp, synthetic construct; identical to SEQ ID NO: 144298
  misc_feature 1..156: note = Description of Artificial Sequence: Synthetic coding sequence
  source 1..156: mol_type = other DNA

SEQ ID NO: 144301 - DNA, 894 bp, synthetic construct
  misc_feature 1..894: note = Description of Artificial Sequence: Synthetic coding sequence
  source 1..894: mol_type = other DNA
atgttcagcagagctggggtggccggcctgagcgcctggaccctgcagccccagtggatccaggtgaggaacatggccaccctgaaggacatcacccggcggctgaagagcatcaagaacatccagaagatcaccaagtccatgaagatggtggccgccgccaagtatgcccgggcagagcgggagctgaagccagcccgcatctacggcctgggcagcctggccctgtatgagaaggctgacatcaagggccctgaggacaagaagaagcacctgctgattggagtgtccagtgaccggggcctgtgtggggccatccacagcagcatcgccaagcagatgaagtctgaggtggccaccctgacagctgctgggaaggaggtgatgctggtgggcattggagacaagatccggggcatcctgtaccgcacccacagcgaccagttcctggtggccttcaaggaggtgggcaggaagccacccacctttggagatgcctctgtgattgccctggagctgctgaacagcggctatgaatttgatgagggcagcatcatcttcaacaagttccgcagcgtcatctcctacaagacagaggagaagcccatcttcagcctgaacacagtggccagcgctgacagcatgagcatctatgatgacattgatgctgatgtgctgcagaactaccaggagtacaacctggccaacatcatctactacagcctgaaggagagcaccaccagcgagcagagcgccaggatgacagccatggacaatgccagcaagaatgccagcgagatgattgacaagctgaccctgaccttcaacagaacccggcaggccgtcatcaccaaggagctgattgagatcatcagcggggctgctgccctgtag

SEQ ID NO: 144302 - DNA, 897 bp, synthetic construct
  misc_feature 1..897: note = Description of Artificial Sequence: Synthetic coding sequence
  source 1..897: mol_type = other DNA
atgttcagcagagctggggtggccggcctgagcgcctggaccctgcagccccagtggatccaggtgaggaacatggccaccctgaaggacatcacccggcggctgaagagcatcaagaacatccagaagatcaccaagtccatgaagatggtggccgccgccaagtatgcccgggcagagcgggagctgaagccagcccgcatctacggcctgggcagcctggccctgtatgagaaggctgacatcaagggccctgaggacaagaagaagcacctgctgattggagtgtccagtgaccggggcctgtgtggggccatccacagcagcatcgccaagcagatgaagtctgaggtggccaccctgacagctgctgggaaggaggtgatgctggtgggcattggagacaagatccggggcatcctgtaccgcacccacagcgaccagttcctggtggccttcaaggaggtgggcaggaagccacccacctttggagatgcctctgtgattgccctggagctgctgaacagcggctatgaatttgatgagggcagcatcatcttcaacaagttccgcagcgtcatctcctacaagacagaggagaagcccatcttcagcctgaacacagtggccagcgctgacagcatgagcatctatgatgacattgatgctgatgtgctgcagaactaccaggagtacaacctggccaacatcatctactacagcctgaaggagagcaccaccagcgagcagagcgccaggatgacagccatggacaatgccagcaagaatgccagcgagatgattgacaagctgaccctgaccttcaacagaacccggcaggccgtcatcaccaaggagctgattgagatcatcagcggggctgctgccctggactag

SEQ ID NO: 144303 - DNA, 753 bp, synthetic construct
  misc_feature 1..753: note = Description of Artificial Sequence: Synthetic coding sequence
  source 1..753: mol_type = other DNA
atgaagatggtggccgccgccaagtatgcccgggcagagcgggagctgaagccagcccgcatctacggcctgggcagcctggccctgtatgagaaggctgacatcaagggccctgaggacaagaagaagcacctgctgattggagtgtccagtgaccggggcctgtgtggggccatccacagcagcatcgccaagcagatgaagtctgaggtggccaccctgacagctgctgggaaggaggtgatgctggtgggcatcggggacaagatccggggcatcctgtaccgcacccacagcgaccagttcctggtggccttcaaggaggtgggcaggaagccacccacctttggagatgccagcgtcatcgccctggagctgctgaacagcggctatgaatttgatgagggcagcatcatcttcaacaagttccgcagcgtcatctcctacaagacagaggagaagcccatcttcagcctgaacacagtggccagcgctgacagcatgagcatctatgatgacattgatgctgatgtgctgcagaactaccaggagtacaacctggccaacatcatctactacagcctgaaggagagcaccaccagcgagcagagcgccaggatgacagccatggacaatgccagcaagaatgccagcgagatgattgacaagctgaccctgaccttcaacagaacccggcaggccgtcatcaccaaggagctgattgagatcatctctggagctgctgccctgtag

SEQ ID NO: 144304 - DNA, 642 bp, synthetic construct
  misc_feature 1..642: note = Description of Artificial Sequence: Synthetic coding sequence
  source 1..642: mol_type = other DNA
atggccgccccagctgtgtctggcctgagccggcaggtgcgctgcttcagcacctctgtggtgcggccctttgccaagctggtgcggccccctgtgcaggtgtatggaattgagggccgctatgccacagccctgtacagcgctgccagcaagcagaacaagctggagcaggtggagaaggagctgctgcgggtggcccagatcctgaaggagcccaaggtggccgcctctgtgctgaacccctacgtgaagaggagcatcaaggtgaagagcctgaatgacatcacagccaaggagcgcttcagccccctgaccaccaacctgatcaacctgctggccgagaatggccgcctgagcaacacccagggcgtggtgtctgccttcagcaccatgatgtctgtgcacagaggagaggtgccctgcaccgtgaccagcgccagccccctggaggaggccaccctgtctgagctgaagacagtgctgaagagcttcctgagccagggccaggtgctgaagctggaggccaagacagaccccagcatcctgggcggcatgattgtgagaattggagagaagtatgtggacatgtctgtgaagaccaagatccagaagctgggccgggccatgagggagatcgtgtag

SEQ ID NO: 144305 - DNA, 411 bp, synthetic construct
  misc_feature 1..411: note = Description of Artificial Sequence: Synthetic coding sequence
  source 1..411: mol_type = other DNA
atgcagacagctggggccctcttcatcagccctgccctgatccgctgctgcacccggggcctcatccggcctgtgtctgccagcttcctgaacagccctgtgaacagcagcaagcagcccagctacagcaacttccccctgcaggtggcccggcgggagttccagacctctgtggtgtcccgggacatcgacacagctgccaagttcatcggggccggggccgccaccgtgggcgtggccggcagcggggccggcatcggcaccgtgtttggcagcctcatcatcggctacgccaggaaccccagcctgaagcagcagctgttctcctatgccatcctgggctttgccctgtctgaggccatgggcctcttctgcctgatggtggccttcctgatcctgtttgccatgtag

SEQ ID NO: 144306 - DNA, 411 bp, synthetic construct; identical to SEQ ID NO: 144305
  misc_feature 1..411: note = Description of Artificial Sequence: Synthetic coding sequence
  source 1..411: mol_type = other DNA

SEQ ID NO: 144307 - DNA, 474 bp, synthetic construct
  misc_feature 1..474: note = Description of Artificial Sequence: Synthetic coding sequence
  source 1..474: mol_type = other DNA
atgcctgagctgatcctgagccctgccacagccccccaccccctgaagatgtttgcctgcagcaagtttgtgtccacccccagcctggtgaagagcaccagccagctgctgagccggcccctgtctgctgtggtgctgaagaggcctgagatcctgacagatgagagcctgagcagcctggccgtgtcctgccccctgaccagcctggtgagcagccgctccttccagaccagcgccatcagccgggacatcgacacagctgccaagttcatcggggccggggccgccaccgtgggcgtggccggcagcggggccggcattggaacagtgtttggcagcctcatcatcggctacgccaggaaccccagcctgaagcagcagctgttctcctatgccatcctgggctttgccctgtctgaggccatgggcctcttctgcctgatggtggccttcctgatcctgtttgccatgtag

SEQ ID NO: 144308 - DNA, 597 bp, synthetic construct
  misc_feature 1..597: note = Description of Artificial Sequence: Synthetic coding sequence
  source 1..597: mol_type = other DNA
atgcctgagctgatcctgtatgtggccatcaccctgtctgtggccgagcggctggtgggccctggccacgcctgtgccgagcccagcttccgcagcagccgctgcagcgcccccctgtgcctgctgtgcagcggcagcagcagccctgccacagccccccaccccctgaagatgtttgcctgcagcaagtttgtgtccacccccagcctggtgaagagcaccagccagctgctgagccggcccctgtctgctgtggtgctgaagaggcctgagatcctgacagatgagagcctgagcagcctggccgtgtcctgccccctgaccagcctggtgagcagccgctccttccagaccagcgccatcagccgggacatcgacacagctgccaagttcatcggggccggggccgccaccgtgggcgtggccggcagcggggccggcatcggcaccgtgtttggcagcctcatcatcggctacgccaggaaccccagcctgaagcagcagctgttctcctatgccatcctgggctttgccctgtctgaggccatgggcctcttctgcctgatggtggccttcctgatcctgtttgccatgtag

SEQ ID NO: 144309 - DNA, 426 bp, synthetic construct
  misc_feature 1..426: note = Description of Artificial Sequence: Synthetic coding sequence
  source 1..426: mol_type = other DNA
atgtttgcctgcagcaagtttgtgtccacccccagcctggtgaagagcaccagccagctgctgagccggcccctgtctgctgtggtgctgaagaggcctgagatcctgacagatgagagcctgagcagcctggccgtgtcctgccccctgaccagcctggtgagcagccgctccttccagaccagcgccatcagccgggacatcgacacagctgccaagttcatcggggccggggccgccaccgtgggcgtggccggcagcggggccggcattggaacagtgtttggcagcctcatcatcggctacgccaggaaccccagcctgaagcagcagctgttctcctatgccatcctgggctttgccctgtctgaggccatgggcctcttctgcctgatggtggccttcctgatcctgtttgccatgtag

SEQ ID NO: 144310 - DNA, 429 bp, synthetic construct
  misc_feature 1..429: note = Description of Artificial Sequence: Synthetic coding sequence
  source 1..429: mol_type = other DNA
atgtttgcctgtgccaagctggcctgcacccccagcctcatccgggccggcagccgggtggcctaccggcccatcagcgcctctgtgctgagcaggcctgaggccagcaggactggagagggcagcacagtgttcaacggggcccagaatggagtgtcccagctgatccagcgggagttccagaccagcgccatcagccgggacatcgacacagctgccaagttcatcggggccggggccgccaccgtgggcgtggccggcagcggggccggcatcggcaccgtgtttggcagcctcatcatcggctacgccaggaaccccagcctgaagcagcagctgttctcctatgccatcctgggctttgccctgtctgaggccatgggcctcttctgcctgatggtggccttcctgatcctgtttgccatgtag

SEQ ID NO: 144311 - DNA, 429 bp, synthetic construct; identical to SEQ ID NO: 144310
  misc_feature 1..429: note = Description of Artificial Sequence: Synthetic coding sequence
  source 1..429: mol_type = other DNA

SEQ ID NO: 144312 - DNA, 429 bp, synthetic construct; identical to SEQ ID NO: 144310
  misc_feature 1..429: note = Description of Artificial Sequence: Synthetic coding sequence
  source 1..429: mol_type = other DNA

SEQ ID NO: 144313 - DNA, 210 bp, synthetic construct
  misc_feature 1..210: note = Description of Artificial Sequence: Synthetic coding sequence
  source 1..210: mol_type = other DNA
atggtgccccctgtgcaggtgagccccctcatcaagctgggccgctacagcgccctcttcctgggcgtggcctatggagccacccgctacaactacctgaagcccagggctgaggaggagaggagaattgctgctgaggagaagaagaagcaggatgagctgaagagaattgcccgggagctggctgaagatgacagcatcctgaagtag

SEQ ID NO: 144314 - DNA, 327 bp, synthetic construct
  misc_feature 1..327: note = Description of Artificial Sequence: Synthetic coding sequence
  source 1..327: mol_type = other DNA
atgatcctgcagaggctcttccgcttcagcagcgtcatccgctctgctgtgtctgtgcacctgcggagaaatattggagtgacagctgtggccttcaacaaggagctggaccccatccagaagctgtttgtggacaagatccgggagtacaagagcaagaggcagaccagcggcggccctgtggatgccagcagcgagtaccagcaggagctggagcgggagctgttcaagctgaagcagatgtttggaaatgctgacatgaacaccttccccaccttcaagtttgaggaccccaagtttgaggtgattgagaagccccaggcctag

SEQ ID NO: 144315 - DNA, 327 bp, synthetic construct; identical to SEQ ID NO: 144314
  misc_feature 1..327: note = Description of Artificial Sequence: Synthetic coding sequence
  source 1..327: mol_type = other DNA

SEQ ID NO: 144316 - DNA, 327 bp, synthetic construct; identical to SEQ ID NO: 144314
  misc_feature 1..327: note = Description of Artificial Sequence: Synthetic coding sequence
  source 1..327: mol_type = other DNA

SEQ ID NO: 144317 - DNA, 327 bp, synthetic construct; identical to SEQ ID NO: 144314
  misc_feature 1..327: note = Description of Artificial Sequence: Synthetic coding sequence
  source 1..327: mol_type = other DNA

SEQ ID NO: 144318 - DNA, 327 bp, synthetic construct; identical to SEQ ID NO: 144314
  misc_feature 1..327: note = Description of Artificial Sequence: Synthetic coding sequence
  source 1..327: mol_type = other DNA

SEQ ID NO: 144319 - DNA, 351 bp, synthetic construct
  misc_feature 1..351: note = Description of Artificial Sequence: Synthetic coding sequence
  source 1..351: mol_type = other DNA
atgcactgtgatggcggcatctccatgatcctgcagaggctcttccgcttcagcagcgtcatccgctctgctgtgtctgtgcacctgcggagaaatattggagtgacagctgtggccttcaacaaggagctggaccccatccagaagctgtttgtggacaagatccgggagtacaagagcaagaggcagaccagcggcggccctgtggatgccagcagcgagtaccagcaggagctggagcgggagctgttcaagctgaagcagatgtttggaaatgctgacatgaacaccttccccaccttcaagtttgaggaccccaagtttgaggtgattgagaagccccaggcctag

SEQ ID NO: 144320 - DNA, 567 bp, synthetic construct
  misc_feature 1..567: note = Description of Artificial Sequence: Synthetic coding sequence
  source 1..567: mol_type = other DNA
atgacagccaagggcagcacaggcatggagatcctgctgagcaccctggagaacaccaaggacctgcagaccaccctgaacatcctgagcatcctggtggagctggtgtctgctgggggcggccggcgggtgtccttcctggtgaccaagggcggcagccagatcctgctgcagctgctgatgaatgccagcaaggagagcccccctcatgaggacctgatggtgcagatccacagcatcctggccaagattggccccaaggacaagaagtttggagtgaaggcccgcatcaacggggccctgaacatcaccctgaacctggtgaagcagaacctgcagaaccaccggctggtgctgccctgcctgcagctgctgcgggtgtacagcgccaacagcgtgaacagcgtgtccctgggcaagaatggagtggtggagctgatgttcaagatcatcggccccttcagcaagaagaacagcagcctcatcaagaacaagtgccaggagagctgccggcagaggatctgccccagcgccttcaacaacctgtgccgcctggcccctccttag

SEQ ID NO: 144321 - DNA, 3681 bp, synthetic construct
  misc_feature 1..3681: note = Description of Artificial Sequence: Synthetic coding sequence
  source 1..3681: mol_type = other DNA
atgagcaagctgaaggtgattcctgagaagagcctgaccaacaacagccgcatcgtgggcctgctggcccagctggagaagatcaatgctgagcccagcgagagtgacacagcccgctacgtgaccagcaagatcctgcacctggcccagagccaggagaagacccggcgggagatgacagccaagggcagcacaggcatggagatcctgctgagcaccctggagaacaccaaggacctgcagaccaccctgaacatcctgagcatcctggtggagctggtgtctgctgggggcggccggcgggtgtccttcctggtgaccaagggcggcagccagatcctgctgcagctgctgatgaatgccagcaaggagagcccccctcatgaggacctgatggtgcagatccacagcatcctggccaagattggccccaaggacaagaagtttggagtgaaggcccgcatcaacggggccctgaacatcaccctgaacctggtgaagcagaacctgcagaaccaccggctggtgctgccctgcctgcagctgctgcgggtgtacagcgccaacagcgtgaacagcgtgtccctgggcaagaatggagtggtggagctgatgttcaagatcatcggccccttcagcaagaagaacagcagcctcatcaaggtggccctggacaccctggccgccctgctgaagagcaagaccaatgcccggcgggctgtggaccggggctacgtgcaggtgctgctgaccatctacgtggactggcacagacatgacaacagacacaggaacatgctgatcaggaagggcatcctgcagagcctgaagtctgtgaccaacatcaagctgggcaggaaggccttcattgatgccaacggcatgaagatcctgtacaacaccagccaggagtgcctggccgtgaggaccctggaccccctggtgaacaccagcagcctcatcatgaggaagtgcttccccaagaaccggctgcccctgcccaccatcaagagcagcttccacttccagctgcctgtgattcctgtgacaggccctgtggcccagctgtacagcctgcccccagaggtggatgatgtggtggatgaaagtgatgacaatgatgacattgatgtggaggctgaaaatgaaacagaaaatgaagatgacctggaccagaacttcaagaatgatgacattgaaacagacatcaacaagctgaagccccagcaggagcccggccgcaccatcgaggacctgaagatgtatgagcacctgtttcctgagctggtggatgacttccaggactatgacctgatcagcaaggagcccaagccctttgtgtttgagggcaaggtgcggggccccatcgtggtgcccacagctggggaggagaccagcggcaacagcggcaacctgaggaaggtggtgatgaaggagaacatcagcagcaaaggagatgaaggagagaagaagagcaccttcatggacctggccaaggaggacatcaaggacaatgacaggaccctgcagcagcagcccggggaccagaacagaaccatcagctctgtgcacggcctgaacaatgacatcgtgaaggccctggaccgcatcaccctgcagaacatccccagccagacagcccctggcttcaccgctgagatgaagaaggactgcagcctgcccctgactgtgctgacctgtgccaaggcctgcccccacatggccacctgtggaaatgtgctgtttgagggccgcacagtgcagctgggcaagctgtgctgcacaggagtggagacagaagatgatgaggacacagagagcaacagctctgtggagcaggcctctgtggaggtgcctgatggccccaccctgcatgaccctgacctgtacattgaaattgtgaagaacaccaagtctgtgcctgagtacagcgaggtggcctacccagactacttcggccacatccccccacccttcaaggagcccatcctggagcggccctacggcgtgcagaggaccaagatcgcccaggacatcgagcggctcatccaccagagcgacatcatcgacagagtggtgtatgacctggacaaccccaactacaccatccctgaggagggggacatcctgaagttcaacagcaagtttgagagcggcaacctgaggaaggtgatccagatcaggaagaatgaatatgacctgatcctgaacagcgacatcaacagcaaccactaccaccagtggttctactttgaggtgtctggcatgaggcctggggtggcctaccgcttcaacatcatcaactgtgagaagagcaacagccagttcaactacggcatgcagcccctgatgtacagcgtgcaggaggccctgaatgcccggccctggtggatccgcatgggcacagacatctgctactacaagaaccacttcagccgcagctctgtggccgccggcggccagaagggcaagagctactacaccatcaccttcaccgtgaacttcccccacaaggatgatgtgtgctactttgcctaccactacccctacacctacagcaccctgcagatgcacctgcagaagctggagagcgcccacaacccccagcagatctacttcaggaaggatgtgctgtgtgagaccctgagcggcaacagctgccccctggtgaccatcacagccatgcctgagagcaactactatgagcacatctgccacttcaggaaccggccctacgtgttcctgagcgcccgggtgcaccctggagagaccaatgcctcctgggtgatgaagggcaccctggagtacctgatgagcaacaaccccacagcccagagcctgcgggagagctacatcttcaagatcgtgcccatgctgaacccagatggagtcatcaatggaaaccaccgctgcagcctgagcggggaggacctgaaccggcagtggcagagccccagcccagacctgcaccccaccatctaccacgccaagggcctgctgcagtacctggccgctgtgaagaggctgcccctggtgtactgtgactaccacggccacagcaggaagaagaatgtgttcatgtatggctgcagcatcaaggagaccgtgtggcacaccaatgacaatgccaccagctgtgatgtggtggaggacaccggctaccgcaccctgcccaagatcctgagccacatcgccccagccttctgcatgagcagctgcagctttgtggtggagaagagcaaggagagcacagcccgggtggtggtgtggagagaaattggagtgcagaggagctacaccatggagagcaccctgtgtggctgtgaccagggcaagtacaagggcctgcagatcggcacccgggagctggaggagatgggcgccaagttctgtgtgggcctgctgcggctgaagaggctgaccagccccctggagtacaacctgcccagcagcctgctggactttgaaaatgacctgattgagagcagctgcaaggtgaccagccccaccacctacgtgctggatgaagatgagccccgcttcctggaggaggtggactacagcgctgagagcaatgatgagctggacatcgagctggctgaaaatgtgggggactatgagcccagcgcccaggaggaggtgctgagtgacagcgagctgagcaggacctacctgccctag

SEQ ID NO: 144322 - DNA, 567 bp, synthetic construct; identical to SEQ ID NO: 144320
  misc_feature 1..567: note = Description of Artificial Sequence: Synthetic coding sequence
  source 1..567: mol_type = other DNA

SEQ ID NO: 144323 - DNA, 714 bp, synthetic construct
  misc_feature 1..714: note = Description of Artificial Sequence: Synthetic coding sequence
  source 1..714: mol_type = other DNA
atgagcaagctgaaggtgattcctgagaagagcctgaccaacaacagccgcatcgtgggcctgctggcccagctggagaagatcaatgctgagcccagcgagagtgacacagcccgctacgtgaccagcaagatcctgcacctggcccagagccaggagaagacccggcgggagatgacagccaagggcagcacaggcatggagatcctgctgagcaccctggagaacaccaaggacctgcagaccaccctgaacatcctgagcatcctggtggagctggtgtctgctgggggcggccggcgggtgtccttcctggtgaccaagggcggcagccagatcctgctgcagctgctgatgaatgccagcaaggagagcccccctcatgaggacctgatggtgcagatccacagcatcctggccaagattggccccaaggacaagaagtttggagtgaaggcccgcatcaacggggccctgaacatcaccctgaacctggtgaagcagaacctgcagaaccaccggctggtgctgccctgcctgcagctgctgcgggtgtacagcgccaacagcgtgaacagcgtgtccctgggcaagaatggagtggtggagctgatgttcaagatcatcggccccttcagcaagaagaacagcagcctcatcaagaatgtgtggcagagcggcctgtggatcctgctgagcatcccccctgtgtag

SEQ ID NO: 144324 - DNA, 3561 bp, synthetic construct
  misc_feature 1..3561: note = Description of Artificial Sequence: Synthetic coding sequence
  source 1..3561: mol_type = other DNA
atgagcaagctgaaggtgattcctgagaagagcctgaccaacaacagccgcatcgtgggcctgctggcccagctggagaagatcaatgctgagcccagcgagagtgacacagcccgctacgtgaccagcaagatcctgcacctggcccagagccaggagaagacccggcgggagatgacagccaagggcagcacaggcatggagatcctgctgagcaccctggagaacaccaaggacctgcagaccaccctgaacatcctgagcatcctggtggagctggtgtctgctgggggcggccggcgggtgtccttcctggtgaccaagggcggcagccagatcctgctgcagctgctgatgaatgccagcaaggagagcccccctcatgaggacctgatggtgcagatccacagcatcctggccaagattggccccaaggacaagaagtttggagtgaaggcccgcatcaacggggccctgaacatcaccctgaacctggtgaagcagaacctgcagaaccaccggctggtgctgccctgcctgcagctgctgcgggtgtacagcgccaacagcgtgaacagcgtgtccctgggcaagaatggagtggtggagctgatgttcaagatcatcggccccttcagcaagaagaacagcagcctcatcaaggtggccctggacaccctggccgccctgctgaagagcaagaccaatgcccggcgggctgtggaccggggctacgtgcaggtgctgctgaccatctacgtggactggcacagacatgacaacagacacaggaacatgctgatcaggaagggcatcctgcagagcctgaagtctgtgaccaacatcaagctgggcaggaaggccttcattgatgccaacggcatgaagatcctgtacaacaccagccagctgcctgtgattcctgtgacaggccctgtggcccagctgtacagcctgcccccagaggtggatgatgtggtggatgaaagtgatgacaatgatgacattgatgtggaggctgaaaatgaaacagaaaatgaagatgacctggaccagaacttcaagaatgatgacattgaaacagacatcaacaagctgaagccccagcaggagcccggccgcaccatcgaggacctgaagatgtatgagcacctgtttcctgagctggtggatgacttccaggactatgacctgatcagcaaggagcccaagccctttgtgtttgagggcaaggtgcggggccccatcgtggtgcccacagctggggaggagaccagcggcaacagcggcaacctgaggaaggtggtgatgaaggagaacatcagcagcaaaggagatgaaggagagaagaagagcaccttcatggacctggccaaggaggacatcaaggacaatgacaggaccctgcagcagcagcccggggaccagaacagaaccatcagctctgtgcacggcctgaacaatgacatcgtgaaggccctggaccgcatcaccctgcagaacatccccagccagacagcccctggcttcaccgctgagatgaagaaggactgcagcctgcccctgactgtgctgacctgtgccaaggcctgcccccacatggccacctgtggaaatgtgctgtttgagggccgcacagtgcagctgggcaagctgtgctgcacaggagtggagacagaagatgatgaggacacagagagcaacagctctgtggagcaggcctctgtggaggtgcctgatggccccaccctgcatgaccctgacctgtacattgaaattgtgaagaacaccaagtctgtgcctgagtacagcgaggtggcctacccagactacttcggccacatccccccacccttcaaggagcccatcctggagcggccctacggcgtgcagaggaccaagatcgcccaggacatcgagcggctcatccaccagagcgacatcatcgacagagtggtgtatgacctggacaaccccaactacaccatccctgaggagggggacatcctgaagttcaacagcaagtttgagagcggcaacctgaggaaggtgatccagatcaggaagaatgaatatgacctgatcctgaacagcgacatcaacagcaaccactaccaccagtggttctactttgaggtgtctggcatgaggcctggggtggcctaccgcttcaacatcatcaactgtgagaagagcaacagccagttcaactacggcatgcagcccctgatgtacagcgtgcaggaggccctgaatgcccggccctggtggatccgcatgggcacagacatctgctactacaagaaccacttcagccgcagctctgtggccgccggcggccagaagggcaagagctactacaccatcaccttcaccgtgaacttcccccacaaggatgatgtgtgctactttgcctaccactacccctacacctacagcaccctgcagatgcacctgcagaagctggagagcgcccacaacccccagcagatctacttcaggaaggatgtgctgtgtgagaccctgagcggcaacagctgccccctggtgaccatcacagccatgcctgagagcaactactatgagcacatctgccacttcaggaaccggccctacgtgttcctgagcgcccgggtgcaccctggagagaccaatgcctcctgggtgatgaagggcaccctggagtacctgatgagcaacaaccccacagcccagagcctgcgggagagctacatcttcaagatcgtgcccatgctgaacccagatggagtcatcaatggaaaccaccgctgcagcctgagcggggaggacctgaaccggcagtggcagagccccagcccagacctgcaccccaccatctaccacgccaagggcctgctgcagtacctggccgctgtgaagaggctgcccctggtgtactgtgactaccacggccacagcaggaagaagaatgtgttcatgtatggctgcagcatcaaggagaccgtgtggcacaccaatgacaatgccaccagctgtgatgtggtggaggacaccggctaccgcaccctgcccaagatcctgagccacatcgccccagccttctgcatgagcagctgcagctttgtggtggagaagagcaaggagagcacagcccgggtggtggtgtggagagaaattggagtgcagaggagctacaccatggagagcaccctgtgtggctgtgaccagggcaagtacaagggcctgcagatcggcacccgggagctggaggagatgggcgccaagttctgtgtgggcctgctgcggctgaagaggctgaccagccccctggagtacaacctgcccagcagcctgctggactttgaaaatgacctgattgagagcagctgcaaggtgaccagccccaccacctacgtgctggatgaagatgagccccgcttcctggaggaggtggactacagcgctgagagcaatgatgagctggacatcgagctggctgaaaatgtgggggactatgagcccagcgcccaggaggaggtgctgagtgacagcgagctgagcaggacctacctgccctag

SEQ ID NO: 144325 - DNA, 3717 bp, synthetic construct
  misc_feature 1..3717: note = Description of Artificial Sequence: Synthetic coding sequence
  source 1..3717: mol_type = other DNA
atgaggactggatctgctgccagcagcgctgctgctgctgctgctgctgctgctgccagcgccagccctgccactggagtgtgcatgaagacccctgggggcggccggcggggcatccggcgggaccctggagctgagcctggagctgctgccctgcggggcccccggcagaggcccatcctgagccggctgaccaacaacagccgcatcgtgggcctgctggcccagctggagaagatcaatgctgagcccagcgagagtgacacagcccgctacgtgaccagcaagatcctgcacctggcccagagccaggagaagacccggcgggagatgacagccaagggcagcacaggcatggagatcctgctgagcaccctggagaacaccaaggacctgcagaccaccctgaacatcctgagcatcctggtggagctggtgtctgctgggggcggccggcgggtgtccttcctggtgaccaagggcggcagccagatcctgctgcagctgctgatgaatgccagcaaggagagcccccctcatgaggacctgatggtgcagatccacagcatcctggccaagattggccccaaggacaagaagtttggagtgaaggcccgcatcaacggggccctgaacatcaccctgaacctggtgaagcagaacctgcagaaccaccggctggtgctgccctgcctgcagctgctgcgggtgtacagcgccaacagcgtgaacagcgtgtccctgggcaagaatggagtggtggagctgatgttcaagatcatcggccccttcagcaagaagaacagcagcctcatcaaggtggccctggacaccctggccgccctgctgaagagcaagaccaatgcccggcgggctgtggaccggggctacgtgcaggtgctgctgaccatctacgtggactggcacagacatgacaacagacacaggaacatgctgatcaggaagggcatcctgcagagcctgaagtctgtgaccaacatcaagctgggcaggaaggccttcattgatgccaacggcatgaagatcctgtacaacaccagccagctgcctgtgattcctgtgacaggccctgtggcccagctgtacagcctgcccccagaggtggatgatgtggtggatgaaagtgatgacaatgatgacattgatgtggaggctgaaaatgaaacagaaaatgaagatgacctggaccagaacttcaagaatgatgacattgaaacagacatcaacaagctgaagccccagcaggagcccggccgcaccatcgaggacctgaagatgtatgagcacctgtttcctgagctggtggatgacttccaggactatgacctgatcagcaaggagcccaagccctttgtgtttgagggcaaggtgcggggccccatcgtggtgcccacagctggggaggagaccagcggcaacagcggcaacctgaggaaggtggtgatgaaggagaacatcagcagcaaaggagatgaaggagagaagaagagcaccttcatggacctggccaaggaggacatcaaggacaatgacaggaccctgcagcagcagcccggggaccagaacagaaccatcagctctgtgcacggcctgaacaatgacatcgtgaaggccctggaccgcatcaccctgcagaacatccccagccagacagcccctggcttcaccgctgagatgaagaaggactgcagcctgcccctgactgtgctgacctgtgccaaggcctgcccccacatggccacctgtggaaatgtgctgtttgagggccgcacagtgcagctgggcaagctgtgctgcacaggagtggagacagaagatgatgaggacacagagagcaacagctctgtggagcaggcctctgtggaggtgcctgatggccccaccctgcatgaccctgacctgtacattgaaattgtgaagaacaccaagtctgtgcctgagtacagcgaggtggcctacccagactacttcggccacatccccccacccttcaaggagcccatcctggagcggccctacggcgtgcagaggaccaagatcgcccaggacatcgagcggctcatccaccagagcgacatcatcgacagagtggtgtatgacctggacaaccccaactacaccatccctgaggagggggacatcctgaagttcaacagcaagtttgagagcggcaacctgaggaaggtgatccagatcaggaagaatgaatatgacctgatcctgaacagcgacatcaacagcaaccactaccaccagtggttctactttgaggtgtctggcatgaggcctggggtggcctaccgcttcaacatcatcaactgtgagaagagcaacagccagttcaactacggcatgcagcccctgatgtacagcgtgcaggaggccctgaatgcccggccctggtggatccgcatgggcacagacatctgctactacaagaaccacttcagccgcagctctgtggccgccggcggccagaagggcaagagctactacaccatcaccttcaccgtgaacttcccccacaaggatgatgtgtgctactttgcctaccactacccctacacctacagcaccctgcagatgcacctgcagaagctggagagcgcccacaacccccagcagatctacttcaggaaggatgtgctgtgtgagaccctgagcggcaacagctgccccctggtgaccatcacagccatgcctgagagcaactactatgagcacatctgccacttcaggaaccggccctacgtgttcctgagcgcccgggtgcaccctggagagaccaatgcctcctgggtgatgaagggcaccctggagtacctgatgagcaacaaccccacagcccagagcctgcgggagagctacatcttcaagatcgtgcccatgctgaacccagatggagtcatcaatggaaaccaccgctgcagcctgagcggggaggacctgaaccggcagtggcagagccccagcccagacctgcaccccaccatctaccacgccaagggcctgctgcagtacctggccgctgtgaagaggctgcccctggtgtactgtgactaccacggccacagcaggaagaagaatgtgttcatgtatggctgcagcatcaaggagaccgtgtggcacaccaatgacaatgccaccagctgtgatgtggtggaggacaccggctaccgcaccctgcccaagatcctgagccacatcgccccagccttctgcatgagcagctgcagctttgtggtggagaagagcaaggagagcacagcccgggtggtggtgtggagagaaattggagtgcagaggagctacaccatggagagcaccctgtgtggctgtgaccagggcaagtacaagggcctgcagatcggcacccgggagctggaggagatgggcgccaagttctgtgtgggcctgctgcggctgaagaggctgaccagccccctggagtacaacctgcccagcagcctgctggactttgaaaatgacctgattgagagcagctgcaaggtgaccagccccaccacctacgtgctggatgaagatgagccccgcttcctggaggaggtggactacagcgctgagagcaatgatgagctggacatcgagctggctgaaaatgtgggggactatgagcccagcgcccaggaggaggtgctgagtgacagcgagctgagcaggacctacctgccctag

SEQ ID NO: 144326 - DNA, 1932 bp, synthetic construct
  misc_feature 1..1932: note = Description of Artificial Sequence: Synthetic coding sequence
  source 1..1932: mol_type = other DNA
atgaatgccagcaaggagagcccccctcatgaggacctgatggtgcagatccacagcatcctggccaagattggccccaaggctgtgaacagcgtgtccctgggcaagaatggagtggtggagctgatgttcaagatcatcggccccttcagcaagaagaacagcagcctcatcaaggtggccctggacaccctggccgccctgctgaagagcaagaccaatgcccggcgggctgtggaccggggctacgtgcaggtgctgctgaccatctacgtggactggcacagacatgacaacagacacaggaacatgctgatcaggaagggcatcctgcagagcctgaagtctgtgaccaacatcaagctgggcaggaaggccttcattgatgccaacggcatgaagatcctgtacaacaccagccaggagtgcctggccgtgaggaccctggaccccctggtgaacaccagcagcctcatcatgaggaagtgcttccccaagaaccggctgcccctgcccaccatcaagagcagcttccacttccagctgcctgtgattcctgtgacaggccctgtggcccagctgtacagcctgcccccagaggtggatgatgtggtggatgaaagtgatgacaatgatgacattgatgtggaggctgaaaatgaaacagaaaatgaagatgacctggaccagaacttcaagaatgatgacattgaaacagacatcaacaagctgaagccccagcaggagcccggccgcaccatcgaggacctgaagatgtatgagcacctgtttcctgagctggtggatgacttccaggactatgacctgatcagcaaggagcccaagccctttgtgtttgagggcaaggtgcggggccccatcgtggtgcccacagctggggaggagaccagcggcaacagcggcaacctgaggaaggtggtgatgaaggagaacatcagcagcaaaggagatgaaggagagaagaagagcaccttcatggacctggccaaggaggacatcaaggacaatgacaggaccctgcagcagcagcccggggaccagaacagaaccatcagctctgtgcacggcctgaacaatgacatcgtgaaggccctggaccgcatcaccctgcagaacatccccagccagacagcccctggcttcaccgctgagatgaagaaggactgcagcctgcccctgactgtgctgacctgtgccaaggcctgcccccacatggccacctgtggaaatgtgctgtttgagggccgcacagtgcagctgggcaagctgtgctgcacaggagtggagacagaagatgatgaggacacagagagcaacagctctgtggagcaggcctctgtggaggtgcctgatggccccaccctgcatgaccctgacctgtacattgaaattgtgaagaacaccaagtctgtgcctgagtacagcgaggtggcctacccagactacttcggccacatccccccacccttcaaggagcccatcctggagcggccctacggcgtgcagaggaccaagatcgcccaggacatcgagcggctcatccaccagagcgacatcatcgacagagtggtgtatgacctggacaaccccaactacaccatccctgaggagggggacatcctgaagttcaacagcaagtttgagagcggcaacctgaggaaggtgatccagatcaggaagaatgaatatgacctgatcctgaacagcgacatcaacagcaaccactaccaccagtggttctactttgaggtgtctggcatgaggcctggggtggcctaccgcttcaacatcatcaactgtgagaagagcaacagccagttcaactatgccctgcccctgatgtcctggatgaagatgaacctggacagcctgaagaagctgatcaccgtgcagaaggtgatgatgtcctag

SEQ ID NO: 144327 - DNA, 1086 bp, synthetic construct
  misc_feature 1..1086: note = Description of Artificial Sequence: Synthetic coding sequence
  source 1..1086: mol_type = other DNA
atggtgcacgccgaggccttcagccggcccctgagcagaaatgaggtggtgggcctcatcttccggctgaccatctttggagctgtgacctacttcaccatcaagtggatggtggatgccatcgaccccaccaggaagcagaaggtggaggcccagaagcaggccgagaagctgatgaagcagatcggcgtgaagaatgtgaagctgtctgaatatgagatgagcattgctgcccacctggtggaccccctgaacatgcacgtgacctggagcgacattgctggcctggatgatgtgatcacagacctgaaggacaccgtcatcctgcccatcaagaagaagcacctgtttgagaacagccggctgctgcagccccccaagggcgtgctgctgtatggccccccaggctgcggcaagaccctcatcgccaaggccacagccaaggaggccggctgccgcttcatcaacctgcagcccagcaccctgacagacaagtggtatggagagagccagaagctggccgctgctgtgttcagcctggccatcaagctgcagcccagcatcatcttcattgatgaaattgacagcttcctgaggaacagaagcagcagtgaccacgaggccacagccatgatgaaggcccagttcatgagcctgtgggatggcctggacacagaccacagctgccaggtgattgtgatgggcgccaccaaccggccccaggacctggacagcgccatcatgaggaggatgcccacccgcttccacatcaaccagcctgccctgaagcagcgggaggccatcctgaagctgatcctgaagaatgaaaatgtggacagacatgtggacctgctggaggtggcccaggagacagatggcttcagcggcagtgacctgaaggagatgtgcagagatgctgccctgctgtgtgtgcgggagtatgtgaacagcaccagcgaggagagccatgatgaagatgagatccggcctgtgcagcagcaggacctgcaccgggccatcgagaagatgaagaagagcaaggatgctgccttccagaatgtgctgacccacgtgtgcctggactag

SEQ ID NO: 144328 - DNA, 1086 bp, synthetic construct; identical to SEQ ID NO: 144327
  misc_feature 1..1086: note = Description of Artificial Sequence: Synthetic coding sequence
  source 1..1086: mol_type = other DNA

SEQ ID NO: 144329 - DNA, 822 bp, synthetic construct
  misc_feature 1..822: note = Description of Artificial Sequence: Synthetic coding sequence
  source 1..822: mol_type = other DNA
atgaagcagatcggcgtgaagaatgtgaagctgtctgaatatgagatgagcattgctgcccacctggtggaccccctgaacatgcacgtgacctggagcgacattgctggcctggatgatgtgatcacagacctgaaggacaccgtcatcctgcccatcaagaagaagcacctgtttgagaacagccggctgctgcagccccccaagggcgtgctgctgtatggccccccaggctgcggcaagaccctcatcgccaaggccacagccaaggaggccggctgccgcttcatcaacctgcagcccagcaccctgacagacaagtggtatggagagagccagaagctggccgctgctgtgttcagcctggccatcaagctgcagcccagcatcatcttcattgatgaaattgacagcttcctgaggaacagaagcagcagtgaccacgaggccacagccatgatgaaggcccagttcatgagcctgtgggatggcctggacacagaccacagctgccaggccctgaagcagcgggaggccatcctgaagctgatcctgaagaatgaaaatgtggacagacatgtggacctgctggaggtggcccaggagacagatggcttcagcggcagtgacctgaaggagatgtgcagagatgctgccctgctgtgtgtgcgggagtatgtgaacagcaccagcgaggagagccatgatgaagatgagatccggcctgtgcagcagcaggacctgcaccgggccatcgagaagatgaagaagagcaaggatgctgccttccagaatgtgctgacccacgtgtgcctggactag

SEQ ID NO: 144330 - DNA, 864 bp, synthetic construct
  misc_feature 1..864: note = Description of Artificial Sequence: Synthetic coding sequence
  source 1..864: mol_type = other DNA
atggtgcacgccgaggccttcagccggcccctgagcagaaatgaggtggtgggcctcatcttccggctgaccatctttggagctgtgacctacttcaccatcaagtggatggtggatgccatcgaccccaccaggaagcagaaggtggaggcccagaagcaggccgagaagctgatgaagcagatcggcgtgaagaatgtgaagctgtctgaatatgagatgagcattgctgcccacctggtggaccccctgaacatgcacgtgacctggagcgacattgctggcctggatgatgtgatcacagacctgaaggacaccgtcatcctgcccatcaagaagaagcacctgtttgagaacagccggctgctgcagccccccaagggcgtgctgctgtatggccccccaggctgcggcaagaccctcatcgccaaggccacagccaaggaggccggctgccgcttcatcaacctgcagcccagcaccctgacagacaagtggtatggagagagccagaagctggccgctgctgtgttcagcctggccatcaagctgcagcccagcatcatcttcattgatgaaattgacagcttcctgaggaacagaagcagcagtgaccacgaggccacagccatgatgaaggcccagttcatgagcctgtgggatggcctggacacagaccacagctgccaggtgattgtgatgggcgccaccaaccggccccaggacctggacagcgccatcatgaggaggatgcccacccgcttccacatcaaccagcctgccctgaagcagcgggaggccatcctgaagctgatcctgaagaatgaaaacctgaggaagctgaagccccgggaggtgctgtag

SEQ ID NO: 144331 - DNA, 4173 bp, synthetic construct
  misc_feature 1..4173: note = Description of Artificial Sequence: Synthetic coding sequence
  source 1..4173: mol_type = other DNA
atggtggtgctgcggagcagcctggagctgcacaaccacagcgctgccagcgccaccggcagcctggacctgagcagtgacttcctgagcctggagcacatcggcagaagaaggctgcggtctgctggggccgcccagaagaagccagctgccaccacagccaaggctggagatggcagctctgtgaaggaggtggagacctaccacaggacccgggccctgcggagcctgaggaaggatgcccagaacagcagtgacagcagctttgagaagaatgtggagatcacagagcagctggccaacggccgccacttcacccggcagctggcccggcagcaggccgacaagaagaaggaggagcaccgggaggacaaggtgattcctgtgaccaggagcctgcgggccaggaacatcgtgcagagcacagagcacctgcatgaagataatggagatgtggaggtgagaagaagctgccgcatccgcagccgctacagcggcgtgaaccagagcatgctgtttgacaagctgatcaccaacacagctgaggccgtgctgcagaagatggatgacatgaagaagatgaggcggcagaggatgagggagctggaggacctgggcgtcttcaatgaaacagaggagagcaacctgaacatgtacacccggggcaagcagaaggacatccagaggacagatgaggagaccacagacaaccaggagggctctgtggagagcagcgaggagggggaggaccaggagcatgaagatgatggagaagatgaagatgatgaagatgatgatgatgatgatgatgatgatgatgatgatgatgatgaagatgatgaagatgaggaggatggagaggaggagaaccagaagcgctactacctgcggcagaggaaggccaccgtgtactaccaggcccccctggagaagcccaggcaccagaggaagcccaacatcttctacagcggccctgccagccctgcccggccccgctaccgcctgagcagcgctggccccaggagcccctactgcaagaggatgaacagaagaagacatgccatccacagcagtgacagcaccagcagcagcagcagtgaagatgagcagcactttgagaggaggaggaagaggagcaggaacagagccatcaaccgctgcctgcccctgaacttcaggaaggatgagctgaagggcatctacaaggacaggatgaagattggagccagcctggctgatgtggaccccatgcagctggacagctctgtgcgctttgattctgtgggcggcctgagcaaccacatcgccgccctgaaggagatggtggtgttccccctgctgtacccagaggtgtttgagaagttcaagatccagcccccccggggctgcctcttctacggccccccaggcaccgggaagaccctggtggcccgggccctggccaatgaatgttcccagggcgacaagagggtggccttcttcatgaggaaaggagctgactgcctgagcaagtgggtgggggagagcgagcggcagctgcggctgctgtttgaccaggcctaccagatgaggcccagcatcatcttctttgatgaaattgatggcctggcccctgtgcgcagcagccggcaggaccagatccacagcagcatcgtgtccaccctgctggccctgatggatggcctggacagcagaggagagatcgtggtgattggagccaccaaccggctggacagcattgatcctgccctgcggcggcccggccgctttgaccgggagttcctgttcagcctgcctgacaaggaggccaggaaggagatcctgaagatccacacccgggactggaaccccaagcccctggacaccttcctggaggagctggccgagaactgtgtgggctactgtggggctgacatcaagagcatctgtgccgaggccgccctgtgtgccctgcggcggcgctacccccagatctacaccaccagcgagaagctgcagctggacctgagcagcatcaacatcagcgccaaggactttgaggtggccatgcagaagatgatcccagccagccagagagctgtgaccagccctggccaggccctgagcacagtggtgaagcccctgctgcagaacacagtggacaagatcctggaggccctgcagagggtcttcccccatgctgagttccgcaccaacaagaccctggacagcgacatcagctgccccctgctggagagtgacctggcctacagtgatgatgatgtgcccagcgtgtatgaaaatggcctgagccagaagagcagccacaaggccaaggacaacttcaacttcctgcacctgaacagaaatgcctgctaccagcccatgtccttccggccccgcatcctgattgtgggggagcccggcttcggccagggcagccacctggccccagctgtgattcatgccctggagaagttcaccgtgtacaccctggacatccctgtgctgtttggagtgtccaccaccagccctgaggagacctgtgcccaggtgatccgggaggccaagaggacagcccccagcatcgtgtatgtgccccacatccacgtgtggtgggagatcgtgggccccaccctgaaggccaccttcaccaccctgctgcagaacatccccagctttgcccctgtgctgctgctggccaccagtgacaagccccacagcgccctgcctgaggaggtgcaggagctgttcatccgggactatggagagatcttcaacgtgcagctgcctgacaaggaggagaggaccaagttctttgaggacctgatcctgaagcaggccgccaagccacccatcagcaagaagaaggctgtgctgcaggccctggaggtgctgcctgtggcccctcctcctgagcccaggagcctgacagctgaggaggtgaagaggctggaggagcaggaggaggacaccttccgggagctgcgcatcttcctgagaaatgtgacccaccggctggccatcgacaagcgcttccgggtcttcaccaagcctgtggaccctgatgaggtgcctgactatgtgaccgtcatcaagcagcccatggacctgagcagcgtcatcagcaagattgacctgcacaagtacctgactgtgaaggactacctgcgggacatcgacctgatctgcagcaatgccctggagtacaacccagaccgggaccccggggacaggctcatccgccaccgggcctgtgccctgcgggacacagcctatgccatcatcaaggaggagctggatgaagattttgagcagctgtgtgaggagatccaggagagcaggaagaagaggggctgcagcagcagcaaatatgcccccagctactaccacgtgatgcccaagcagaacagcaccctggtgggggacaagagaagtgaccctgagcagaatgagaagctgaagacccccagcacccctgtggcctgcagcaccccagcccagctgaagaggaagatcaggaagaagagcaactggtacctgggcaccatcaagaagaggaggaagatcagccaggccaaggatgacagccagaatgccatcgaccacaagattgaaagtgacacagaggagacccaggacacctctgtggaccacaatgaaacaggcaacacaggagagagctctgtggaggagaatgagaagcagcagaatgccagcgagagcaagctggagctgaggaacaacagcaacacctgcaacattgaaaatgagctggaggacagcaggaagaccacagcctgcacagagctgcgggacaagatcgcctgcaatggagatgccagcagcagccagatcatccacatcagtgatgaaaatgaaggcaaggagatgtgtgtgctgaggatgacccgggcccggcgcagccaggtggagcagcagcagctgatcaccgtggagaaggccctggccatcctgagccagcccacccccagcctggtggtggaccacgagcggctgaagaacctgctgaagacagtggtgaagaagagccagaactacaacatcttccagctggagaacctgtatgctgtgatcagccagtgcatctaccgccacaggaaggaccatgacaagaccagcctcatccagaagatggagcaggaggtggagaacttcagctgcagcaggtag

SEQ ID NO: 144332 - DNA, 1719 bp, synthetic construct
  misc_feature 1..1719: note = Description of Artificial Sequence: Synthetic coding sequence
  source 1..1719: mol_type = other DNA
tgaggagccctggccctggccgccccccggcgctgccggcagcccctgcccggccgggactgtgcccctggggcccccccagctggagctgtgtcccgggccggcagaattggcctcttccccagccctgtgtgcaccagcgctgctgtgcgcagcggcagcggctacgccaaggatgccctgaacctggcccagatgcaggagcagaccctgcagctggagcagcagagcaagctgaaggagtatgaggccgctgtggagcagctgaagtctgagcagatccgggcccaggccgaggagaggaggaagaccctgtctgaggagacccggcagcaccaggcccgggcccagtaccaggacaagctggcccggcagagatatgaggaccagctgaagcagcagcagctgctgaatgaggagaacctgaggaagcaggaggagagcgtgcagaagcaggaggccatgaggcgggccaccgtggagcgggagatggagctgcggcacaagaatgagatgctgcgggtggaggccgaggcccgggcccgggccaaggccgagcgggagaatgctgacatcatccgggagcagatccggctgaaggctgctgagcaccggcagacagtgctggagagcatcagaacagctggcaccctgtttggagagggcttccgggcctttgtgacagactgggacaaggtgacagccaccgtggccggcctgaccctgctggccgtgggcgtgtacagcgccaagaatgccaccctggtggccggccgcttcatcgaggcccggctgggcaagcccagcctggtgcgggagaccagccgcatcaccgtgctggaggccctgcggcaccccatccaggtgtcccggcggctgctgagccggccccaggatgccctggagggcgtggtgctgagccccagcctggaggcccgggtgcgggacatcgccatcgccaccaggaacaccaagaagaacagaagcctgtacagaaacatcctgatgtatggccccccaggcaccgggaagaccctgtttgccaagaagctggccctgcacagcggcatggactatgccatcatgactggaggagatgtggcccccatgggccgggagggcgtgacagccatgcacaagctgtttgactgggccaacaccagcagaagaggcctgctgctgtttgtggatgaagcagatgccttcctgaggaagagggccacagagaagatcagcgaggacctgcgggccaccctgaatgccttcctgtacagaacaggccagcacagcaacaagttcatgctggtgctggccagcaaccagcctgagcagtttgactgggccatcaatgaccgcatcaatgagatggtgcactttgacctgcccggccaggaggagcgggagcggctggtgaggatgtactttgacaagtatgtgctgaagccagccacagagggcaagcagaggctgaagctggcccagtttgattatggcaggaagtgcagcgaggtggcccggctgacagagggcatgagcggccgggagatcgcccagctggccgtgtcctggcaggccacagcctatgcctctgaagatggagtgctgacagaggccatgatggacaccagggtgcaggatgctgtgcagcagcaccagcagaagatgtgctggctgaaggccgagggccctggaagaggagatgagcccagccccagctag

SEQ ID NO: 144333 - DNA, 1905 bp, synthetic construct
  misc_feature 1..1905: note = Description of Artificial Sequence: Synthetic coding sequence
  source 1..1905: mol_type = other DNA
atgtcctggctgtttggcatcaacaagggccccaagggggagggcgccggccccccaccacccctgcccccagcccagcctggagctgagggcggcggggaccggggcctgggggacaggcctgcccccaaggacaagtggagcaactttgaccccaccggcctggagcgggccgccaaggccgcccgggagctggagcacagccgctatgccaaggatgccctgaacctggcccagatgcaggagcagaccctgcagctggagcagcagagcaagctgaagatgaggctggaggccctgagcctgctgcacaccctggtgtgggcctggagcctgtgcagagctggagctgtgcagacccaggagcggctgagcggcagcgccagccctgagcaggtgcctgctggggagtgctgtgccctgcaggagtatgaggccgctgtggagcagctgaagtctgagcagatccgggcccaggccgaggagaggaggaagaccctgtctgaggagacccggcagcaccaggcccgggcccagtaccaggacaagctggcccggcagagatatgaggaccagctgaagcagcagcagctgctgaatgaggagaacctgaggaagcaggaggagagcgtgcagaagcaggaggccatgaggcgggccaccgtggagcgggagatggagctgcggcacaagaatgagatgctgcgggtggaggccgaggcccgggcccgggccaaggccgagcgggagaatgctgacatcatccgggagcagatccggctgaaggctgctgagcaccggcagacagtgctggagagcatcagaacagctggcaccctgtttggagagggcttccgggcctttgtgacagactgggacaaggtgacagccaccgtggccggcctgaccctgctggccgtgggcgtgtacagcgccaagaatgccaccctggtggccggccgcttcatcgaggcccggctgggcaagcccagcctggtgcgggagaccagccgcatcaccgtgctggaggccctgcggcaccccatccaggtgtcccggcggctgctgagccggccccaggatgccctggagggcgtggtgctgagccccagcctggaggcccgggtgcgggacatcgccatcgccaccaggaacaccaagaagaacagaagcctgtacagaaacatcctgatgtatggccccccaggcaccgggaagaccctgtttgccaagaagctggccctgcacagcggcatggactatgccatcatgactggaggagatgtggcccccatgggccgggagggcgtgacagccatgcacaagctgtttgactgggccaacaccagcagaagaggcctgctgctgtttgtggatgaagcagatgccttcctgaggaagagggccacagagaagatcagcgaggacctgcgggccaccctgaatgccttcctgtacagaacaggccagcacagcaacaagttcatgctggtgctggccagcaaccagcctgagcagtttgactgggccatcaatgaccgcatcaatgagatggtgcactttgacctgcccggccaggaggagcgggagcggctggtgaggatgtactttgacaagtatgtgctgaagccagccacagagggcaagcagaggctgaagctggcccagtttgattatggcaggaagtgcagcgaggtggcccggctgacagagggcatgagcggccgggagatcgcccagctggccgtgtcctggcaggccacagcctatgcctctgaagatggagtgctgacagaggccatgatggacaccagggtgcaggatgctgtgcagcagcaccagcagaagatgtgctggctgaaggccgagggccctggaagaggagatgagcccagccccagctag

SEQ ID NO: 144334 - DNA, 1761 bp, synthetic construct
  misc_feature 1..1761: note = Description of Artificial Sequence: Synthetic coding sequence
  source 1..1761: mol_type = other DNA
atgtcctggctgtttggcatcaacaagggccccaagggggagggcgccggccccccaccacccctgcccccagcccagcctggagctgagggcggcggggaccggggcctgggggacaggcctgcccccaaggacaagtggagcaactttgaccccaccggcctggagcgggccgccaaggccgcccgggagctggagcacagccgctatgccaaggatgccctgaacctggcccagatgcaggagcagaccctgcagctggagcagcagagcaagctgaaggagtatgaggccgctgtggagcagctgaagtctgagcagatccgggcccaggccgaggagaggaggaagaccctgtctgaggagacccggcagcaccaggcccgggcccagtaccaggacaagctggcccggcagagatatgaggaccagctgaagcagcagcagctgctgaatgaggagaacctgaggaagcaggaggagagcgtgcagaagcaggaggccatgaggcgggccaccgtggagcgggagatggagctgcggcacaagaatgagatgctgcgggtggaggccgaggcccgggcccgggccaaggccgagcgggagaatgctgacatcatccgggagcagatccggctgaaggctgctgagcaccggcagacagtgctggagagcatcagaacagctggcaccctgtttggagagggcttccgggcctttgtgacagactgggacaaggtgacagccaccgtggccggcctgaccctgctggccgtgggcgtgtacagcgccaagaatgccaccctggtggccggccgcttcatcgaggcccggctgggcaagcccagcctggtgcgggagaccagccgcatcaccgtgctggaggccctgcggcaccccatccaggtgtcccggcggctgctgagccggccccaggatgccctggagggcgtggtgctgagccccagcctggaggcccgggtgcgggacatcgccatcgccaccaggaacaccaagaagaacagaagcctgtacagaaacatcctgatgtatggccccccaggcaccgggaagaccctgtttgccaagaagctggccctgcacagcggcatggactatgccatcatgactggaggagatgtggcccccatgggccgggagggcgtgacagccatgcacaagctgtttgactgggccaacaccagcagaagaggcctgctgctgtttgtggatgaagcagatgccttcctgaggaagagggccacagagaagatcagcgaggacctgcgggccaccctgaatgccttcctgtacagaacaggccagcacagcaacaagttcatgctggtgctggccagcaaccagcctgagcagtttgactgggccatcaatgaccgcatcaatgagatggtgcactttgacctgcccggccaggaggagcgggagcggctggtgaggatgtactttgacaagtatgtgctgaagccagccacagagggcaagcagaggctgaagctggcccagtttgattatggcaggaagtgcagcgaggtggcccggctgacagagggcatgagcggccgggagatcgcccagctggccgtgtcctggcaggccacagcctatgcctctgaagatggagtgctgacagaggccatgatggacaccagggtgcaggatgctgtgcagcagcaccagcagaagatgtgctggctgaaggccgagggccctggaagaggagatgagcccagccccagctag

SEQ ID NO: 144335 - DNA, 792 bp, synthetic construct
  misc_feature 1..792: note = Description of Artificial Sequence: Synthetic coding sequence
  source 1..792: mol_type = other DNA
atgtatggccccccaggcaccgggaagaccctgtttgccaagaagctggccctgcacagcggcatggactatgccatcatgactggaggagatgtggcccccatgggccgggagggcgtgacagccatgcacaagctgtttgactgggccaacaccagccggcggggcctgctgctgtttgtggatgaagcagatgccttcctgaggaagagggccacagagaagatcagcgaggacctgcgggccaccctgaatgccttcctgtacagaacaggccagcacagcaacaaccccagccacgtgtcccatggaggcagcagccctgctggccggccctggctgaccccccaggcccgctgggccccccgcttcatgctggtgctggccagcaaccagcctgagcagtttgactgggccatcaatgaccgcatcaatgagatggtgcactttgacctgcccggccaggaggagcgggagcggctggtgaggatgtactttgacaagtatgtgctgaagccagccacagagggcaagcagaggctgaagctggcccagtttgattatggcaggaaatgttctgaggtggcccggctgacagagggcatgagcggccgggagatcgcccagctggccgtgtcctggcaggccacagcctatgcctctgaagatggagtgctgacagaggccatgatggacaccagggtgcaggatgctgtgcagcagcaccagcagaagatgtgctggctgaaggccgagggccctggaagaggagatgagcccagccccagctag

SEQ ID NO: 144336 - DNA, 606 bp, synthetic construct
  misc_feature 1..606: note = Description of Artificial Sequence: Synthetic coding sequence
  source 1..606: mol_type = other DNA
aagctggccctgcacagcggcatggactatgccatcatgactggaggagatgtggcccccatgggccgggagggcgtgacagccatgcacaagctgtttgactgggccaacaccagccggcggggcctgctgctgtttgtggatgaagcagatgccttcctgaggaagagggccacagagaagatcagcgaggacctgcgggccaccctgaatgccttcctgtacagaacaggccagcacagcaacaaccccagccacgtgtcccatggaggcagcagccctgctggccggccctggctgaccccccaggcccgctgggccccccgcttcatgctggtgctggccagcaaccagcctgagcagtttgactgggccatcaatgaccgcatcaatgagatggtgcactttgacctgcccggccaggaggagcgggagcggctggtgaggatgtactttgacaagtatgtgctgaagccagccacagagggcaagcagaggctgaagctggcccagtttgattatggcaggaaatgttctgaggtggcccggctgacagagggcatgagcggccgggagatcgcccagctggccgtgtcctggcagtag

SEQ ID NO: 144337 - DNA, 435 bp, synthetic construct
  misc_feature 1..435: note = Description of Artificial Sequence: Synthetic coding sequence
  source 1..435: mol_type = other DNA
atgtgcctgtgccggcccctgctgccccagagggcccagtaccaggacaagctggcccggcagagatatgaggaccagctgaagcagcagcagctgctgaatgaggagaacctgaggaagcaggaggagagcgtgcagaagcaggaggccatgaggcgggccaccgtggagcgggagatggagctgcggcacaagaatgagatgctgcgggtggaggccgaggcccgggcccgggccaaggccgagcgggagaatgctgacatcatccgggagcagatccggctgaaggctgctgagcaccggcagacagtgctggagagcatcagaacagctggcaccctgtttggagagggcttccgggcctttgtgacagactgggacaaggtgacagccaccgtggccggcctgaccctgctggccgtgggcgtgtactag

SEQ ID NO: 144338 - DNA, 309 bp, synthetic construct
  misc_feature 1..309: note = Description of Artificial Sequence: Synthetic coding sequence
  source 1..309: mol_type = other DNA
atgaggctggaggccctgagcctgctgcacaccctggtgtgggcctggagcctgtgcagagctggagctgtgcagacccaggagcggctgagcggcagcgccagccctgagcaggtgcctgctggggagtgctgtgccctgcaggagtatgaggccgctgtggagcagctgaagtctgagcagatccgggcccaggccgaggagaggaggaagaccctgtctgaggagacccggcagcaccaggcccgggcccagtaccaggacaagctggcccggcagagatatgaggaccagctgaagcagcagtag

SEQ ID NO: 144339 - DNA, 1524 bp, synthetic construct
  misc_feature 1..1524: note = Description of Artificial Sequence: Synthetic coding sequence
  source 1..1524: mol_type = other DNA
atgcaggagcagaccctgcagctggagcagcagagcaagctgaaggagtatgaagctgctgtggagcagctgaagtctgagcagatccgggcccaggccgaggagaggaggaagaccctgtctgaggagacccggcagcaccaggcccgggcccagtaccaggacaagctggcccggcagagatatgaggaccagctgaagcagcagcagctgctgaatgaggagaacctgaggaagcaggaggagagcgtgcagaagcaggaggccatgagaagagccaccgtggagcgggagatggagctgcggcacaagaatgagatgctgcgggtggaggccgaggcccgggcccgggccaaggccgagagagaaaatgctgacatcatccgggagcagatccggctgaaggctgctgagcaccggcagacagtgctggagagcatcagaacagctggcaccctgtttggagagggcttccgggcctttgtgacagactgggacaaggtgacagccaccgtggccggcctgaccctgctggccgtgggcgtgtacagcgccaagaatgccaccctggtggccggccgcttcatcgaggcccggctgggcaagcccagcctggtgcgggagaccagccgcatcaccgtgctggaggccctgcggcaccccatccaggtgtcccggcggctgctgagccggccccaggatgccctggagggcgtggtgctgagccccagcctggaggcccgggtgcgggacatcgccatcgccaccaggaacaccaagaagaacagaagcctgtacagaaacatcctgatgtatggccccccaggcaccgggaagaccctgtttgccaagaagctggccctgcacagcggcatggactatgccatcatgactggaggagatgtggcccccatgggccgggagggcgtgacagccatgcacaagctgtttgactgggccaacaccagccggcggggcctgctgctgtttgtggatgaagcagatgccttcctgaggaagagggccacagagaagatcagcgaggacctgcgggccaccctgaatgccttcctgtacagaacaggccagcacagcaacaagttcatgctggtgctggccagcaaccagcctgagcagtttgactgggccatcaatgaccgcatcaatgagatggtgcactttgacctgcccggccaggaggagcgggagcggctggtgaggatgtactttgacaagtatgtgctgaagccagccacagagggcaagcagaggctgaagctggcccagtttgattatggcaggaaatgttctgaggtggcccggctgacagagggcatgagcggccgggagatcgcccagctggccgtgtcctggcaggccacagcctatgcctctgaagatggagtgctgacagaggccatgatggacaccagggtgcaggatgctgtgcagcagcaccagcagaagatgtgctggctgaaggccgagggccctggaagaggagatgagcccagccccagctag

SEQ ID NO: 144340 - DNA, 1947 bp, synthetic construct
  misc_feature 1..1947: note = Description of Artificial Sequence: Synthetic coding sequence
  source 1..1947: mol_type = other DNA
atgtcctggctgtttggagtgaacaagggccccaagggggagggcgccggccccccaccacccctgcccccagcccagcctggagctgagggcggcggggaccggggcctgggggacaggcctgcccccaaggacaagtggagcaactttgaccccaccggcctggagcgggccgccaaggccgcccgggagctggagcacagccgctatgccaaggaggccctgaacctggcccagatgcaggagcagaccctgcagctggagcagcagagcaagctgaaggagtatgaggccgctgtggagcagctgaagtctgagcagatccgggcccaggccgaggagaggaggaagaccctgtctgaggagacccggcagcaccaggcccgggcccagtaccaggacaagctggcccggcagagatatgaggaccagctgaagcagcagcagctgctgaatgaggagaacctgaggaagcaggaggagagcgtgcagaagcaggaggccatgaggcgggccaccgtggagcgggagatggagctgcggcacaagaatgagatgctgcgggtggagacagaggcccgggcccgggccaaggccgagcgggagaatgctgacatcatccgggagcagatccggctgaaggccagcgagcaccggcagacagtgctggagagcatcagaacagctggcaccctgtttggagagggcttccgggcctttgtgacagaccgggacaaggtgacagccaccgtggccggcctgaccctgctggccgtgggcgtgtacagcgccaagaatgccacagctgtgacaggccgcttcatcgaggcccggctgggcaagcccagcctggtgcgggagaccagccgcatcaccgtgctggaggccctgcggcaccccatccaggtgtcccggcggctgctgagccggccccaggatgtgctggagggcgtggtgctgagccccagcctggaggcccgggtgcgggacatcgccatcgccaccaggaacaccaagaagaacagaggcctgtaccgccacatcctgctgtatggccccccaggcaccgggaagaccctgtttgccaagaagctggccctgcacagcggcatggactatgccatcatgactggaggagatgtggcccccatgggccgggagggcgtgacagccatgcacaagctgtttgactgggccaacaccagcagaagaggcctgctgctcttcatggatgaagcagatgccttcctgaggaagagggccacagaggagatcagcaaggacctgcgggccaccctgaatgccttcctgtaccacatgggccagcacagcaacaagttcatgctggtgctggccagcaacctgcctgagcagtttgactgtgccatcaacagcagaattgatgtgatggtgcactttgacctgccccagcaggaggagcgggagcggctggtgcggctgcactttgacaactgtgtgctgaagccagccacagagggcaagaggcggctgaagctggcccagtttgattatggcaggaagtgcagcgaggtggcccggctgacagagggcatgagcggccgggagatcgcccagctggccgtgtcctggcaggccacagcctatgccagcaaggatggagtgctgacagaggccatgatggatgcctgtgtgcaggatgctgtgcagcagtaccggcagaagatgcgctggctgaaggccgagggccctggccggggcgtggagcaccccctgagcggcgtgcagggcgagaccctgacctcctggagcctggccacagaccccagctacccctgcctggccggcccctgcaccttccgcatctgctcctggatgggcaccggcctgtgccccggccccctgagccccaggatgagctgtggcggcggccggcccttctgccccccaggccaccccctgctgtag

SEQ ID NO: 144341 - DNA, 900 bp, synthetic construct
  misc_feature 1..900: note = Description of Artificial Sequence: Synthetic coding sequence
  source 1..900: mol_type = other DNA
atgtcctggctgtttggagtgaacaagggccccaagggggagggcgccggccccccaccacccctgcccccagcccagcctggagctgagggcggcggggaccggggcctgggggacaggcctgcccccaaggacaagtggagcaactttgaccccaccggcctggagcgggccgccaaggccgcccgggagctggagcacagccgctatgccaaggaggccctgaacctggcccagatgcaggagcagaccctgcagctggagcagcagagcaagctgaagcagctgctgaatgaggagaacctgaggaagcaggaggagagcgtgcagaagcaccggcagacagtgctggagagcatcagaacagctggcaccctgtttggagagggcttccgggcctttgtgacagaccgggacaaggtgacagccaccgtggccggcctgaccctgctggccgtgggcgtgtacagcgccaagaatgccacagctgtgacaggccgcttcatcgaggcccggctgggcaagcccagcctggtgcgggagaccagccgcatcaccgtgctggaggccctgcggcaccccatccagcaggtgtcccggcggctgctgagccggccccaggatgtgctggagggcgtggtgctgagccccagcctggaggcccgggtgcgggacatcgccatcgccaccaggaacaccaagaagaacagaggcctgtaccgccacatcctgctgtatggccccccaggcaccgggaagaccctgtttgccaagaagctggccctgcacagcggcatggactatgccatcatgactggaggagatgtggcccccatgggccgggagggcgtgacagccatgcacaagctgtttgactgggccaacaccagcagaagatag

SEQ ID NO: 144342 - DNA, 351 bp, synthetic construct
  misc_feature 1..351: note = Description of Artificial Sequence: Synthetic coding sequence
  source 1..351: mol_type = other DNA
atgaggcgggccaccgtggagcgggagatggagctgcggcacaagaatgagatgctgcgggtggagacagaggcccgggcccgggccaaggccgagcgggagaatgctgacatcatccgggagcagatccggctgaaggccagcgagcaccggcagacagtgctggagagcatcagaacagctggcaccctgtttggagagggcttccgggcctttgtgacagaccgggacaaggtgacagccaccgtgaacatcttcatcaagcagggctggcaggtggccgagcggcagcacttcagaagaagacgctgggccgaccacgaggtgcggcgcagccgcagctcctggtag

SEQ ID NO: 144343 - DNA, 1449 bp, synthetic construct
  misc_feature 1..1449: note = Description of Artificial Sequence: Synthetic coding sequence
  source 1..1449: mol_type = other DNA
atgctgcgggtggagacagaggcccgggcccgggccaaggccgagagagaaaatgctgacatcatccgggagcagatccggctgaaggccagcgagcaccggcagacagtgctggagagcatcagaacagctggcaccctgtttggagagggcttccgggcctttgtgacagaccgggacaaggtgacagccaccgtggccggcctgaccctgctggccgtgggcgtgtacagcgccaagaatgccacagctgtgacaggccgcttcatcgaggcccggctgggcaagcccagcctggtgcgggagaccagccgcatcaccgtgctggaggccctgcggcaccccatccaggtgtcccggcggctgctgagccggccccaggatgtgctggagggcgtggtgctgtctgtgagccccagcctggaggcccgggtgcgggacatcgccatcgccaccaggaacaccaagaagaacagaggcctgtaccgccacatcctgctgtatggccccccaggcaccgggaagaccctgtttgccaagaagctggccctgcacagcggcatggactatgccatcatgactggaggagatgtggcccccatgggccgggagggcgtgacagccatgcacaagctgtttgactgggccaacaccagccggcggggcctgcaggaggagatcagcaaggacctgcgggccaccctgaatgccttcctgtaccacatgggccagcacagcaacaaccgcttcatgctggtgctggccagcaacctgcctgagcagtttgactgtgccatcaacagcagaattgatgtgatggtgcactttgacctgccccagcaggaggagcgggagcggctggtgcggctgcactttgacaactgtgtgctgaagccagccacagagggcaagaggatgggcgtgggccagctgcccgtcttccggcccccacctcatggagtgggcagcgctgccctggccgccagcctgggcaacagcttcccccggcggctgaagctggcccagtttgattatggcaggaagtgcagcgaggtggcccggctgacagagggcatgagcggccgggagatcgcccagctggccgtgtcctggcaggccacagcctatgccagcaaggatggagtgctgacagaggccatgatggatgcctgtgtgcaggatgctgtgcagcagtaccggcagaagatgcgctggctgaaggccgagggccctggccggggcgtggagcaccccctgagcggcgtgcagggcgagaccctgacctcctggagcctggccacagaccccagctacccctgcctggccggcccctgcaccttccgcatctgctcctggatgggcaccggcctgtgccccggccccctgagccccaggatgagctgtggcggcggccggcccttctgccccccaggccaccccctgctgtag

SEQ ID NO: 144344 - DNA, 354 bp, synthetic construct
  misc_feature 1..354: note = Description of Artificial Sequence: Synthetic coding sequence
  source 1..354: mol_type = other DNA
atgaggcgggccaccgtggagcgggagatggagctgcggcacaagaatgagatgctgcgggtggagacagaggcccgggcccgggccaaggccgagcgggagaatgctgacatcatccgggagcagatccggctgaaggccagcgagcaccggcagacagtgctggagagcatcagaacagctggcaccctgtttggagagggcttccgggcctttgtgacagaccgggacaaggtgacagccaccgtgaacatcttcatcaagcagggctggcaggtggccgagcggcagcaccacttcagaagaagacgctgggccgaccacgaggtgagaagaagccgcagctcctggtag

SEQ ID NO: 144345 - DNA, 5535 bp, synthetic construct
  misc_feature 1..5535: note = Description of Artificial Sequence: Synthetic coding sequence
  source 1..5535: mol_type = other DNA
atggtgggcgtgctggccatggctgctgctgctgcccctcctcctgtgaaggactgtgaaattgagccctgcaagaagaggaagaaggatgatgacaccagcacctgcaagaccatcaccaagtacctgagccccctgggcaagacccgggacagagtgtttgccccacccaagcccagcaacatcctggactacttcaggaagaccagccccaccaatgagaagacccagctgggcaaggagtgcaagatcaagagccctgagagcgtgcctgtggacagcaacaaggactgcaccacccccctggagatgttcagcaatgtggagttcaagaagaagaggaagagggtgaacctgagccaccagctgaacaacatcaagacagaaaatgaggcccccatcgagatcagcagtgatgacagcaaagaagactacagcctgaacaatgactttgtggagagcagcacctctgtgctgcgctacaagaagcaggtggaggtgctggccgagaacatccaggacaccaagagccagcccaacaccatgaccagcctgcagaacagcaagaaggtgaaccccaagcagggcaccaccaagaatgacttcaagaagctgaggaagaggaaatgtagagatgtggtggacctgtctgagagcctgcccctggccgaggagctgaacctgctgaagaaggatggcaaggacaccaagcagatggagaacaccaccagccacgccaacagccgggacaacgtgacagaagctgcccagctgaatgacagcatcatcaccgtgtcctatgaggagttcctgaagagccacaaggagaacaaggtggaggagatcccagacagcaccatgagcatctgtgtgcccagcgagaccgtggatgaaattgtgaagagcggctacatcagcgagagtgaaaattctgagatcagccagcaggtgcgcttcaagacagtgacagtgctggcccaggtgcaccccatcccccccaagaagacaggcaagatcccccgcatcttcctgaagcagaagcagtttgagatggagaacagcctgagtgaccctgaaaatgagcagacagtgcagaagaggaagagcaatgtggtgatccaggaggaggagctggagctggccgtgctggaggccggcagcagcgaggccgtgaagcccaagtgcaccctggaggagcggcagcagttcatgaaggccttccggcagcctgccagtgatgccctgaagaatggagtgaagaagagcagtgacaagcagaaggacctgaatgagaagtgcctgtatgaggtgggcagagatgacaacagcaagaagatcatggagaacagcggcatccagatggtgtccaagaatggaaacctgcagctgcacacagacaagggcagcttcctgaaggagaagaacaagaagctgaagaagaagaacaagaagaccctggacaccggggccatccctgggaagaaccgggagggcaacacccagaagaaggagaccaccttcttcctgaaggagaagcagtaccagaacaggatgagcctgcggcagaggaagacagagttcttcaagagcagcaccctcttcaacaatgaaagcctggtgtatgaggacatcgccaatgatgacctgctgaaggtgagcagcctgtgcaacaacaacaagctgagcaggaagaccagcatccctgtgaaggacatcaagctgacccagagcaaggccgagagcgaggccagcctgctgaatgtgtccacccccaagagcaccaggagaagtggccgcatcagcagcacccccaccacagagaccatccggggcatcgacagtgatgatgtgcaggacaacagccagctgaaggccagcacccagaaggccgccaacctgtctgagaagcacagcctgtacacagctgagctgatcaccgtgccctttgattctgagagccccatccgcatgaagttcacccgcatcagcacccccaagaagagcaagaagaagagcaacaagaggtctgagaagtctgaggccacagatggcggcttcaccagccagatcaggaaggccagcaacaccagcaagaacatcagcaaggccaagcagctgattgagaaggccaaggccctgcacatcagccgcagcaaggtgacagaggagatcgccatccccctgcggcgcagcagccgccaccagaccctgcctgagaggaagaagctgtctgaaacagaagattctgtcatcatcatcgacagcagccccacagccctgaagcaccctgagaagaaccagaagaagctgcagtgcctgaatgatgtgctgggcaagaagctgaacaccagcaccaagaatgtgcctgggaagatgaaggtggcccccctcttcctggtgaggaaggcccagaaggctgctgaccctgtgcccagctttgatgagagcagccaggacaccagcgagaagagccaggactgtgatgtgcagtgcaaggccaagagggacttcctgatgagcggcctgcctgacctgctgaagaggcagatcgccaagaaggctgctgccctggatgtgtacaatgctgtgtccaccagcttccagagggtggtgcacgtgcagcagaaggatgatggctgctgcctgtggcacctgaagccacccagctgccccctgctgaccaagttcaaggagctgaacaccaaggtgattgacctgagcaaatgtggcatcgccctgggggagttcagcaccctgaacagcaagctgaagagcggcaacagcgctgctgtgttcatgaggaccaggaaggagttcacagaggaggtgaggaacctgctgctggaggagatccgctggagcaaccctgagttcagcctgaagaagtacttccccctgctgctgaagaagcagatcgagcaccaggtgctgagcagcgagtgccacagcaagcaggagctggaggctgatgtgagccacaaggagaccaagaggaagctggtggaggccgagaacagcaagagcaagaggaagaagcccaatgagtacagcaagaacctggagaagaccaacaggaagtctgaggagctgagcaagaggaacaacagcagcggcatcaagctggacagcagcaaggacagcggcacagaggacatgctgtggacagagaagtaccagccccagacagccagcgagctgattggaaatgagctggccatcaagaagctgcacagctggctgaaggactggaagagaagagctgagctggaggagcggcagaacctgaagggcaagagagatgagaagcatgaggacttcagcggcggcatcgacttcaagggcagcagtgatgatgaggaggagagccggctgtgcaacacagtgctgatcaccggccccaccggggtgggcaagacagctgctgtgtatgcctgtgcccaggagctgggcttcaagatctttgaggtgaatgccagcagccagaggagcggccggcagatcctgagccagctgaaggaggccacccagagccaccaggtggacaagcagggcgtgaacagccagaagccctgcttcttcaacagctactacatcggcaagagccccaagaagatcagcagccccaagaaggtggtgaccagccccaggaaggtgcccccacccagccccaagagcagcggccccaagagggccctgccccccaagaccctggccaactacttcaaggtgagccccaagcccaagaacaatgaggagatcggcatgctgctggagaacaacaagggcatcaagaacagctttgagcagaagcagatcacccagaccaagagcaccaatgccaccaacagcaatgtgaaggatgtgggcgctgaggagcccagcaggaagaatgccaccagcctcatcctgtttgaggaggtggatgtgatctttgatgaagatgctggcttcctgaatgccatcaagaccttcatggccaccaccaagaggcctgtgatcctgaccaccagtgaccccaccttcagcctgatgtttgatggctgctttgaggagatcaagttcagcacccccagcctgctgaatgtggccagctacctgcagatgatctgcctgacagagaacttcagaacagatgtgaaggactttgtgaccctgctgacagccaacacctgtgacatcaggaagagcatcctgtacctgcagttctggatccgcagcggcggcggcgtgctggaggagcggcccctgaccctgtaccggggcaacagcagaaatgtgcagctggtgtgcagcgagcacggcctggacaacaagatctaccccaagaacaccaagaagaagagggtggacctgcccaagtgtgacagcggctgtgccgagaccctgtttggcctgaagaacatcttcagccccagtgaagatctcttctccttcctgaagcacaagatcaccatgaaggaggagtggcacaagttcatccagctgctgacagagttccagatgagaaatgtggacttcctgtacagcaacctggagttcatcctgcccctgcctgtggacaccatccctgagaccaagaacttctgtggccccagcgtgacagtggatgccagcgctgccaccaagtccatgaactgcctggccaggaagcacagcgagcgggagcagcccctgaagaagagccagaagaagaagcagaagaagaccctggtgatcctggatgacagcgacctgtttgacacagacctggacttcccagaccagagcatcagcctgagctctgtgagcagcagcagcaatgctgaggagagcaagacaggagatgaggagagcaaggcccgggacaagggcaacaaccctgagaccaagaagagcatcccctgcccccccaagaccacagctgggaagaagtgcagcgccctggtgagccactgcctgaacagcctgtctgagttcatggacaacatgtccttcctggatgccctgctgacagatgtgcgggagcagaacaagtatggaagaaatgacttctcctggaccaacgggaaggtgaccagcggcctgtgtgatgagttcagcctggagagcaatgatggctggaccagccagagcagtggagagctgaaggctgctgctgaggccctgtccttcaccaagtgcagcagcgccatcagcaaggccctggagaccctgaacagctgcaagaagctgggccgggaccccaccaatgacctgaccttctacgtgtcccagaagagaaataatgtgtacttcagccagagcgctgccaacctggacaatgcctggaagaggatcagcgtcatcaagtctgtgttcagcagccgcagcctgctgtatgtgggcaaccggcaggccagcatcatcgagtacctgcccaccctgaggaacatctgcaagacagagaagctgaaggagcagggcaagagcaagaggcgcttcctgcactactttgagggcatccacctggacatccccaaggagaccgtgaacaccctggccgctgacttcccctag

SEQ ID NO: 144346 - DNA, 3543 bp, synthetic construct
  misc_feature 1..3543: note = Description of Artificial Sequence: Synthetic coding sequence
  source 1..3543: mol_type = other DNA
atgtctgctgacagcagccccctggtgggcagcacccccaccggctacggcaccctgaccatcggcaccagcattgaccccctgagcagctctgtgtcctctgtgcggctgagcggctactgcggcagcccctggagggtcatcggctaccacgtggtggtgtggatgatggccggcatccccctgctgctcttccgctggaagcccctgtggggcgtgcggctgcggctgcggccctgcaacctggcccatgctgagaccctggtgattgagatccgggacaaggaggacagctcctggcagctgttcaccgtgcaggtgcagacagaggccatcggggagggcagcctggagcccagcccccagagccaggccgaggatggccgcagccaggccgctgtgggcgctgtgcctgagggcgcctggaaggacacagcccagctgcacaagtctgaggaggccgtgtctgtgggccagaagagggtgctgcgctactacctgttccagggccagcgctacatctggattgagacccagcaggccttctaccaggtgtccctgctggaccacggccgcagctgtgatgatgtgcacaggagccgccacggcctgagcctgcaggaccagatggtgaggaaggccatctacggccccaacgtcatcagcatccctgtgaagagctacccccagctgctggtggatgaggccctgaacccctactacggcttccaggccttcagcatcgccctgtggctggccgaccactactactggtacgccctgtgcatcttcctgatcagcagcatcagcatctgcctgagcctgtacaagaccaggaagcagagccagaccctgcgggacatggtgaagctgtccatgagggtgtgtgtgtgcaggcctggaggagaggaggagtgggtggacagcagcgagctggtgcctggggactgcctggtgctgccccaggagggcggcctgatgccctgtgatgctgccctggtggccggggagtgcatggtgaatgaaagcagcctgaccggggagagcatccctgtgctgaagacagccctgcctgagggcctgggcccctactgtgccgagacccaccggcggcacaccctcttctgtggcaccctcatcctgcaggcccgggcctacgtgggcccccacgtgctggccgtggtgaccaggacaggcttctgcacagccaagggcggcctggtgagcagcatcctgcacccccggcccatcaacttcaagttctacaagcacagcatgaagtttgtggccgccctgtctgtgctggccctgctgggcaccatctacagcatcttcatcctgtacagaaacagagtgcccctgaatgaaattgtcatccgggccctggacctggtgacagtggtggtgcccccagccctgcctgctgccatgacagtgtgcaccctgtatgcccagagccggctgcggcggcagggcatcttctgcatccaccccctgcgcatcaacctgggcggcaagctgcagctggtgtgctttgacaagacaggcaccctgacagaagatggcctggatgtgatgggcgtggtgcccctgaagggccaggccttcctgcccctggtgcctgagccccggcggctgcctgtgggccccctgctgcgggccctggccacctgccacgccctgagccggctgcaggacacccctgtgggggaccccatggacctgaagatggtggagagcacaggctgggtgctggaggaggagcctgctgctgacagcgccttcggcacccaggtgctggccgtgatgaggcctcccctgtgggagccccagctgcaggccatggaggagccccctgtgcctgtgtctgtgctgcaccgcttccccttcagcagcgccctgcagaggatgtctgtggtggtggcctggccaggggccacccagcctgaggcctacgtgaagggcagccctgagctggtggccggcctgtgcaaccctgagaccgtgcccacagactttgcccagatgctgcagagctacacagctgctggctacagagtggtggccctggccagcaagcccctgcccaccgtgcccagcctggaggccgcccagcagctgacccgggacacagtggagggggacctgagcctgctgggcctgctggtgatgaggaacctgctgaagccccagaccacccctgtgatccaggccctgcggaggacccgcatccgggctgtgatggtgactggagacaacctgcagacagctgtgacagtggcccggggctgcggcatggtggccccccaggagcacctgatcatcgtgcacgccacccaccctgagcggggccagcctgccagcctggagttcctgcccatggagagccccacagctgtgaatggagtgaaggaccctgaccaggccgccagctacacagtggagccagaccccaggagccgccacctggccctgagcggccccaccttcggcatcatcgtgaagcacttccccaagctgctgcccaaggtgctggtgcagggcaccgtgtttgccaggatggcccctgagcagaagacagagctggtgtgtgagctgcagaagctgcagtactgtgtgggcatgtgtggagatggagccaatgactgtggggccctgaaggctgctgatgtgggcatcagcctgagccaggccgaggcctctgtggtgagccccttcaccagctccatggccagcattgaatgtgtgcccatggtgatccgggagggccgctgcagcctggacaccagcttcagcgtcttcaagtacatggccctgtacagcctgacccagttcatctctgtgctgatcctgtacaccatcaacaccaacctgggggacctgcagttcctggccatcgacctggtgatcaccaccaccgtggccgtgctgatgagcaggactggacctgccctggtgctgggccgggtgcggcccccaggggccctgctgtctgtgcctgtgctgagcagcctgctgctgcagatggtgctggtgactggagtgcagctgggcggctacttcctgaccctggcccagccctggtttgtgcccctgaacagaacagtggccgccccagacaacctgcccaactatgagaacacagtggtgttcagcctgagcagcttccagtacctgatcctggccgctgctgtgtccaaaggagcccccttccggcggcccctgtacaccaacgtgcccttcctggtggccctggccctgctgagctctgtgctggtgggcctggtgctggtgcccggcctgctgcagggccccctggccctgaggaacatcacagacaccggcttcaagctgctgctgctgggcctggtgaccctgaactttgtgggcgccttcatgctggagagcgtgctggaccagtgcctgcctgcctgcctgcggcggctgcggcccaagagggccagcaagaagcgcttcaagcagctggagcgggagctggccgagcagccctggccacccctgcctgctggccccctgaggtag

SEQ ID NO: 144347 - DNA, 3477 bp, synthetic construct
  misc_feature 1..3477: note = Description of Artificial Sequence: Synthetic coding sequence
  source 1..3477: mol_type = other DNA
atgtctgctgacagcagccccctggtgggcagcacccccaccggctacggcaccctgaccatcggcaccagcattgaccccctgagcagctctgtgtcctctgtgcggctgagcggctactgcggcagcccctggagggtcatcggctaccacgtggtggtgtggatgatggccggcatccccctgctgctcttccgctggaagcccctgtggggcgtgcggctgcggctgcggccctgcaacctggcccatgctgagaccctggtgattgagatccgggacaaggaggacagctcctggcagctgttcaccgtgcaggtgcagacagaggccatcggggagggcagcctggagcccagcccccagagccaggccgaggatggccgcagccaggccgctgtgggcgctgtgcctgagggcgcctggaaggacacagcccagctgcacaagtctgaggaggccaagagggtgctgcgctactacctgttccagggccagcgctacatctggattgagacccagcaggccttctaccaggtgtccctgctggaccacggccgcagctgtgatgatgtgcacaggagcagacatggcctgagcctgcaggaccagatggtgaggaaggccatctacggccccaacgtcatcagcatccctgtgaagagctacccccagctgctggtggatgaggccctgaacccctactacggcttccaggccttcagcatcgccctgtggctggccgaccactactactggtacgccctgtgcatcttcctgatcagcagcatcagcatctgcctgagcctgtacaagaccaggaagcagagccagaccctgcgggacatggtgaagctgtccatgagggtgtgtgtgtgcaggcctggaggagaggaggagtgggtggacagcagcgagctggtgcctggggactgcctggtgctgccccaggagggcggcctgatgccctgtgatgctgccctggtggccggggagtgcatggtgaatgaaagcagcctgactggagagagcatccctgtgctgaagacagccctgcctgagggcctgggcccctactgtgccgagacccacagaagacacaccctcttctgtggcaccctcatcctgcaggcccgggcctacgtgggcccccacgtgctggccgtggtgaccaggacaggcttctgcacagccaagggcggcctggtgagcagcatcctgcacccccggcccatcaacttcaagttctacaagcacagcatgaagtttgtggccgccctgtctgtgctggccctgctgggcaccatctacagcatcttcatcctgtacagaaacagagtgcccctgaatgagatcgtcatccgggccctggacctggtgacagtggtggtgcccccagccctgcctgctgccatgacagtgtgcaccctgtatgcccagagccggctgcggcggcagggcatcttctgcatccaccccctgcgcatcaacctgggcggcaagctgcagctggtgtgctttgacaagacaggcaccctgacagaagatggcctggatgtgatgggcgtggtgcccctgaagggccaggccttcctgcccctggtgcctgagccccggcggctgcctgtgggccccctgctgcgggccctggccacctgccacgccctgagccggctgcaggacacccctgtgggggaccccatggacctgaagatggtggagagcacaggctgggtgctggaggaggagcctgctgctgacagcgccttcggcacccaggtgctggccgtgatgaggcctcccctgtgggagccccagctgcaggccatggaggagccccctgtgcctgtgtctgtgctgcaccgcttccccttcagcagcgccctgcagaggatgtctgtggtggtggcctggccaggggccacccagcctgaggcctacgtgaagggcagccctgagctggtggccggcctgtgcaaccctgagaccgtgcccacagactttgcccagatgctgcagagctacacagctgctggctacagagtggtggccctggccagcaagcccctgcccaccgtgcccagcctggaggccgcccagcagctgacccgggacacagtggagggggacctgagcctgctgggcctgctggtgatgaggaacctgctgaagccccagaccacccctgtgatccaggccctgcggaggacccgcatccgggctgtgatggtgactggagacaacctgcagacagctgtgacagtggcccggggctgcggcatggtggccccccaggagcacctgatcatcgtgcacgccacccaccctgagcggggccagcctgccagcctggagttcctgcccatggagagccccacagctgtgaatggagtgaaggtgctggtgcagggcaccgtgtttgccaggatggcccctgagcagaagacagagctggtgtgtgagctgcagaagctgcagtactgtgtgggcatgtgtggagatggagccaatgactgtggggccctgaaggctgctgatgtgggcatcagcctgagccaggccgaggcctctgtggtgagccccttcaccagctccatggccagcattgaatgtgtgcccatggtgatccgggagggccgctgcagcctggacaccagcttcagcgtcttcaagtacatggccctgtacagcctgacccagttcatctctgtgctgatcctgtacaccatcaacaccaacctgggggacctgcagttcctggccatcgacctggtgatcaccaccaccgtggccgtgctgatgagcaggactggacctgccctggtgctgggccgggtgcggcccccaggggccctgctgtctgtgcctgtgctgagcagcctgctgctgcagatggtgctggtgactggagtgcagctgggcggctacttcctgaccctggcccagccctggtttgtgcccctgaacagaacagtggccgccccagacaacctgcccaactatgagaacacagtggtgttcagcctgagcagcttccagtacctgatcctggccgctgctgtgtccaaaggagcccccttccggcggcccctgtacaccaatgaaagagcccggcctgtgcccccccggctgcctgcccctcctccagcccaggccggcctgcaggaggccctgcaggccgccggcaccagggctggccgggccgccctggccgctgctgcccggcggcccccagaggtggtgcaggcccacggccaccccaggcactggaacagcctgcccctgagccaccagctggaccccagccctgccaccccacctcctcctccacccaccagcctgcggctggccaccgtgtacaccccaccaccccggcccccaccaccctggggctctgtggactactgccccctgccctggaccatcccccggcggggcggcagcccccagctgcccagcgtgctgctgtctgtgtag

SEQ ID NO: 144348 - DNA, 3528 bp, synthetic construct
  misc_feature 1..3528: note = Description of Artificial Sequence: Synthetic coding sequence
  source 1..3528: mol_type = other DNA
atgtctgctgacagcagccccctggtgggcagcacccccaccggctacggcaccctgaccatcggcaccagcattgaccccctgagcagctctgtgtcctctgtgcggctgagcggctactgcggcagcccctggagggtcatcggctaccacgtggtggtgtggatgatggccggcatccccctgctgctcttccgctggaagcccctgtggggcgtgcggctgcggctgcggccctgcaacctggcccatgctgagaccctggtgattgagatccgggacaaggaggacagctcctggcagctgttcaccgtgcaggtgcagacagaggccatcggggagggcagcctggagcccagcccccagagccaggccgaggatggccgcagccaggccgctgtgggcgctgtgcctgagggcgcctggaaggacacagcccagctgcacaagtctgaggaggccaagagggtgctgcgctactacctgttccagggccagcgctacatctggattgagacccagcaggccttctaccaggtgtccctgctggaccacggccgcagctgtgatgatgtgcacaggagcagacatggcctgagcctgcaggaccagatggtgaggaaggccatctacggccccaacgtcatcagcatccctgtgaagagctacccccagctgctggtggatgaggccctgaacccctactacggcttccaggccttcagcatcgccctgtggctggccgaccactactactggtacgccctgtgcatcttcctgatcagcagcatcagcatctgcctgagcctgtacaagaccaggaagcagagccagaccctgcgggacatggtgaagctgtccatgagggtgtgtgtgtgcaggcctggaggagaggaggagtgggtggacagcagcgagctggtgcctggggactgcctggtgctgccccaggagggcggcctgatgccctgtgatgctgccctggtggccggggagtgcatggtgaatgaaagcagcctgactggagagagcatccctgtgctgaagacagccctgcctgagggcctgggcccctactgtgccgagacccacagaagacacaccctcttctgtggcaccctcatcctgcaggcccgggcctacgtgggcccccacgtgctggccgtggtgaccaggacaggcttctgcacagccaagggcggcctggtgagcagcatcctgcacccccggcccatcaacttcaagttctacaagcacagcatgaagtttgtggccgccctgtctgtgctggccctgctgggcaccatctacagcatcttcatcctgtacagaaacagagtgcccctgaatgagatcgtcatccgggccctggacctggtgacagtggtggtgcccccagccctgcctgctgccatgacagtgtgcaccctgtatgcccagagccggctgcggcggcagggcatcttctgcatccaccccctgcgcatcaacctgggcggcaagctgcagctggtgtgctttgacaagacaggcaccctgacagaagatggcctggatgtgatgggcgtggtgcccctgaagggccaggccttcctgcccctggtgcctgagccccggcggctgcctgtgggccccctgctgcgggccctggccacctgccacgccctgagccggctgcaggacacccctgtgggggaccccatggacctgaagatggtggagagcacaggctgggtgctggaggaggagcctgctgctgacagcgccttcggcacccaggtgctggccgtgatgaggcctcccctgtgggagccccagctgcaggccatggaggagccccctgtgcctgtgtctgtgctgcaccgcttccccttcagcagcgccctgcagaggatgtctgtggtggtggcctggccaggggccacccagcctgaggcctacgtgaagggcagccctgagctggtggccggcctgtgcaaccctgagaccgtgcccacagactttgcccagatgctgcagagctacacagctgctggctacagagtggtggccctggccagcaagcccctgcccaccgtgcccagcctggaggccgcccagcagctgacccgggacacagtggagggggacctgagcctgctgggcctgctggtgatgaggaacctgctgaagccccagaccacccctgtgatccaggccctgcggaggacccgcatccgggctgtgatggtgactggagacaacctgcagacagctgtgacagtggcccggggctgcggcatggtggccccccaggagcacctgatcatcgtgcacgccacccaccctgagcggggccagcctgccagcctggagttcctgcccatggagagccccacagctgtgaatggagtgaaggaccctgaccaggccgccagctacacagtggagccagaccccaggagccgccacctggccctgagcggccccaccttcggcatcatcgtgaagcacttccccaagctgctgcccaaggtgctggtgcagggcaccgtgtttgccaggatggcccctgagcagaagacagagctggtgtgtgagctgcagaagctgcagtactgtgtgggcatgtgtggagatggagccaatgactgtggggccctgaaggccgcagatgtgggcatcagcctgagccaggccgaggcctctgtggtgagccccttcaccagctccatggccagcattgaatgtgtgcccatggtgatccgggagggccgctgcagcctggacaccagcttctctgtgttcaagtacatggccctgtacagcctgacccagttcatctctgtgctgatcctgtacaccatcaacaccaacctgggggacctgcagttcctggccatcgacctggtgatcaccaccaccgtggccgtgctgatgagcaggacaggccctgccctggtgctgggccgggtgcggcccccaggggccctgctgtctgtgcctgtgctgagcagcctgctgctgcagatggtgctggtgactggagtgcagctgggcggctacttcctgaccctggcccagccctggtttgtgcccctgaacagaacagtggccgccccagacaacctgcccaactatgaaaatacagtggtgttcagcctgagcagcttccagtacctgatcctggccgctgctgtgtccaagggggcccccttcagaagacccctgtacaccaacgtgcccttcctggtggccctggccctgctgagctctgtgctggtgggcctggtgctggtgcccggcctgctgcagggccccctggccctgaggaacatcacagacaccggcttcaagctgctgctgctgggcctggtgaccctgaactttgtgggcgccttcatgctggagagcgtgctggaccagtgcctgcctgcctgcctgcggcggctgcggcccaagagggccagcaagaagcgcttcaagcagctggagcgggagctggccgagcagccctggccacccctgcctgctggccccctgaggtag

SEQ ID NO: 144349 - DNA, 3372 bp, synthetic construct
  misc_feature 1..3372: note = Description of Artificial Sequence: Synthetic coding sequence
  source 1..3372: mol_type = other DNA
atgagccgggccacctctgtgggggaccagctggaggccccagcccggaccatctacctgaaccagccccacctgaacaagttccgggacaaccagatcagcacagccaagtacagcgtgctgaccttcctgccccgcttcctgtatgagcagatcagaagagctgccaatgccttcttcctgttcatcgccctgctgcagcagatcccagatgtgagccccaccggccgctacaccaccctggtgcccctcatcatcatcctgaccatcgccggcatcaaggagatcgtggaggacttcaagaggcacaaggctgacaatgctgtgaacaagaagaagaccatcgtgctgagaaatggcatgtggcacaccatcatgtggaaggaggtggccgtgggggacatcgtgaaggtggtgaatggccagtacctgcctgcagatgtggtgctgctgagcagcagcgagccccaggccatgtgctacgtggagacagccaacctggatggagagaccaacctgaagatccggcagggcctgagccacacagctgacatgcagacccgggaggtgctgatgaagctgagcggcaccattgaatgtgagggccccaacagacacctgtatgacttcaccggcaacctgaacctggatggcaagagcctggtggccctgggccctgaccagatcctgctgcggggcacccagctgaggaacacccagtgggtgtttggaattgtggtgtacacaggccatgacaccaagctgatgcagaacagcaccaaggcccccctgaagaggagcaatgtggagaaggtgaccaacgtgcagatcctggtgctgtttggcatcctgctggtgatggccctggtgagcagcgctggggccctgtactggaacagaagccacggggagaagaactggtacatcaagaagatggacaccaccagtgacaactttggctacaacctgctgaccttcatcatcctgtacaacaacctgatccccatcagcctgctggtgaccctggaggtggtgaagtacacccaggccctcttcatcaactgggacacagacatgtactacatcggaaatgacaccccagccatggcccggaccagcaacctgaatgaggagctgggccaggtgaagtacctgttcagtgacaagacaggcaccctgacctgcaacatcatgaacttcaagaagtgcagcattgctggggtgacctacggccacttccctgagctggcccgggagcccagcagtgatgacttctgcaggatgcccccaccctgcagcgacagctgtgactttgatgacccccggctgctgaagaacatcgaggacagacaccccacagccccctgcatccaggagttcctgaccctgctggccgtgtgccacacagtggtgcctgagaaggatggagacaacatcatctaccaggccagcagcccagatgaagctgccctggtgaagggggccaagaagctgggctttgtgttcaccgcccggacccccttcagcgtcatcatcgaggccatgggccaggagcagaccttcggcatcctgaatgtgctggagttcagcagtgacaggaagaggatgtctgtgattgtgaggacccccagcggccgcctgcggctgtactgcaagggagctgacaacgtcatctttgagcggctgagcaaggacagcaagtacatggaggagaccctgtgccacctggagtactttgccacagagggcctgcggaccctgtgtgtggcctatgctgacctgtctgaaaatgaatatgaggagtggctgaaggtgtaccaggaggccagcaccatcctgaaggaccgggcccagaggctggaggagtgctatgagatcatcgagaagaacctgctgctgctgggcgccacagccatcgaggaccggctgcaggccggcgtgcctgagaccatcgccaccctgctgaaggccgagatcaagatctgggtgctgactggagacaagcaggagacagccatcaacatcggctacagctgccgcctggtgtcccagaacatggccctgatcctgctgaaggaggacagcctggatgccaccagggctgccatcacccagcactgcacagacctgggcaacctgctgggcaaggaaaatgatgtggccctgatcattgatggccacaccctgaagtatgccctgagctttgaggtgcggcgctccttcctggacctggccctgagctgcaaggccgtcatctgctgccgggtgagccccctgcagaagtctgagatcgtggatgtggtgaagaagagggtgaaggccatcaccctggccatcggagatggagccaatgatgtgggcatgatccagacagcccacgtgggcgtgggcatctctggaaatgaaggcatgcaggccaccaacaacagcgactatgccatcgcccagttctcctacctggagaagctgctgctggtgcatggagcctggagctacaacagagtgaccaagtgcatcctgtactgcttctacaagaatgtggtgctgtacatcatcgagatcttcaccgccctgccccccttcaccctgggcatctttgagaggagctgcacccaggagagcatgctgcgcttcccccagctgtacaagatcacccagaatggagagggcttcaacaccaaggtgttctggggccactgcatcaatgccctggtgcacagcctcatcctcttctggttccccatgaaggccctggagcatgacacagtgctgaccagcggccacgccacagactacctgtttgtgggcaacatcgtgtacacctacgtggtggtgacagtgtgcctgaaggccggcctggagaccacagcctggaccaagttcagccacctggccgtgtggggctccatgctgacctggctggtgttcttcggcatctacagcaccatctggcccaccatccccatcgccccagacatgaggggccaggccaccatggtgctgagcagcgcccacttctggctgggcctcttcctggtgcccacagcctgcctgattgaagatgtggcctggagggctgccaagcacacctgcaagaagaccctgctggaggaggtgcaggagctggagaccaagagccgggtgctgggcaaggctgtgctgcgggacagcaatggcaagaggctgaatgaaagagacaggctcatcaagaggctgggcaggaagaccccacccaccctcttccggggcagcagcctgcagcagggcgtgccccacggctacgccttcagccaggaggagcacggggctgtgtcccaggaggaggtgatccgggcctatgacaccaccaagaagaagagcaggaagaagtag

SEQ ID NO: 144350 - DNA, 426 bp, synthetic construct
  misc_feature 1..426: note = Description of Artificial Sequence: Synthetic coding sequence
  source 1..426: mol_type = other DNA
atgagccgggccacctctgtgggggaccagctggaggccccagcccggaccatctacctgaaccagccccacctgaacaagttccgggacaaccagatcagcacagccaagtacagcgtgctgaccttcctgccccgcttcctgtatgagcagatcagaagagctgccaatgccttcttcctgttcatcgccctgctgcagcagatcccagatgtgagccccaccggccgctacaccaccctggtgcccctcatcatcatcctgaccatcgccggcatcaaggagatcgtggaggacttcaagaggcacaaggctgacaatgctgtgaacaagaagaagaccatcgtgctgagaaatggcatgtggcacaccatcatgtggaaggaggagaacagcccccccttcaaggagatcagccccctgtag

SEQ ID NO: 144351 - DNA, 3567 bp, synthetic construct
  misc_feature 1..3567: note = Description of Artificial Sequence: Synthetic coding sequence
  source 1..3567: mol_type = other DNA
atgctgaatggagctggcctggacaaggccctgaagatgagcctgcccaggaggagccgcatccgcagctctgtgggccctgtgcgcagcagcctgggctacaagaaggccgaggatgagatgagccgggccacctctgtgggggaccagctggaggccccagcccggaccatctacctgaaccagccccacctgaacaagttccgggacaaccagatcagcacagccaagtacagcgtgctgaccttcctgccccgcttcctgtatgagcagatcagaagagctgccaatgccttcttcctgttcatcgccctgctgcagcagatcccagatgtgagccccaccggccgctacaccaccctggtgcccctcatcatcatcctgaccatcgccggcatcaaggagatcgtggaggacttcaagaggcacaaggctgacaatgctgtgaacaagaagaagaccatcgtgctgagaaatggcatgtggcacaccatcatgtggaaggaggtggccgtgggggacatcgtgaaggtggtgaatggccagtacctgcctgcagatgtggtgctgctgagcagcagcgagccccaggccatgtgctacgtggagacagccaacctggatggagagaccaacctgaagatccggcagggcctgagccacacagctgacatgcagacccgggaggtgctgatgaagctgagcggcaccattgaatgtgagggccccaacagacacctgtatgacttcaccggcaacctgaacctggatggcaagagcctggtggccctgggccctgaccagatcctgctgcggggcacccagctgaggaacacccagtgggtgtttggaattgtggtgtacacaggccatgacaccaagctgatgcagaacagcaccaaggcccccctgaagaggagcaatgtggagaaggtgaccaacgtgcagatcctggtgctgtttggcatcctgctggtgatggccctggtgagcagcgctggggccctgtactggaacagaagccacggggagaagaactggtacatcaagaagatggacaccaccagtgacaactttggctacaacctgctgaccttcatcatcctgtacaacaacctgatccccatcagcctgctggtgaccctggaggtggtgaagtacacccaggccctcttcatcaactgggacacagacatgtactacatcggaaatgacaccccagccatggcccggaccagcaacctgaatgaggagctgggccaggtgaagtacctgttcagtgacaagacaggcaccctgacctgcaacatcatgaacttcaagaagtgcagcattgctggggtgacctacggccacttccctgagctggcccgggagcccagcagtgatgacttctgcaggatgcccccaccctgcagcgacagctgtgactttgatgacccccggctgctgaagaacatcgaggacagacaccccacagccccctgcatccaggagttcctgaccctgctggccgtgtgccacacagtggtgcctgagaaggatggagacaacatcatctaccaggccagcagcccagatgaagctgccctggtgaagggggccaagaagctgggctttgtgttcaccgcccggacccccttcagcgtcatcatcgaggccatgggccaggagcagaccttcggcatcctgaatgtgctggagttcagcagtgacaggaagaggatgtctgtgattgtgaggacccccagcggccgcctgcggctgtactgcaagggagctgacaacgtcatctttgagcggctgagcaaggacagcaagtacatggaggagaccctgtgccacctggagtactttgccacagagggcctgcggaccctgtgtgtggcctatgctgacctgtctgaaaatgaatatgaggagtggctgaaggtgtaccaggaggccagcaccatcctgaaggaccgggcccagaggctggaggagtgctatgagatcatcgagaagaacctgctgctgctgggcgccacagccatcgaggaccggctgcaggccggcgtgcctgagaccatcgccaccctgctgaaggccgagatcaagatctgggtgctgactggagacaagcaggagacagccatcaacatcggctacagctgccgcctggtgtcccagaacatggccctgatcctgctgaaggaggacagcctggatgccaccagggctgccatcacccagcactgcacagacctgggcaacctgctgggcaaggaaaatgatgtggccctgatcattgatggccacaccctgaagtatgccctgagctttgaggtgcggcgctccttcctggacctggccctgagctgcaaggccgtcatctgctgccgggtgagccccctgcagaagtctgagatcgtggatgtggtgaagaagagggtgaaggccatcaccctggccatcggagatggagccaatgatgtgggcatgatccagacagcccacgtgggcgtgggcatctctggaaatgaaggcatgcaggccaccaacaacagcgactatgccatcgcccagttctcctacctggagaagctgctgctggtgcatggagcctggagctacaacagagtgaccaagtgcatcctgtactgcttctacaagaatgtggtgctgtacatcatcgagctgtggtttgcctttgtgaatggcttcagcggccagatcctgtttgagcgctggtgcatcggcctgtacaacgtcatcttcaccgccctgccccccttcaccctgggcatctttgagaggagctgcacccaggagagcatgctgcgcttcccccagctgtacaagatcacccagaatggagagggcttcaacaccaaggtgttctggggccactgcatcaatgccctggtgcacagcctcatcctcttctggttccccatgaaggccctggagcatgacacagtgctgaccagcggccacgccacagactacctgtttgtgggcaacatcgtgtacacctacgtggtggtgacagtgtgcctgaaggccggcctggagaccacagcctggaccaagttcagccacctggccgtgtggggctccatgctgacctggctggtgttcttcggcatctacagcaccatctggcccaccatccccatcgccccagacatgaggggccaggccaccatggtgctgagcagcgcccacttctggctgggcctcttcctggtgcccacagcctgcctgattgaagatgtggcctggagggctgccaagcacacctgcaagaagaccctgctggaggaggtgcaggagctggagaccaagagccgggtgctgggcaaggctgtgctgcgggacagcaatggcaagaggctgaatgaaagagacaggctcatcaagaggctgggcaggaagaccccacccaccctcttccggggcagcagcctgcagcagggcgtgccccacggctacgccttcagccaggaggagcacggggctgtgtcccaggaggaggtgatccgggcctatgacaccaccaagaagaagagcaggaagaagtag

SEQ ID NO: 144352 - DNA, 2907 bp, synthetic construct
  misc_feature 1..2907: note = Description of Artificial Sequence: Synthetic coding sequence
  source 1..2907: mol_type = other DNA
atgcgctgccccggcccccggctgctggagacctcctggaggcaccccccagcccccttcaccagcaccaacagacacctgtatgacttcaccggcaacctgaacctggatggcaagagcctggtggccctgggccctgaccagatcctgctgcggggcacccagctgaggaacacccagtgggtgtttggaattgtggtgtacacaggccatgacaccaagctgatgcagaacagcaccaaggcccccctgaagaggagcaatgtggagaaggtgaccaacgtgcagatcctggtgctgtttggcatcctgctggtgatggccctggtgagcagcgctggggccctgtactggaacagaagccacggggagaagaactggtacatcaagaagatggacaccaccagtgacaactttggctacaacctgctgaccttcatcatcctgtacaacaacctgatccccatcagcctgctggtgaccctggaggtggtgaagtacacccaggccctcttcatcaactgggacacagacatgtactacatcggaaatgacaccccagccatggcccggaccagcaacctgaatgaggagctgggccaggtgaagtacctgttcagtgacaagacaggcaccctgacctgcaacatcatgaacttcaagaagtgcagcattgctggggtgacctacggccacttccctgagctggcccgggagcccagcagtgatgacttctgcaggatgcccccaccctgcagcgacagctgtgactttgatgacccccggctgctgaagaacatcgaggacagacaccccacagccccctgcatccaggagttcctgaccctgctggccgtgtgccacacagtggtgcctgagaaggatggagacaacatcatctaccaggccagcagcccagatgaagctgccctggtgaagggggccaagaagctgggctttgtgttcaccgcccggacccccttcagcgtcatcatcgaggccatgggccaggagcagaccttcggcatcctgaatgtgctggagttcagcagtgacaggaagaggatgtctgtgattgtgaggacccccagcggccgcctgcggctgtactgcaagggagctgacaacgtcatctttgagcggctgagcaaggacagcaagtacatggaggagaccctgtgccacctggagtactttgccacagagggcctgcggaccctgtgtgtggcctatgctgacctgtctgaaaatgaatatgaggagtggctgaaggtgtaccaggaggccagcaccatcctgaaggaccgggcccagaggctggaggagtgctatgagatcatcgagaagaacctgctgctgctgggcgccacagccatcgaggaccggctgcaggccggcgtgcctgagaccatcgccaccctgctgaaggccgagatcaagatctgggtgctgactggagacaagcaggagacagccatcaacatcggctacagctgccgcctggtgtcccagaacatggccctgatcctgctgaaggaggacagcctggatgccaccagggctgccatcacccagcactgcacagacctgggcaacctgctgggcaaggaaaatgatgtggccctgatcattgatggccacaccctgaagtatgccctgagctttgaggtgcggcgctccttcctggacctggccctgagctgcaaggccgtcatctgctgccgggtgagccccctgcagaagtctgagatcgtggatgtggtgaagaagagggtgaaggccatcaccctggccatcggagatggagccaatgatgtgggcatgatccagacagcccacgtgggcgtgggcatctctggaaatgaaggcatgcaggccaccaacaacagcgactatgccatcgcccagttctcctacctggagaagctgctgctggtgcatggagcctggagctacaacagagtgaccaagtgcatcctgtactgcttctacaagaatgtggtgctgtacatcatcgagctgtggtttgcctttgtgaatggcttcagcggccagatcctgtttgagcgctggtgcatcggcctgtacaacgtcatcttcaccgccctgccccccttcaccctgggcatctttgagaggagctgcacccaggagagcatgctgcgcttcccccagctgtacaagatcacccagaatggagagggcttcaacaccaaggtgttctggggccactgcatcaatgccctggtgcacagcctcatcctcttctggttccccatgaaggccctggagcatgacacagtgctgaccagcggccacgccacagactacctgtttgtgggcaacatcgtgtacacctacgtggtggtgacagtgtgcctgaaggccggcctggagaccacagcctggaccaagttcagccacctggccgtgtggggctccatgctgacctggctggtgttcttcggcatctacagcaccatctggcccaccatccccatcgccccagacatgaggggccaggccaccatggtgctgagcagcgcccacttctggctgggcctcttcctggtgcccacagcctgcctgattgaagatgtggcctggagggctgccaagcacacctgcaagaagaccctgctggaggaggtgcaggagctggagaccaagagccgggtgctgggcaaggctgtgctgcgggacagcaatggcaagaggctgaatgaaagagacaggctcatcaagaggctgggcaggaagaccccacccaccctcttccggggcagcagcctgcagcagggcgtgccccacggctacgccttcagccaggaggagcacggggctgtgtcccaggaggaggtgatccgggcctatgacaccaccaagaagaagagcaggaagaagtag

SEQ ID NO: 144353 - DNA, 3903 bp, synthetic construct
  misc_feature 1..3903: note = Description of Artificial Sequence: Synthetic coding sequence
  source 1..3903: mol_type = other DNA
atgggcactggacctgcccagacccccaggagcacccgggccggccctgagcccagccctgcccctcctggccctggggacaccggggacagtgatgtgacccaggagggcagcggccctgctggcatccggggcggggagaccgtcatccgggccggcatgggagacagccctggccgcggggcccctgagaggaggcacaaggcccagcccggccgggccaggaaatatgagtggaggcctgagggccccacctccatgggcagcctgggccagcgggaggacctgcaggatgaagatagaaattctgccttcacctggaaggtgcaggccaacaacagagcctacaacggccagttcaaggagaaggtgatcctgtgctggcagaggaagaagtacaagaccaacgtcatcagaacagccaagtacaacttctacagcttcctgcccctgaacctgtatgagcagttccaccgggtgagcaacctcttcttcctgatcatcatcatcctgcagagcatcccagacatcagcaccctgccctggttcagcctgagcacccccatggtgtgcctgctcttcatccgggccacccgggacctggtggatgacatgggccgccacaagagtgaccgggccatcaacaaccggccctgccagatcctgatgggcaagagcttcaagcagaagaagtggcaggacctgtgtgtgggagatgtggtgtgcctgaggaaggacaacatcgtgcctgctgacatgctgctgctggccagcacagagcccagcagcctgtgctacgtggagaccgtggacattgatggagagaccaacctgaagttccggcaggccctgatggtgacccacaaggagctggccaccatcaagaagatggccagcttccagggcaccgtgacctgtgaggcccccaacagcaggatgcaccactttgtgggctgcctggagtggaatgacaagaagtacagcctggacatcggcaacctgctgctgcggggctgccgcatccggaacacagacacctgctacggcctggtgatctatgccggctttgacaccaagatcatgaagaactgtgggaagatccacctgaagaggaccaagctggacctgctgatgaacaagctggtggtggtgatcttcatctctgtggtgctggtgtgcctggtgctggccttcggcttcggcttctctgtgaaggagttcaaggaccaccactactacctgtctggagtgcacggcagctctgtggccgctgagagcttctttgtgttctggagcttcctgatcctgctgtctgtgaccatccccatgtccatgttcatcctgtctgagttcatctacctgggcaacagcgtcttcatcgactgggatgtgcagatgtactacaagccccaggatgtgcctgccaaggcccggagcaccagcctgaatgaccacctgggccaggtggagtacatcttcagtgacaagacaggcaccctgacccagaacatcctgaccttcaacaagtgctgcatcagcggccgggtgtatggcccagattctgaggccaccacccggcccaaggagaacccctacctgtggaacaagtttgctgatggcaagctgctcttccacaatgctgccctgctgcacctggtgaggaccaatggagatgaggccgtgcgggagttctggaggctgctggccatctgccacacagtgatggtgcgggagagcccccgggagaggccagaccagctgctgtaccaggccgccagcccagatgaaggagccctggtgacagctgccaggaactttggctacgtgttcctgagcaggacccaggacacagtgaccatcatggagctgggggaggagcgggtgtaccaggtgctggccatcatggacttcaacagcaccaggaagaggatgtctgtgctggtgaggaagccagagggcgccatctgcctgtacaccaagggagctgacaccgtcatctttgagcggctgcaccggcggggggccatggagtttgccacagaggaggccctggccgcctttgcccaggagaccctgcggaccctgtgcctggcctaccgggaggtggccgaggacatctatgaggactggcagcagaggcaccaggaggccagcctgctgctgcagaacagagcccaggccctgcagcagctgctgggcgccacagccatcgaggaccggctgcaggatggagtgcctgagaccatcaagtgcctgaagaagagcaacatcaagatctgggtgctgactggagacaagcaggagacagctgtgaacattggatttgcctgtgagctgctgtctgagaacatgctgatcctggaggagaaggagatcagccgcatcctggagacctactgggagaacagcaacaacctgctgacccgggagagcctgagccaggtgaagctggccctggtgatcaacggggacttcctggacaagctgctggtgtccctgaggaaggagccccgggccctggcccagaatgtgaacatggatgaggcctggcaggagctgggccagagcagaagagacttcctgtatgcccggcggctgagcctgctgtgcagaagatttggcctgcccctggccgcccccccagcccaggacagccgggcccggcgcagcagcgaggtgctgcaggagcgggcctttgtggacctggccagcaagtgccaggccgtcatctgctgccgggtgacccccaagcagaaggccctgattgtggccctggtgaagaagtaccaccaggtggtgaccctggccatcggagatggagccaatgacatcaacatgatcaagacagcagatgtgggcgtgggcctggccggccaggagggcatgcaggccgtgcagaacagcgactttgtgctgggccagttctgcttcctgcagaggctgctgctggtgcacggccgctggagctatgtgcgcatctgcaagttcctgcgctacttcttctacaagtccatggcctccatgatggtgcaggtgtggtttgcctgctacaacggcttcaccggccagcccctgtatgagggctggttcctggccctcttcaacctgctgtacagcaccctgcctgtgctgtacatcggcctgtttgagcaggatgtgtctgctgagcagagcctggagaagccagagctgtatgtggtgggccagaaggatgagctgttcaactactgggtgtttgtgcaggccatcgcccatggagtgaccaccagcctggtgaacttcttcatgaccctgtggatcagccgggacacagctggccctgccagcttcagtgaccaccagagctttgctgtggtggtggccctgagctgcctgctgagcatcaccatggaggtgatcctgatcatcaagtactggacagccctgtgtgtggccaccatcctgctgagcctgggcttctacgccatcatgaccaccaccacccagagcttctggctgttccgggtgagccccaccaccttccccttcctgtatgctgacctgtctgtgatgagcagccccagcatcctgctggtggtgctgctgtctgtgtccatcaacaccttccctgtgctggccctgcgggtcatcttccctgccctgaaggagctgcgggccaaggaggagaaggtggaggagggccccagcgaggagatcttcaccatggagcccctgccccacgtgcaccgggagagccgggcccggcgcagcagctatgccttcagccaccgggagggctacgccaacctgatcacccagggcaccatcctgcggcggggccctggggtgtccagtgacatcgccagcgagagcctggaccccagtgatgaggaggccgccagcagccccaaggagagccagtag

SEQ ID NO: 144354 - DNA, 1737 bp, synthetic construct
  misc_feature 1..1737: note = Description of Artificial Sequence: Synthetic coding sequence
  source 1..1737: mol_type = other DNA
atgggagacagccctggccgcggggcccctgagcggcggcacaaggcccagcccggccgggccaggaaatatgagtggaggcctgagggccccacctccatgggcagcctgggccagcgggaggacctgcaggatgaggacaggaacagcgccttcacctggaaggtgcaggccaacaacagagcctacaacggccagttcaaggagaaggtgatcctgtgctggcagaggaagaagtacaagaccaacgtcatcagaacagccaagtacaacttctacagcttcctgcccctgaacctgtatgagcagttccaccgggtgagcaacctcttcttcctgatcatcatcatcctgcagagcatcccagacatcagcaccctgccctggttcagcctgagcacccccatggtgtgcctgctcttcatccgggccacccgggacctggtggatgacatgggccgccacaagagtgaccgggccatcaacaaccggccctgccagatcctgatgggcaagagcttcaagcagaagaagtggcaggacctgtgtgtgggagatgtggtgtgcctgaggaaggacaacatcgtgcctgctgacatgctgctgctggccagcacagagcccagcagcctgtgctacgtggagaccgtggacattgatggagagaccaacctgaagttccggcaggccctgatggtgacccacaaggagctggccaccatcaagaagatggccagcttccagggcaccgtgacctgtgaggcccccaacagcaggatgcaccactttgtgggctgcctggagtggaatgacaagaagtacagcctggacatcggcaacctgctgctgcggggctgccgcatccggaacacagacacctgctacggcctggtgatctatgccggctttgacaccaagatcatgaagaactgtgggaagatccacctgaagaggaccaagctggacctgctgatgaacaagctggtggtggtgatcttcatctctgtggtgctggtgtgcctggtgctggcctttggatttggcttctctgtgaaggagttcaaggaccaccactactacctgagcggcgtgcacggcagctctgtggccgctgagagcttctttgtgttctggagcttcctgatcctgctgtctgtgaccatccccatgtccatgttcatcctgtctgagttcatctacctgggcaacagcgtcttcatcgactgggatgtgcagatgtactacaagccccaggatgtgcctgccaaggcccggagcaccagcctgaatgaccacctgggccaggtggagtacatcttcagtgacaagacaggcaccctgacccagaacatcctgaccttcaacaagtgctgcatcagcggccgggtgtatggagctgcccccaccccagagctgcctgctggcagcagcatcttcaagggcctgcgggtgcctgagaaccagagccacgtgtggccccacgcccagcacctgcggcccaacctgaaccagggcaccgtggcccgctggccaggcttcctgtggaggggccctgggaagttcttcttcttcctgcggcagagcctgaccctgagcacccaggccggcatgcagtggtgcaacctgggcagcctgcagagccccccaccccgcttcaagcgcttctcctggctgagcctgcccagctcctgggactaccgccacctgcccccccacctgatcttcctgtacttctag

SEQ ID NO: 144355 - DNA, 3792 bp, synthetic construct
  misc_feature 1..3792: note = Description of Artificial Sequence: Synthetic coding sequence
  source 1..3792: mol_type = other DNA
atgggagacagccctggccgcggggcccctgagcggcggcacaaggcccagcccggccgggccaggaaatatgagtggaggcctgagggccccacctccatgggcagcctgggccagcgggaggacctgcaggatgaggacaggaacagcgccttcacctggaaggtgcaggccaacaacagagcctacaacggccagttcaaggagaaggtgatcctgtgctggcagaggaagaagtacaagaccaacgtcatcagaacagccaagtacaacttctacagcttcctgcccctgaacctgtatgagcagttccaccgggtgagcaacctcttcttcctgatcatcatcatcctgcagagcatcccagacatcagcaccctgccctggttcagcctgagcacccccatggtgtgcctgctcttcatccgggccacccgggacctggtggatgacatgggccgccacaagagtgaccgggccatcaacaaccggccctgccagatcctgatgggcaagagcttcaagcagaagaagtggcaggacctgtgtgtgggagatgtggtgtgcctgaggaaggacaacatcgtgcctgctgacatgctgctgctggccagcacagagcccagcagcctgtgctacgtggagaccgtggacattgatggagagaccaacctgaagttccggcaggccctgatggtgacccacaaggagctggccaccatcaagaagatggccagcttccagggcaccgtgacctgtgaggcccccaacagcaggatgcaccactttgtgggctgcctggagtggaatgacaagaagtacagcctggacatcggcaacctgctgctgcggggctgccgcatccggaacacagacacctgctacggcctggtgatctatgcagatggctacatgtttgtgggctttgacaccaagatcatgaagaactgtgggaagatccacctgaagaggaccaagctggacctgctgatgaacaagctggtggtggtgatcttcatctctgtggtgctggtgtgcctggtgctggcctttggatttggcttctctgtgaaggagttcaaggaccaccactactacctgagcggcgtgcacggcagctctgtggccgctgagagcttctttgtgttctggagcttcctgatcctgctgtctgtgaccatccccatgtccatgttcatcctgtctgagttcatctacctgggcaacagcgtcttcatcgactgggatgtgcagatgtactacaagccccaggatgtgcctgccaaggcccggagcaccagcctgaatgaccacctgggccaggtggagtacatcttcagtgacaagacaggcaccctgacccagaacatcctgaccttcaacaagtgctgcatcagcggccgggtgtatggccctgacagcgaggccaccacccggcccaaggagaacccctacctgtggaacaagtttgctgatggcaagctgctcttccacaatgctgccctgctgcacctggtgaggaccaatggagatgaagctgtgcgggagttctggaggctgctggccatctgccacacagtgatggtgcgggagagcccccgggagaggccagaccagctgctgtaccaggccgccagcccagatgagggcgccctggtgacagctgccaggaactttggctacgtgttcctgagcaggacccaggacacagtgaccatcatggagctgggggaggagcgggtgtaccaggtgctggccatcatggacttcaacagcaccaggaagaggatgtctgtgctggtgaggaagccagagggcgccatctgcctgtacaccaagggagctgacaccgtcatctttgagcggctgcacagaagaggagccatggagtttgccacagaggaggccctggccgcctttgcccaggagaccctgcggaccctgtgcctggcctaccgggaggtggccgaggacatctatgaggactggcagcagaggcaccaggaggccagcctgctgctgcagaacagagcccaggccctgcagcaggtgtacaatgagatggagcaggacctgcggctgctgggcgccacagccattgaagatcggctgcaggatggagtgcctgagaccatcaagtgcctgaagaagagcaacatcaagatctgggtgctgaccggggacaagcaggagacagctgtgaacatcggctttgcctgtgagctgctgtctgagaacatgctgatcctggaggagaaggagatcagccgcatcctggagacctactgggagaacagcaacaacctgctgacccgggagagcctgagccaggtgaagctggccctggtgatcaatggagacttcctggacaagctgctggtgtccctgaggaaggagccccgggccctggcccagaatgtgaacatggatgaggcctggcaggagctgggccagagccggcgggacttcctgtatgcccggcggctgagcctgctgtgccgccgcttcggcctgcccctggccgcccccccagcccaggacagccgggcccggcgcagcagcgaggtgctgcaggagcgggcctttgtggacctggccagcaagtgccaggccgtcatctgctgccgggtgacccccaagcagaaggccctgattgtggccctggtgaagaagtaccaccaggtggtgaccctggccatcggagatggagccaatgacatcaacatgatcaagacagcagatgtgggcgtgggcctggccggccaggagggcatgcaggccgtgcagaacagcgactttgtgctgggccagttctgcttcctgcagaggctgctgctggtgcacggccgctggagctatgtgcgcatctgcaagttcctgcgctacttcttctacaagtccatggcctccatgatggtgcaggtgtggtttgcctgctacaacggcttcaccggccagcccctgtatgagggctggttcctggccctcttcaacctgctgtacagcaccctgcctgtgctgtacatcggcctgtttgagcaggatgtgtctgctgagcagagcctggagaagccagagctgtatgtggtgggccagaaggatgagctgttcaactactgggtgtttgtgcaggccatcgcccacggcgtgaccaccagcctggtgaacttcttcatgaccctgtggatcagccgggacacagctggccctgccagcttcagtgaccaccagagctttgctgtggtggtggccctgagctgcctgctgagcatcaccatggaggtgatcctgatcatcaagtactggacagccctgtgtgtggccaccatcctgctgagcctgggcttctacgccatcatgaccaccaccacccagagcttctggctgttccgggtgagccccaccaccttccccttcctgtatgctgacctgtctgtgatgagcagccccagcatcctgctggtggtgctgctgtctgtgtccatcaacaccttccctgtgctggccctgcgggtcatcttccctgccctgaaggagctgcgggccaaggaggagaaggtggaggagggccccagcgaggagatcttcaccatggagcccctgccccacgtgcaccgggagagccgggcccggcgcagcagctatgccttcagccaccgggagggctacgccaacctgatcacccagggcaccatcctgcggcggggccctggggtgtccagtgacatcgccagcgagagcctggaccccagtgatgaggaggccgccagcagccccaaggagagccagtag

SEQ ID NO: 144356 - DNA, 3933 bp, synthetic construct
  misc_feature 1..3933: note = Description of Artificial Sequence: Synthetic coding sequence
  source 1..3933: mol_type = other DNA
atgggcactggacctgcccagacccccaggagcacccgggccggccctgagcccagccctgcccctcctggccctggggacaccggggacagtgatgtgacccaggagggcagcggccctgctggcatccggggcggggagaccgtcatccgggccggcatgggagacagccctggccgcggggcccctgagaggaggcacaaggcccagcccggccgggccaggaaatatgagtggaggcctgagggccccacctccatgggcagcctgggccagcgggaggacctgcaggatgaagatagaaattctgccttcacctggaaggtgcaggccaacaacagagcctacaacggccagttcaaggagaaggtgatcctgtgctggcagaggaagaagtacaagaccaacgtcatcagaacagccaagtacaacttctacagcttcctgcccctgaacctgtatgagcagttccaccgggtgagcaacctcttcttcctgatcatcatcatcctgcagagcatcccagacatcagcaccctgccctggttcagcctgagcacccccatggtgtgcctgctcttcatccgggccacccgggacctggtggatgacatgggccgccacaagagtgaccgggccatcaacaaccggccctgccagatcctgatgggcaagagcttcaagcagaagaagtggcaggacctgtgtgtgggagatgtggtgtgcctgaggaaggacaacatcgtgcctgctgacatgctgctgctggccagcacagagcccagcagcctgtgctacgtggagaccgtggacattgatggagagaccaacctgaagttccggcaggccctgatggtgacccacaaggagctggccaccatcaagaagatggccagcttccagggcaccgtgacctgtgaggcccccaacagcaggatgcaccactttgtgggctgcctggagtggaatgacaagaagtacagcctggacatcggcaacctgctgctgcggggctgccgcatccggaacacagacacctgctacggcctggtgatctatgccggctttgacaccaagatcatgaagaactgtgggaagatccacctgaagaggaccaagctggacctgctgatgaacaagctggtggtggtgatcttcatctctgtggtgctggtgtgcctggtgctggccttcggcttcggcttctctgtgaaggagttcaaggaccaccactactacctgtctggagtgcacggcagctctgtggccgctgagagcttctttgtgttctggagcttcctgatcctgctgtctgtgaccatccccatgtccatgttcatcctgtctgagttcatctacctgggcaacagcgtcttcatcgactgggatgtgcagatgtactacaagccccaggatgtgcctgccaaggcccggagcaccagcctgaatgaccacctgggccaggtggagtacatcttcagtgacaagacaggcaccctgacccagaacatcctgaccttcaacaagtgctgcatcagcggccgggtgtatggcccagattctgaggccaccacccggcccaaggagaacccctacctgtggaacaagtttgctgatggcaagctgctcttccacaatgctgccctgctgcacctggtgaggaccaatggagatgaggccgtgcgggagttctggaggctgctggccatctgccacacagtgatggtgcgggagagcccccgggagaggccagaccagctgctgtaccaggccgccagcccagatgaaggagccctggtgacagctgccaggaactttggctacgtgttcctgagcaggacccaggacacagtgaccatcatggagctgggggaggagcgggtgtaccaggtgctggccatcatggacttcaacagcaccaggaagaggatgtctgtgctggtgaggaagccagagggcgccatctgcctgtacaccaagggagctgacaccgtcatctttgagcggctgcaccggcggggggccatggagtttgccacagaggaggccctggccgcctttgcccaggagaccctgcggaccctgtgcctggcctaccgggaggtggccgaggacatctatgaggactggcagcagaggcaccaggaggccagcctgctgctgcagaacagagcccaggccctgcagcaggtgtacaatgagatggagcaggacctgcggctgctgggcgccacagccatcgaggaccggctgcaggatggagtgcctgagaccatcaagtgcctgaagaagagcaacatcaagatctgggtgctgactggagacaagcaggagacagctgtgaacattggatttgcctgtgagctgctgtctgagaacatgctgatcctggaggagaaggagatcagccgcatcctggagacctactgggagaacagcaacaacctgctgacccgggagagcctgagccaggtgaagctggccctggtgatcaacggggacttcctggacaagctgctggtgtccctgaggaaggagccccgggccctggcccagaatgtgaacatggatgaggcctggcaggagctgggccagagcagaagagacttcctgtatgcccggcggctgagcctgctgtgcagaagatttggcctgcccctggccgcccccccagcccaggacagccgggcccggcgcagcagcgaggtgctgcaggagcgggcctttgtggacctggccagcaagtgccaggccgtcatctgctgccgggtgacccccaagcagaaggccctgattgtggccctggtgaagaagtaccaccaggtggtgaccctggccatcggagatggagccaatgacatcaacatgatcaagacagcagatgtgggcgtgggcctggccggccaggagggcatgcaggccgtgcagaacagcgactttgtgctgggccagttctgcttcctgcagaggctgctgctggtgcacggccgctggagctatgtgcgcatctgcaagttcctgcgctacttcttctacaagtccatggcctccatgatggtgcaggtgtggtttgcctgctacaacggcttcaccggccagcccctgtatgagggctggttcctggccctcttcaacctgctgtacagcaccctgcctgtgctgtacatcggcctgtttgagcaggatgtgtctgctgagcagagcctggagaagccagagctgtatgtggtgggccagaaggatgagctgttcaactactgggtgtttgtgcaggccatcgcccatggagtgaccaccagcctggtgaacttcttcatgaccctgtggatcagccgggacacagctggccctgccagcttcagtgaccaccagagctttgctgtggtggtggccctgagctgcctgctgagcatcaccatggaggtgatcctgatcatcaagtactggacagccctgtgtgtggccaccatcctgctgagcctgggcttctacgccatcatgaccaccaccacccagagcttctggctgttccgggtgagccccaccaccttccccttcctgtatgctgacctgtctgtgatgagcagccccagcatcctgctggtggtgctgctgtctgtgtccatcaacaccttccctgtgctggccctgcgggtcatcttccctgccctgaaggagctgcgggccaaggaggagaaggtggaggagggccccagcgaggagatcttcaccatggagcccctgccccacgtgcaccgggagagccgggcccggcgcagcagctatgccttcagccaccgggagggctacgccaacctgatcacccagggcaccatcctgcggcggggccctggggtgtccagtgacatcgccagcgagagcctggaccccagtgatgaggaggccgccagcagccccaaggagagccagtag

SEQ ID NO: 144357 - DNA, 3006 bp, synthetic construct
  misc_feature 1..3006: note = Description of Artificial Sequence: Synthetic coding sequence
  source 1..3006: mol_type = other DNA
atggaggccgcccacgccaagaccacagaagaatgtctggcctactttggagtgtctgagaccaccggcctgaccccagaccaggtgaagaggaacctggagaagtatggcctgaatgagctgcctgctgaggagggcaagaccctgtgggagctggtgattgagcagtttgaggacctgctggtgcgcatcctgctgctggccgcctgcatcagctttgtgctggcctggtttgaggagggggaggagaccatcacagcctttgtggagcccttcgtcatcctgctgatcctgattgccaatgccatcgtgggcgtgtggcaggagagaaatgcagaaaatgccatcgaggccctgaaggagtatgagcctgagatgggcaaggtgtacagagctgacaggaagtctgtgcagaggatcaaggcccgggacatcgtgcctggggacatcgtggaggtggccgtgggggacaaggtgcctgctgacatccgcatcctggccatcaagagcaccaccctgcgggtggaccagagcatcctgactggagagagcgtgtctgtcatcaagcacacagagcctgtgcctgaccccagggctgtgaaccaggacaagaagaacatgctgttcagcggcaccaacattgctgctgggaaggccctgggcatcgtggccaccaccggggtgggcacagagatcggcaagatccgggaccagatggccgccacagagcaggacaagacccccctgcagcagaagctggatgaatttggagagcagctgagcaaggtgatcagcctcatctgtgtggccgtgtggctgatcaacatcggccacttcaatgaccctgtgcacggcggctcctggttccggggggccatctactacttcaagattgctgtggccctggccgtggccgccatccctgagggcctgcctgctgtgatcaccacctgcctggccctgggcaccaggaggatggccaagaagaatgccatcgtgcgcagcctgcccagcgtggagaccctgggctgcaccagcgtcatctgcagcgacaagacaggcaccctgaccaccaaccagatgtctgtgtgcaagatgttcatcatcgacaaggtggatggagacatctgcctgctgaatgagttcagcatcaccggcagcacctacgcccctgagggggaggtgctgaagaatgacaagcctgtgcggcccggccagtatgatggcctggtggagctggccaccatctgtgccctgtgcaatgacagcagcctggacttcaatgaggccaagggcgtgtatgagaaggtgggggaggccacagaaacagccctgaccaccctggtggagaagatgaatgtgttcaacacagatgtgcgcagcctgagcaaggtggagcgggccaatgcctgcaacagcgtcatccggcagctgatgaagaaggagttcaccctggagttcagccgggacaggaagtccatgtctgtgtactgcagccctgccaagagcagcagagctgctgtgggcaacaagatgtttgtgaagggggcccctgagggcgtcatcgaccgctgcaactacgtgcgggtgggcaccaccagggtgcccctgaccggccctgtgaaggagaagatcatggctgtgatcaaggagtggggcaccggccgggacaccctgcgctgcctggccctggccacccgggacaccccacccaagcgggaggagatggtgctggatgattctgcccgcttcctggagtatgaaacagacctgacctttgtgggcgtggtgggcatgctggacccccccaggaaggaggtgacaggcagcatccagctgtgcagagatgctggcatccgggtcatcatgatcactggagacaacaagggcacagccatcgccatctgcagaagaattggcatctttggagaaaatgaggaggtggccgaccgggcctacacaggccgggagtttgatgacctgcccctggccgagcagcgggaggcctgcagaagagcctgctgctttgcccgggtggagcccagccacaagagcaagatcgtggagtacctgcagagctatgatgagatcacagccatgactggagatggagtgaatgatgccccagccctgaagaaggccgagatcggcatcgccatgggcagcggcacagctgtggccaagacagccagcgagatggtgctggctgatgacaacttcagcaccatcgtggccgctgtggaggagggccgggccatctacaacaacatgaagcagttcatccgctacctgatcagcagcaatgtgggggaggtggtgtgcatcttcctgacagctgccctgggcctgcctgaggccctgatccctgtgcagctgctgtgggtgaacctggtgacagatggcctgcctgccacagccctgggcttcaaccccccagacctggacatcatggaccggccccccaggagccccaaggagcccctcatcagcggctggctgttcttccgctacatggccatcggcggctacgtgggcgccgccaccgtgggcgccgccgcctggtggttcctgtatgcagaagatggcccccacgtgaactacagccagctgacccacttcatgcagtgcacagaggacaacacccactttgagggcatcgactgtgaggtgtttgaggcccctgagcccatgaccatggccctgtctgtgctggtgaccatcgagatgtgcaatgccctgaacagcctgtctgagaaccagagcctgctgaggatgccaccctgggtgaacatctggctgctgggcagcatctgcctgtccatgagcctgcacttcctgatcctgtatgtggaccccctgcccatgatcttcaagctgcgggccctggacctgacccagtggctgatggtgctgaagatcagcctgcccgtcatcggcctggatgagatcctgaagtttgtggccaggaactacctggaggaccctgaagatgaaagaaggaagtag

SEQ ID NO: 144358 - DNA, 2535 bp, synthetic construct
  misc_feature 1..2535: note = Description of Artificial Sequence: Synthetic coding sequence
  source 1..2535: mol_type = other DNA
aagagaagaaatcctggccggcaggccgtgggccacacagaagaagatcctccccgggtgggcaccccctggaaggagcacacaggccctggcccccaggagggcagcaccatggaggccgcccacgccaagaccacagaggagtgcctggcctactttggagtgtctgagaccaccggcctgaccccagaccaggtgaagaggaacctggagaagtatggcctgaatgagctgcctgctgaggagggcaagaccctgtgggagctggtgattgagcagtttgaggacctgctggtgcgcatcctgctgctggccgcctgcatcagctttgtgctggcctggtttgaggagggggaggagaccatcacagcctttgtggagccctttgtgatcctgctgatcctgattgccaatgccatcgtgggcgtgtggcaggagagaaatgcagaaaatgccatcgaggccctgaaggagtatgagcctgagatgggcaaggtgtacagagctgacaggaagtctgtgcagaggatcaaggcccgggacatcgtgcctggggacatcgtggaggtggccgtgggggacaaggtgcctgctgacatccgcatcctggccatcaagagcaccaccctgcgggtggaccagagcatcctgaccggggagagcgtgtctgtcatcaagcacacagagcctgtgcctgaccccagggctgtgaaccaggacaagaagaacatgctgttcagcggcaccaacattgctgctgggaaggccctgggcatcgtggccaccactggagtgggcacagaaattggcaagatccgggaccagatggccgccacagagcaggacaagacccccctgcagcagaagctggatgaatttggagagcagctgagcaaggtgatcagcctcatctgtgtggccgtgtggctgatcaacatcggccacttcaatgaccctgtgcatggaggctcctggttccggggggccatctactacttcaagattgctgtggccctggccgtggccgccatccctgagggcctgcctgctgtgatcaccacctgcctggccctgggcaccaggaggatggccaagaagaatgccatcgtgcgcagcctgcccagcgtggagaccctgggctgcaccagcgtcatctgcagcgacaagacaggcaccctgaccaccaaccagatgtctgtgtgcaagatgttcatcatcgacaaggtggatggagacatctgcctgctgaatgagttcagcatcaccggcagcacctacgcccctgagggggaggtgctgaagaatgacaagcctgtgcggcccggccagtatgatggcctggtggagctggccaccatctgtgccctgtgcaatgacagcagcctggacttcaatgaggccaagggcgtgtatgagaaggtgggggaggccacagaaacagccctgaccaccctggtggagaagatgaatgtgttcaacacagatgtgcgcagcctgagcaaggtggagcgggccaatgcctgcaacagcgtcatccggcagctgatgaagaaggagttcaccctggagttcagccgggacaggaagtccatgtctgtgtactgcagccctgccaagagcagcagagctgctgtgggcaacaagatgtttgtgaagggggcccctgagggcgtgattgaccgctgcaactacgtgcgggtgggcaccaccagggtgcccctgactggacctgtgaaggagaagatcatggccgtcatcaaggagtggggcaccggccgggacaccctgcgctgcctggccctggccacccgggacaccccacccaagcgggaggagatggtgctggatgacagcgcccgcttcctggagtatgaaacagacctgacctttgtgggcgtggtgggcatgctggacccccccaggaaggaggtgacaggcagcatccagctgtgcagagatgctggcatccgggtcatcatgatcaccggggacaacaagggcacagccatcgccatctgccgccgcatcggcatctttggagaaaatgaggaggtggccgaccgggcctacacaggccgggagtttgatgacctgcccctggccgagcagcgggaggcctgccggcgggcctgctgctttgcccgggtggagcccagccacaagagcaagatcgtggagtacctgcagagctatgatgagatcacagccatgactggagatggagtgaatgatgccccagccctgaagaaggccgagattggaattgccatgggcagcggcacagctgtggccaagacagccagcgagatggtgctggctgatgacaacttcagcaccatcgtggccgctgtggaggagggccgggccatctacaacaacatgaagcagttcatccgctacctgatcagcagcaatgtgggggaggtggtgtgcatcttcctgacagctgccctgggcctgcctgaggccctgatccctgtgcagctgctgtgggtgaacctggtgacagactgtgccgagctgctgatctactag

SEQ ID NO: 144359 - DNA, 2985 bp, synthetic construct
  misc_feature 1..2985: note = Description of Artificial Sequence: Synthetic coding sequence
  source 1..2985: mol_type = other DNA
atggaggccgcccacgccaagaccacagaagaatgtctggcctactttggagtgtctgagaccaccggcctgaccccagaccaggtgaagaggaacctggagaagtatggcctgaatgagctgcctgctgaggagggcaagaccctgtgggagctggtgattgagcagtttgaggacctgctggtgcgcatcctgctgctggccgcctgcatcagctttgtgctggcctggtttgaggagggggaggagaccatcacagcctttgtggagcccttcgtcatcctgctgatcctgattgccaatgccatcgtgggcgtgtggcaggagagaaatgcagaaaatgccatcgaggccctgaaggagtatgagcctgagatgggcaaggtgtacagagctgacaggaagtctgtgcagaggatcaaggcccgggacatcgtgcctggggacatcgtggaggtggccgtgggggacaaggtgcctgctgacatccgcatcctggccatcaagagcaccaccctgcgggtggaccagagcatcctgactggagagagcgtgtctgtcatcaagcacacagagcctgtgcctgaccccagggctgtgaaccaggacaagaagaacatgctgttcagcggcaccaacattgctgctgggaaggccctgggcatcgtggccaccaccggggtgggcacagagatcggcaagatccgggaccagatggccgccacagagcaggacaagacccccctgcagcagaagctggatgaatttggagagcagctgagcaaggtgatcagcctcatctgtgtggccgtgtggctgatcaacatcggccacttcaatgaccctgtgcacggcggctcctggttccggggggccatctactacttcaagattgctgtggccctggccgtggccgccatccctgagggcctgcctgctgtgatcaccacctgcctggccctgggcaccaggaggatggccaagaagaatgccatcgtgcgcagcctgcccagcgtggagaccctgggctgcaccagcgtcatctgcagcgacaagacaggcaccctgaccaccaaccagatgtctgtgtgcaagatgttcatcatcgacaaggtggatggagacatctgcctgctgaatgagttcagcatcaccggcagcacctacgcccctgagggggaggtgctgaagaatgacaagcctgtgcggcccggccagtatgatggcctggtggagctggccaccatctgtgccctgtgcaatgacagcagcctggacttcaatgaggccaagggcgtgtatgagaaggtgggggaggccacagaaacagccctgaccaccctggtggagaagatgaatgtgttcaacacagatgtgcgcagcctgagcaaggtggagcgggccaatgcctgcaacagcgtcatccggcagctgatgaagaaggagttcaccctggagttcagccgggacaggaagtccatgtctgtgtactgcagccctgccaagagcagcagagctgctgtgggcaacaagatgtttgtgaagggggcccctgagggcgtcatcgaccgctgcaactacgtgcgggtgggcaccaccagggtgcccctgaccggccctgtgaaggagaagatcatggctgtgatcaaggagtggggcaccggccgggacaccctgcgctgcctggccctggccacccgggacaccccacccaagcgggaggagatggtgctggatgattctgcccgcttcctggagtatgaaacagacctgacctttgtgggcgtggtgggcatgctggacccccccaggaaggaggtgacaggcagcatccagctgtgcagagatgctggcatccgggtcatcatgatcactggagacaacaagggcacagccatcgccatctgcagaagaattggcatctttggagaaaatgaggaggtggccgaccgggcctacacaggccgggagtttgatgacctgcccctggccgagcagcgggaggcctgcagaagagcctgctgctttgcccgggtggagcccagccacaagagcaagatcgtggagtacctgcagagctatgatgagatcacagccatgactggagatggagtgaatgatgccccagccctgaagaaggccgagatcggcatcgccatgggcagcggcacagctgtggccaagacagccagcgagatggtgctggctgatgacaacttcagcaccatcgtggccgctgtggaggagggccgggccatctacaacaacatgaagcagttcatccgctacctgatcagcagcaatgtgggggaggtggtgtgcatcttcctgacagctgccctgggcctgcctgaggccctgatccctgtgcagctgctgtgggtgaacctggtgacagatggcctgcctgccacagccctgggcttcaaccccccagacctggacatcatggaccggccccccaggagccccaaggagcccctcatcagcggctggctgttcttccgctacatggccatcggcggctacgtgggcgccgccaccgtgggcgccgccgcctggtggttcctgtatgcagaagatggcccccacgtgaactacagccagctgacccacttcatgcagtgcacagaggacaacacccactttgagggcatcgactgtgaggtgtttgaggcccctgagcccatgaccatggccctgtctgtgctggtgaccatcgagatgtgcaatgccctgaacagcctgtctgagaaccagagcctgctgaggatgccaccctgggtgaacatctggctgctgggcagcatctgcctgtccatgagcctgcacttcctgatcctgtatgtggaccccctgcccatgatcttcaagctgcgggccctggacctgacccagtggctgatggtgctgaagatcagcctgcccgtcatcggcctggatgagatcctgaagtttgtggccaggaactacctggagggctag

SEQ ID NO: 144360 - DNA, 2610 bp, synthetic construct
  misc_feature 1..2610: note = Description of Artificial Sequence: Synthetic coding sequence
  source 1..2610: mol_type = other DNA
atgggcaaggtgtacagagctgacaggaagtctgtgcagaggatcaaggcccgggacatcgtgcctggggacatcgtggaggtggccgtgggggacaaggtgcctgctgacatccgcatcctggccatcaagagcaccaccctgcgggtggaccagagcatcctgaccggggagagcgtgtctgtcatcaagcacacagagcctgtgcctgaccccagggctgtgaaccaggacaagaagaacatgctgttcagcggcaccaacattgctgctgggaaggccctgggcatcgtggccaccactggagtgggcacagaaattggcaagatccgggaccagatggccgccacagagcaggacaagacccccctgcagcagaagctggatgaatttggagagcagctgagcaaggtgatcagcctcatctgtgtggccgtgtggctgatcaacatcggccacttcaatgaccctgtgcatggaggctcctggttccggggggccatctactacttcaagattgctgtggccctggccgtggccgccatccctgagggcctgcctgctgtgatcaccacctgcctggccctgggcaccaggaggatggccaagaagaatgccatcgtgcgcagcctgcccagcgtggagaccctgggctgcaccagcgtcatctgcagcgacaagacaggcaccctgaccaccaaccagatgtctgtgtgcaagatgttcatcatcgacaaggtggatggagacatctgcctgctgaatgagttcagcatcaccggcagcacctacgcccctgagggggaggtgctgaagaatgacaagcctgtgcggcccggccagtatgatggcctggtggagctggccaccatctgtgccctgtgcaatgacagcagcctggacttcaatgaggccaagggcgtgtatgagaaggtgggggaggccacagaaacagccctgaccaccctggtggagaagatgaatgtgttcaacacagatgtgcgcagcctgagcaaggtggagcgggccaatgcctgcaacagcgtcatccggcagctgatgaagaaggagttcaccctggagttcagccgggacaggaagtccatgtctgtgtactgcagccctgccaagagcagcagagctgctgtgggcaacaagatgtttgtgaagggggcccctgagggcgtgattgaccgctgcaactacgtgcgggtgggcaccaccagggtgcccctgactggacctgtgaaggagaagatcatggccgtcatcaaggagtggggcaccggccgggacaccctgcgctgcctggccctggccacccgggacaccccacccaagcgggaggagatggtgctggatgacagcgcccgcttcctggagtatgaaacagacctgacctttgtgggcgtggtgggcatgctggacccccccaggaaggaggtgacaggcagcatccagctgtgcagagatgctggcatccgggtcatcatgatcaccggggacaacaagggcacagccatcgccatctgccgccgcatcggcatctttggagaaaatgaggaggtggccgaccgggcctacacaggccgggagtttgatgacctgcccctggccgagcagcgggaggcctgccggcgggcctgctgctttgcccgggtggagcccagccacaagagcaagatcgtggagtacctgcagagctatgatgagatcacagccatgactggagatggagtgaatgatgccccagccctgaagaaggccgagattggaattgccatgggcagcggcacagctgtggccaagacagccagcgagatggtgctggctgatgacaacttcagcaccatcgtggccgctgtggaggagggccgggccatctacaacaacatgaagcagttcatccgctacctgatcagcagcaatgtgggggaggtggtgtgcatcttcctgacagctgccctgggcctgcctgaggccctgatccctgtgcagctgctgtgggtgaacctggtgacagatggcctgcctgccacagccctgggcttcaaccccccagacctggacatcatggacaggcctcccaggagccccaaggagcccctcatcagcggctggctgttcttccgctacatggccatcggcggctacgtgggcgccgccaccgtgggcgctgctgcctggtggttcctgtatgcagaagatggcccccacgtgaactacagccagctgacccacttcatgcagtgcacagaggacaacacccactttgagggcatcgactgtgaggtgtttgaggcccctgagcccatgaccatggccctgtctgtgctggtgaccatcgagatgtgcaatgccctgaacagcctgtctgagaaccagagcctgctgaggatgccaccctgggtgaacatctggctgctgggcagcatctgcctgtccatgagcctgcacttcctgatcctgtatgtggaccccctgcccatgatcttcaagctgcgggccctggacctgacccagtggctgatggtgctgaagatcagcctgcctgtgattggcctggatgagatcctgaagtttgtggccaggaactacctggagggctag

SEQ ID NO: 144361 - DNA, 2994 bp, synthetic construct
  misc_feature 1..2994: note = Description of Artificial Sequence: Synthetic coding sequence
  source 1..2994: mol_type = other DNA
atggagaatgcccacaccaagacagtggaggaggtgctgggccactttggagtgaatgaaagcacaggcctgagcctggagcaggtgaagaagctgaaggagcgctggggcagcaatgagctgcctgctgaggagggcaagaccctgctggagctggtgattgagcagtttgaggacctgctggtgcgcatcctgctgctggccgcctgcatcagctttgtgctggcctggtttgaggagggggaggagaccatcacagcctttgtggagcccttcgtcatcctgctgatcctggtggccaatgccatcgtgggcgtgtggcaggagagaaatgcagaaaatgccatcgaggccctgaaggagtatgagcctgagatgggcaaggtgtaccggcaggacaggaagtctgtgcagaggatcaaggccaaggacatcgtgcctggggacatcgtggagattgctgtgggggacaaggtgcctgctgacatccggctgaccagcatcaagagcaccaccctgcgggtggaccagagcatcctgactggagagagcgtgtctgtcatcaagcacacagatcctgtgcctgaccccagggctgtgaaccaggacaagaagaacatgctgttcagcggcaccaacattgctgctgggaaggccatgggcgtggtggtggccaccggggtgaacacagagatcggcaagatcagagatgagatggtggccacagagcaggagaggacccccctgcagcagaagctggatgaatttggagagcagctgagcaaggtgatcagcctcatctgcatcgctgtgtggatcatcaacatcggccacttcaatgaccctgtgcacggcggctcctggatccggggggccatctactacttcaagattgctgtggccctggccgtggccgccatccctgagggcctgcctgctgtgatcaccacctgcctggccctgggcaccaggaggatggccaagaagaatgccatcgtgcgcagcctgcccagcgtggagaccctgggctgcaccagcgtcatctgcagcgacaagacaggcaccctgaccaccaaccagatgtctgtgtgcaggatgttcatcctggacagagtggagggggacacctgcagcctgaatgagttcaccatcaccggcagcacctacgcccccatcggggaggtgcacaaggatgacaagcctgtgaactgccaccagtatgatggcctggtggagctggccaccatctgtgccctgtgcaatgattctgccctggactacaatgaggccaagggcgtgtatgagaaggtgggggaggccacagaaacagccctgacctgcctggtggagaagatgaatgtgtttgacacagagctgaagggcctgagcaagattgagcgggccaatgcctgcaacagcgtcatcaagcagctgatgaagaaggagttcaccctggagttcagccgggacaggaagtccatgtctgtgtactgcacccccaacaagcccagcaggacctccatgagcaagatgtttgtgaagggggcccctgagggcgtgattgaccgctgcacccacatccgggtgggcagcaccaaggtgcccatgaccagcggcgtgaagcagaagatcatgtctgtcatccgggagtggggcagcggcagtgacaccctgcgctgcctggccctggccacccatgacaaccccctgcggcgggaggagatgcacctggaggacagcgccaacttcatcaagtatgagaccaacctgacctttgtgggctgtgtgggcatgctggaccccccacgcatcgaggtggccagctctgtgaagctgtgccggcaggccggcatccgggtcatcatgatcaccggggacaacaagggcacagctgtggccatctgccgccgcatcggcatcttcggccaggatgaagatgtgaccagcaaggccttcaccggccgggagtttgatgagctgaaccccagcgcccagagagatgcctgcctgaatgcccgctgctttgcccgggtggagcccagccacaagagcaagatcgtggagttcctgcagagctttgatgagatcacagccatgactggagatggagtgaatgatgccccagccctgaagaaggccgagattggaattgccatgggcagcggcacagctgtggccaagacagccagcgagatggtgctggctgatgacaacttcagcaccatcgtggccgctgtggaggagggccgggccatctacaacaacatgaagcagttcatccgctacctgatcagcagcaatgtgggggaggtggtgtgcatcttcctgacagctgccctgggcttccctgaggccctgatccctgtgcagctgctgtgggtgaacctggtgacagatggcctgcctgccacagccctgggcttcaaccccccagacctggacatcatgaacaagcccccaagaaaccccaaggagcccctcatcagcggctggctgttcttccgctacctggccatcggctgctacgtgggcgccgccaccgtgggcgctgctgcctggtggttcatcgccgcagatggcggcccccgggtgtccttctaccagctgagccacttcctgcagtgcaaggaggacaacccagactttgagggcgtggactgtgccatctttgagagcccctaccccatgaccatggccctgtctgtgctggtgaccatcgagatgtgcaatgccctgaacagcctgtctgagaaccagagcctgctgaggatgccaccctgggagaacatctggctggtgggcagcatctgcctgtccatgagcctgcacttcctgatcctgtatgtggagcccctgcccctcatcttccagatcacccccctgaatgtgacccagtggctgatggtgctgaagatcagcctgcctgtgatcctgatggatgagaccctgaagtttgtggccaggaactacctggagcccgccatcctggagtag

SEQ ID NO: 144362 - DNA, 3048 bp, synthetic construct
  misc_feature 1..3048: note = Description of Artificial Sequence: Synthetic coding sequence
  source 1..3048: mol_type = other DNA
atggagaatgcccacaccaagacagtggaggaggtgctgggccactttggagtgaatgaaagcacaggcctgagcctggagcaggtgaagaagctgaaggagcgctggggcagcaatgagctgcctgctgaggagggcaagaccctgctggagctggtgattgagcagtttgaggacctgctggtgcgcatcctgctgctggccgcctgcatcagctttgtgctggcctggtttgaggagggggaggagaccatcacagcctttgtggagcccttcgtcatcctgctgatcctggtggccaatgccatcgtgggcgtgtggcaggagagaaatgcagaaaatgccatcgaggccctgaaggagtatgagcctgagatgggcaaggtgtaccggcaggacaggaagtctgtgcagaggatcaaggccaaggacatcgtgcctggggacatcgtggagattgctggggagagcgtgtctgtcatcaagcacacagatcctgtgcctgaccccagggctgtgaaccaggacaagaagaacatgctgttcagcggcaccaacattgctgctgggaaggccatgggcgtggtggtggccactggagtgaacacagaaattggcaagatcagagatgagatggtggccacagagcaggagaggacccccctgcagcagaagctggatgaatttggagagcagctgagcaaggtgatcagcctcatctgcatcgctgtgtggatcatcaacatcggccacttcaatgaccctgtgcatggaggctcctggatccggggggccatctactacttcaagattgctgtggccctggccgtggccgccatccctgagggcctgcctgctgtgatcaccacctgcctggccctgggcaccaggaggatggccaagaagaatgccatcgtgcgcagcctgcccagcgtggagaccctgggctgcaccagcgtcatctgcagcgacaagacaggcaccctgaccaccaaccagatgtctgtgtgcaggatgttcatcctggacagagtggagggggacacctgcagcctgaatgagttcaccatcaccggcagcacctacgcccccatcggggaggtgcacaaggatgacaagcctgtgaactgccaccagtatgatggcctggtggagctggccaccatctgtgccctgtgcaatgacagcgccctggactacaatgaggccaagggcgtgtatgagaaggtgggggaggccacagaaacagccctgacctgcctggtggagaagatgaatgtgtttgacacagagctgaagggcctgagcaagattgaaagagccaatgcctgcaacagcgtcatcaagcagctgatgaagaaggagttcaccctggagttcagccgggacaggaagtccatgtctgtgtactgcacccccaacaagcccagcaggacctccatgagcaagatgtttgtgaagggggcccctgagggcgtcatcgaccgctgcacccacatccgggtgggcagcaccaaggtgcccatgaccagcggcgtgaagcagaagatcatgtctgtcatccgggagtggggcagcggcagtgacaccctgcgctgcctggccctggccacccatgacaaccccctgcggcgggaggagatgcacctggaggacagcgccaacttcatcaagtatgagaccaacctgacctttgtgggctgtgtgggcatgctggaccccccaagaattgaggtggccagctctgtgaagctgtgccggcaggccggcatccgggtcatcatgatcactggagacaacaagggcacagctgtggccatctgcagaagaattggcatcttcggccaggatgaagatgtgaccagcaaggccttcaccggccgggagtttgatgagctgaaccccagcgcccagagagatgcctgcctgaatgcccgctgctttgcccgggtggagcccagccacaagagcaagatcgtggagttcctgcagagctttgatgagatcacagccatgactggagatggagtgaatgatgccccagccctgaagaaggccgagatcggcatcgccatgggcagcggcacagctgtggccaagacagccagcgagatggtgctggctgatgacaacttcagcaccatcgtggccgctgtggaggagggccgggccatctacaacaacatgaagcagttcatccgctacctgatcagcagcaatgtgggggaggtggtgtgcatcttcctgacagctgccctgggcttccctgaggccctgatccctgtgcagctgctgtgggtgaacctggtgacagatggcctgcctgccacagccctgggcttcaaccccccagacctggacatcatgaacaagccacccaggaaccccaaggagcccctcatcagcggctggctgttcttccgctacctggccatcggctgctacgtgggcgccgccaccgtgggcgccgccgcctggtggttcatcgctgctgatggcggcccccgggtgtccttctaccagctgagccacttcctgcagtgcaaggaggacaacccagactttgaaggagtggactgtgccatctttgagagcccctaccccatgaccatggccctgtctgtgctggtgaccatcgagatgtgcaatgccctgaacagcctgtctgagaaccagagcctgctgaggatgccaccctgggagaacatctggctggtgggcagcatctgcctgtccatgagcctgcacttcctgatcctgtatgtggagcccctgcccctcatcttccagatcacccccctgaatgtgacccagtggctgatggtgctgaagatcagcctgcccgtcatcctgatggatgagaccctgaagtttgtggccaggaactacctggagcccgggaaggaatgtgtgcagcctgccaccaagagctgcagcttcagcgcctgcacagatggcatctcctggccctttgtgctgctgatcatgcccctggtgatctgggtgtacagcacagacaccaacttcagtgacatgttctggagctag

SEQ ID NO: 144363 - DNA, 3129 bp, synthetic construct
  misc_feature 1..3129: note = Description of Artificial Sequence: Synthetic coding sequence
  source 1..3129: mol_type = other DNA
atggagaatgcccacaccaagacagtggaggaggtgctgggccactttggagtgaatgaaagcacaggcctgagcctggagcaggtgaagaagctgaaggagcgctggggcagcaatgagctgcctgctgaggagggcaagaccctgctggagctggtgattgagcagtttgaggacctgctggtgcgcatcctgctgctggccgcctgcatcagctttgtgctggcctggtttgaggagggggaggagaccatcacagcctttgtggagcccttcgtcatcctgctgatcctggtggccaatgccatcgtgggcgtgtggcaggagagaaatgcagaaaatgccatcgaggccctgaaggagtatgagcctgagatgggcaaggtgtaccggcaggacaggaagtctgtgcagaggatcaaggccaaggacatcgtgcctggggacatcgtggagattgctgtgggggacaaggtgcctgctgacatccggctgaccagcatcaagagcaccaccctgcgggtggaccagagcatcctgactggagagagcgtgtctgtcatcaagcacacagatcctgtgcctgaccccagggctgtgaaccaggacaagaagaacatgctgttcagcggcaccaacattgctgctgggaaggccatgggcgtggtggtggccaccggggtgaacacagagatcggcaagatcagagatgagatggtggccacagagcaggagaggacccccctgcagcagaagctggatgaatttggagagcagctgagcaaggtgatcagcctcatctgcatcgctgtgtggatcatcaacatcggccacttcaatgaccctgtgcacggcggctcctggatccggggggccatctactacttcaagattgctgtggccctggccgtggccgccatccctgagggcctgcctgctgtgatcaccacctgcctggccctgggcaccaggaggatggccaagaagaatgccatcgtgcgcagcctgcccagcgtggagaccctgggctgcaccagcgtcatctgcagcgacaagacaggcaccctgaccaccaaccagatgtctgtgtgcaggatgttcatcctggacagagtggagggggacacctgcagcctgaatgagttcaccatcaccggcagcacctacgcccccatcggggaggtgcacaaggatgacaagcctgtgaactgccaccagtatgatggcctggtggagctggccaccatctgtgccctgtgcaatgattctgccctggactacaatgaggccaagggcgtgtatgagaaggtgggggaggccacagaaacagccctgacctgcctggtggagaagatgaatgtgtttgacacagagctgaagggcctgagcaagattgagcgggccaatgcctgcaacagcgtcatcaagcagctgatgaagaaggagttcaccctggagttcagccgggacaggaagtccatgtctgtgtactgcacccccaacaagcccagcaggacctccatgagcaagatgtttgtgaagggggcccctgagggcgtgattgaccgctgcacccacatccgggtgggcagcaccaaggtgcccatgaccagcggcgtgaagcagaagatcatgtctgtcatccgggagtggggcagcggcagtgacaccctgcgctgcctggccctggccacccatgacaaccccctgcggcgggaggagatgcacctggaggacagcgccaacttcatcaagtatgagaccaacctgacctttgtgggctgtgtgggcatgctggaccccccacgcatcgaggtggccagctctgtgaagctgtgccggcaggccggcatccgggtcatcatgatcaccggggacaacaagggcacagctgtggccatctgccgccgcatcggcatcttcggccaggatgaagatgtgaccagcaaggccttcaccggccgggagtttgatgagctgaaccccagcgcccagagagatgcctgcctgaatgcccgctgctttgcccgggtggagcccagccacaagagcaagatcgtggagttcctgcagagctttgatgagatcacagccatgactggagatggagtgaatgatgccccagccctgaagaaggccgagattggaattgccatgggcagcggcacagctgtggccaagacagccagcgagatggtgctggctgatgacaacttcagcaccatcgtggccgctgtggaggagggccgggccatctacaacaacatgaagcagttcatccgctacctgatcagcagcaatgtgggggaggtggtgtgcatcttcctgacagctgccctgggcttccctgaggccctgatccctgtgcagctgctgtgggtgaacctggtgacagatggcctgcctgccacagccctgggcttcaaccccccagacctggacatcatgaacaagcccccaagaaaccccaaggagcccctcatcagcggctggctgttcttccgctacctggccatcggctgctacgtgggcgccgccaccgtgggcgctgctgcctggtggttcatcgccgcagatggcggcccccgggtgtccttctaccagctgagccacttcctgcagtgcaaggaggacaacccagactttgagggcgtggactgtgccatctttgagagcccctaccccatgaccatggccctgtctgtgctggtgaccatcgagatgtgcaatgccctgaacagcctgtctgagaaccagagcctgctgaggatgccaccctgggagaacatctggctggtgggcagcatctgcctgtccatgagcctgcacttcctgatcctgtatgtggagcccctgcccctcatcttccagatcacccccctgaatgtgacccagtggctgatggtgctgaagatcagcctgcctgtgatcctgatggatgagaccctgaagtttgtggccaggaactacctggagcccgggaaggaatgtgtgcagcctgccaccaagagctgcagcttcagcgcctgcacagatggcatctcctggccctttgtgctgctgatcatgcccctggtgatctgggtgtacagcacagacaccaacttcagtgacatgttctggagctag

SEQ ID NO: 144364 - DNA, 2802 bp, synthetic construct
  misc_feature 1..2802: note = Description of Artificial Sequence: Synthetic coding sequence
  source 1..2802: mol_type = other DNA
tgaaccatcacagcctttgtggagcccttcgtcatcctgctgatcctggtggccaatgccatcgtgggcgtgtggcaggagagaaatgcagaaaatgccatcgaggccctgaaggagtatgagcctgagatgggcaaggtgtaccggcaggacaggaagtctgtgcagaggatcaaggccaaggacatcgtgcctggggacatcgtggagattgctggggagagcgtgtctgtcatcaagcacacagatcctgtgcctgaccccagggctgtgaaccaggacaagaagaacatgctgttcagcggcaccaacattgctgctgggaaggccatgggcgtggtggtggccactggagtgaacacagaaattggcaagatcagagatgagatggtggccacagagcaggagaggacccccctgcagcagaagctggatgaatttggagagcagctgagcaaggtgatcagcctcatctgcatcgctgtgtggatcatcaacatcggccacttcaatgaccctgtgcatggaggctcctggatccggggggccatctactacttcaagattgctgtggccctggccgtggccgccatccctgagggcctgcctgctgtgatcaccacctgcctggccctgggcaccaggaggatggccaagaagaatgccatcgtgcgcagcctgcccagcgtggagaccctgggctgcaccagcgtcatctgcagcgacaagacaggcaccctgaccaccaaccagatgtctgtgtgcaggatgttcatcctggacagagtggagggggacacctgcagcctgaatgagttcaccatcaccggcagcacctacgcccccatcggggaggtgcacaaggatgacaagcctgtgaactgccaccagtatgatggcctggtggagctggccaccatctgtgccctgtgcaatgacagcgccctggactacaatgaggccaagggcgtgtatgagaaggtgggggaggccacagaaacagccctgacctgcctggtggagaagatgaatgtgtttgacacagagctgaagggcctgagcaagattgaaagagccaatgcctgcaacagcgtcatcaagcagctgatgaagaaggagttcaccctggagttcagccgggacaggaagtccatgtctgtgtactgcacccccaacaagcccagcaggacctccatgagcaagatgtttgtgaagggggcccctgagggcgtcatcgaccgctgcacccacatccgggtgggcagcaccaaggtgcccatgaccagcggcgtgaagcagaagatcatgtctgtcatccgggagtggggcagcggcagtgacaccctgcgctgcctggccctggccacccatgacaaccccctgcggcgggaggagatgcacctggaggacagcgccaacttcatcaagtatgagaccaacctgacctttgtgggctgtgtgggcatgctggaccccccaagaattgaggtggccagctctgtgaagctgtgccggcaggccggcatccgggtcatcatgatcactggagacaacaagggcacagctgtggccatctgcagaagaattggcatcttcggccaggatgaagatgtgaccagcaaggccttcaccggccgggagtttgatgagctgaaccccagcgcccagagagatgcctgcctgaatgcccgctgctttgcccgggtggagcccagccacaagagcaagatcgtggagttcctgcagagctttgatgagatcacagccatgactggagatggagtgaatgatgccccagccctgaagaaggccgagatcggcatcgccatgggcagcggcacagctgtggccaagacagccagcgagatggtgctggctgatgacaacttcagcaccatcgtggccgctgtggaggagggccgggccatctacaacaacatgaagcagttcatccgctacctgatcagcagcaatgtgggggaggtggtgtgcatcttcctgacagctgccctgggcttccctgaggccctgatccctgtgcagctgctgtgggtgaacctggtgacagatggcctgcctgccacagccctgggcttcaaccccccagacctggacatcatgaacaagccacccaggaaccccaaggagcccctcatcagcggctggctgttcttccgctacctggccatcggctgctacgtgggcgccgccaccgtgggcgccgccgcctggtggttcatcgctgctgatggcggcccccgggtgtccttctaccagctgagccacttcctgcagtgcaaggaggacaacccagactttgaaggagtggactgtgccatctttgagagcccctaccccatgaccatggccctgtctgtgctggtgaccatcgagatgtgcaatgccctgaacagcctgtctgagaaccagagcctgctgaggatgccaccctgggagaacatctggctggtgggcagcatctgcctgtccatgagcctgcacttcctgatcctgtatgtggagcccctgcccctcatcttccagatcacccccctgaatgtgacccagtggctgatggtgctgaagatcagcctgcccgtcatcctgatggatgagaccctgaagtttgtggccaggaactacctggagcccgggaaggaatgtgtgcagcctgccaccaagagctgcagcttcagcgcctgcacagatggcatctcctggccctttgtgctgctgatcatgcccctggtgatctgggtgtacagcacagacaccaacttcagtgacatgttctggagctag

SEQ ID NO: 144365 - DNA, 3663 bp, synthetic construct
  misc_feature 1..3663: note = Description of Artificial Sequence: Synthetic coding sequence
  source 1..3663: mol_type = other DNA
atgggagacatggccaacaacagcgtggcctacagcggcgtgaagaacagcctgaaggaggccaaccatgatggagactttggcatcaccctggccgagctgcgggccctgatggagctgcggagcacagatgccctgaggaagatccaggagagctatggagatgtgtatggcatctgcaccaagctgaagaccagccccaatgaaggcctgagcggcaacccagctgacctggagcggcgggaggccgtgtttgggaagaacttcatcccccccaagaagcccaagaccttcctgcagctggtgtgggaggccctgcaggatgtgaccctcatcatcctggagattgctgccatcgtgtccctgggcctgtccttctaccagcccccagagggggacaatgccctgtgtggggaggtgtctgtgggggaggaggagggggagggggagaccggctggattgagggcgccgccatcctgctgtctgtggtgtgtgtggtgctggtgacagccttcaatgactggagcaaggagaagcagttccggggcctgcagagccgcatcgagcaggagcagaagttcaccgtcatccggggcggccaggtgatccagatccctgtggccgacatcaccgtgggggacatcgcccaggtgaagtacggggacctgctgcctgcagatggcatcctgatccagggcaatgacctgaagattgatgagagcagcctgaccggggagagtgaccacgtgaagaagagcctggacaaggaccccctgctgctgagcggcacccacgtgatggagggcagcggccgcatggtggtgacagctgtgggcgtgaacagccagacaggcatcatcttcaccctgctgggcgccggcggggaggaggaggagaagaaggatgagaagaagaaggagaagaagaacaagaagcaggatggagccatcgagaacagaaacaaggccaaggcccaggatggagctgccatggagatgcagcccctgaagtctgaggagggcggagatggagatgagaaggacaagaagaaggccaacctgcccaagaaggagaagtctgtgctgcagggcaagctgaccaagctggccgtgcagatcggcaaggccggcctgctgatgtctgccatcaccgtcatcatcctggtgctgtacttcgtcatcgacaccttctgggtgcagaagaggccctggctggctgaatgtacccccatctacatccagtactttgtgaagttcttcatcatcggcgtgacagtgctggtggtggccgtgcctgagggcctgcccctggccgtgaccatcagcctggcctacagcgtgaagaagatgatgaaggacaacaacctggtgcgccacctggatgcctgtgagaccatgggaaatgccacagccatctgcagcgacaagacaggcaccctgaccatgaacaggatgacagtggtgcaggcctacatcaatgagaagcactacaagaaggtgcctgagcctgaggccatcccccccaacatcctgagctacctggtgacaggcatctctgtgaactgtgcctacaccagcaagatcctgcccccagagaaggagggcggcctgcccaggcatgtgggcaacaagacagaatgtgccctgctgggcctgctgctggacctgaagagggactaccaggatgtgagaaatgagatccctgaggaggccctgtacaaggtgtacaccttcaacagcgtgaggaagtccatgagcacagtgctgaagaacagtgatggcagctaccgcatcttcagcaaaggagccagcgagatcatcctgaagaagtgcttcaagatcctgagcgccaacggggaggccaaggtgttccggccccgggacagagatgacatcgtgaagacagtgattgagcccatggccagcgagggcctgcggaccatctgcctggccttccgggacttccctgctggggagcctgagcctgagtgggacaatgaaaatgacatcgtgacaggcctgacctgcatcgctgtggtgggcattgaagatcctgtgcggcctgaggtgcctgatgccatcaagaagtgccagagagctggcatcaccgtgaggatggtgactggagacaacatcaacacagcccgggccatcgccaccaagtgtggcatcctgcaccctggagaggacttcctgtgcctggagggcaaggacttcaacagacgcatcagaaatgaaaaaggagaaattgagcaggagagaattgacaagatctggcccaagctgcgggtgctggcccggagcagccccacagacaagcacaccctggtgaagggcatcatcgacagcacagtgtctgaccagaggcaggtggtggccgtgactggagatggcaccaatgatggccctgccctgaagaaggcagatgtgggctttgccatgggcattgctggaacagatgtggccaaggaggccagtgacatcatcctgacagatgacaacttcaccagcatcgtgaaggctgtgatgtggggcagaaatgtgtatgacagcatcagcaagttcctgcagttccagctgactgtgaatgtggtggccgtcatcgtggccttcaccggggcctgcatcacccaggacagccccctgaaggctgtgcagatgctgtgggtgaacctgatcatggacaccctggccagcctggccctggccacagagcccccaacagagagcctgctgctgaggaagccctatggaagaaacaagcccctcatcagcaggaccatgatgaagaacatcctgggccacgccttctaccagctggtggtggtgttcaccctgctgtttgctggggagaagttctttgacatcgacagcggcagaaatgcccccctgcacgcccctccttctgagcactacaccatcgtgttcaacacctttgtgctgatgcagctgttcaatgagatcaatgccaggaagatccacggggagagaaatgtgtttgagggcatcttcaacaatgccatcttctgcaccatcgtgctgggcacctttgtggtgcagatcatcatcgtgcagtttggaggcaagcccttcagctgcagcgagctgagcattgagcagtggctgtggagcatcttcctgggcatgggcaccctgctgtggggccagctgatcagcaccatccccaccagccggctgaagttcctgaaggaggccggccacggcacccagaaggaggagatccctgaggaggagctggccgaggatgtggaggagattgaccacgccgagcgggagctgcggcggggccagatcctgtggttccggggcctgaaccgcatccagacccagatccgggtggtgaatgccttccgcagcagcctgtatgagggcctggagaagccagagagccgcagcagcatccacaacttcatgacccaccctgagttcagaattgaagattctgagccccacatccccctgattgatgacacagatgctgaagatgatgcccccaccaagaggaacagcagccccccacccagccccaacaagaacaacaatgctgtggacagcggcatccacctgaccatcgagatgaacaagagcgccaccagcagcagccctggcagccccctgcacagcctggagaccagcctgtag

SEQ ID NO: 144366 - DNA, 3555 bp, synthetic construct
  misc_feature 1..3555: note = Description of Artificial Sequence: Synthetic coding sequence
  source 1..3555: mol_type = other DNA
atgggagacatggccaacaacagcgtggcctacagcggcgtgaagaacagcctgaaggaggccaaccatgatggagactttggcatcaccctggccgagctgcgggccctgatggagctgcggagcacagatgccctgaggaagatccaggagagctatggagatgtgtatggcatctgcaccaagctgaagaccagccccaatgaaggcctgagcggcaacccagctgacctggagcggcgggaggccgtgtttgggaagaacttcatcccccccaagaagcccaagaccttcctgcagctggtgtgggaggccctgcaggatgtgaccctcatcatcctggagattgctgccatcgtgtccctgggcctgtccttctaccagcccccagagggggacaatgccctgtgtggggaggtgtctgtgggggaggaggagggggagggggagaccggctggattgagggcgccgccatcctgctgtctgtggtgtgtgtggtgctggtgacagccttcaatgactggagcaaggagaagcagttccggggcctgcagagccgcatcgagcaggagcagaagttcaccgtcatccggggcggccaggtgatccagatccctgtggccgacatcaccgtgggggacatcgcccaggtgaagtacggggacctgctgcctgcagatggcatcctgatccagggcaatgacctgaagattgatgagagcagcctgaccggggagagtgaccacgtgaagaagagcctggacaaggaccccctgctgctgagcggcacccacgtgatggagggcagcggccgcatggtggtgacagctgtgggcgtgaacagccagacaggcatcatcttcaccctgctgggcgccggcggggaggaggaggagaagaaggatgagaagaagaaggagaagaagaacaagaagcaggatggagccatcgagaacagaaacaaggccaaggcccaggatggagctgccatggagatgcagcccctgaagtctgaggagggcggagatggagatgagaaggacaagaagaaggccaacctgcccaagaaggagaagtctgtgctgcagggcaagctgaccaagctggccgtgcagatcggcaaggccggcctgctgatgtctgccatcaccgtcatcatcctggtgctgtacttcgtcatcgacaccttctgggtgcagaagaggccctggctggctgaatgtacccccatctacatccagtactttgtgaagttcttcatcatcggcgtgacagtgctggtggtggccgtgcctgagggcctgcccctggccgtgaccatcagcctggcctacagcgtgaagaagatgatgaaggacaacaacctggtgcgccacctggatgcctgtgagaccatgggaaatgccacagccatctgcagcgacaagacaggcaccctgaccatgaacaggatgacagtggtgcaggcctacatcaatgagaagcactacaagaaggtgcctgagcctgaggccatcccccccaacatcctgagctacctggtgacaggcatctctgtgaactgtgcctacaccagcaagatcctgcccccagagaaggagggcggcctgcccaggcatgtgggcaacaagacagaatgtgccctgctgggcctgctgctggacctgaagagggactaccaggatgtgagaaatgagatccctgaggaggccctgtacaaggtgtacaccttcaacagcgtgaggaagtccatgagcacagtgctgaagaacagtgatggcagctaccgcatcttcagcaaaggagccagcgagatcatcctgaagaagtgcttcaagatcctgagcgccaacggggaggccaaggtgttccggccccgggacagagatgacatcgtgaagacagtgattgagcccatggccagcgagggcctgcggaccatctgcctggccttccgggacttccctgctggggagcctgagcctgagtgggacaatgaaaatgacatcgtgacaggcctgacctgcatcgctgtggtgggcattgaagatcctgtgcggcctgaggtgcctgatgccatcaagaagtgccagagagctggcatcaccgtgaggatggtgactggagacaacatcaacacagcccgggccatcgccaccaagtgtggcatcctgcaccctggagaggacttcctgtgcctggagggcaaggacttcaacagacgcatcagaaatgaaaaaggagaaattgagcaggagagaattgacaagatctggcccaagctgcgggtgctggcccggagcagccccacagacaagcacaccctggtgaagggcatcatcgacagcacagtgtctgaccagaggcaggtggtggccgtgactggagatggcaccaatgatggccctgccctgaagaaggcagatgtgggctttgccatgggcattgctggaacagatgtggccaaggaggccagtgacatcatcctgacagatgacaacttcaccagcatcgtgaaggctgtgatgtggggcagaaatgtgtatgacagcatcagcaagttcctgcagttccagctgactgtgaatgtggtggccgtcatcgtggccttcaccggggcctgcatcacccaggacagccccctgaaggctgtgcagatgctgtgggtgaacctgatcatggacaccctggccagcctggccctggccacagagcccccaacagagagcctgctgctgaggaagccctatggaagaaacaagcccctcatcagcaggaccatgatgaagaacatcctgggccacgccttctaccagctggtggtggtgttcaccctgctgtttgctggggagaagttctttgacatcgacagcggcagaaatgcccccctgcacgcccctccttctgagcactacaccatcgtgttcaacacctttgtgctgatgcagctgttcaatgagatcaatgccaggaagatccacggggagagaaatgtgtttgagggcatcttcaacaatgccatcttctgcaccatcgtgctgggcacctttgtggtgcagctgatcagcaccatccccaccagccggctgaagttcctgaaggaggccggccacggcacccagaaggaggagatccctgaggaggagctggccgaggatgtggaggagattgaccacgccgagcgggagctgcggcggggccagatcctgtggttccggggcctgaaccgcatccagacccagatccgggtggtgaatgccttccgcagcagcctgtatgagggcctggagaagccagagagccgcagcagcatccacaacttcatgacccaccctgagttcagaattgaagattctgagccccacatccccctgattgatgacacagatgctgaagatgatgcccccaccaagaggaacagcagccccccacccagccccaacaagaacaacaatgctgtggacagcggcatccacctgaccatcgagatgaacaagagcgccaccagcagcagccctggcagccccctgcacagcctggagaccagcctgtag

SEQ ID NO: 144367 - DNA, 3531 bp, synthetic construct
  misc_feature 1..3531: note = Description of Artificial Sequence: Synthetic coding sequence
  source 1..3531: mol_type = other DNA
atgggagacatggccaacaacagcgtggcctacagcggcgtgaagaacagcctgaaggaggccaaccatgatggagactttggcatcaccctggccgagctgcgggccctgatggagctgcggagcacagatgccctgaggaagatccaggagagctatggagatgtgtatggcatctgcaccaagctgaagaccagccccaatgaaggcctgagcggcaacccagctgacctggagcggcgggaggccgtgtttgggaagaacttcatcccccccaagaagcccaagaccttcctgcagctggtgtgggaggccctgcaggatgtgaccctcatcatcctggagattgctgccatcgtgtccctgggcctgtccttctaccagcccccagagggggacaatgccctgtgtggggaggtgtctgtgggggaggaggagggggagggggagaccggctggattgagggcgccgccatcctgctgtctgtggtgtgtgtggtgctggtgacagccttcaatgactggagcaaggagaagcagttccggggcctgcagagccgcatcgagcaggagcagaagttcaccgtcatccggggcggccaggtgatccagatccctgtggccgacatcaccgtgggggacatcgcccaggtgaagtacggggacctgctgcctgcagatggcatcctgatccagggcaatgacctgaagattgatgagagcagcctgaccggggagagtgaccacgtgaagaagagcctggacaaggaccccctgctgctgagcggcacccacgtgatggagggcagcggccgcatggtggtgacagctgtgggcgtgaacagccagacaggcatcatcttcaccctgctgggcgccggcggggaggaggaggagaagaaggatgagaagaagaaggagaagaagaacaagaagcaggatggagccatcgagaacagaaacaaggccaaggcccaggatggagctgccatggagatgcagcccctgaagtctgaggagggcggagatggagatgagaaggacaagaagaaggccaacctgcccaagaaggagaagtctgtgctgcagggcaagctgaccaagctggccgtgcagatcggcaaggccggcctgctgatgtctgccatcaccgtcatcatcctggtgctgtacttcgtcatcgacaccttctgggtgcagaagaggccctggctggctgaatgtacccccatctacatccagtactttgtgaagttcttcatcatcggcgtgacagtgctggtggtggccgtgcctgagggcctgcccctggccgtgaccatcagcctggcctacagcgtgaagaagatgatgaaggacaacaacctggtgcgccacctggatgcctgtgagaccatgggaaatgccacagccatctgcagcgacaagacaggcaccctgaccatgaacaggatgacagtggtgcaggcctacatcaatgagaagcactacaagaaggtgcctgagcctgaggccatcccccccaacatcctgagctacctggtgacaggcatctctgtgaactgtgcctacaccagcaagatcctgcccccagagaaggagggcggcctgcccaggcatgtgggcaacaagacagaatgtgccctgctgggcctgctgctggacctgaagagggactaccaggatgtgagaaatgagatccctgaggaggccctgtacaaggtgtacaccttcaacagcgtgaggaagtccatgagcacagtgctgaagaacagtgatggcagctaccgcatcttcagcaaaggagccagcgagatcatcctgaagaagtgcttcaagatcctgagcgccaacggggaggccaaggtgttccggccccgggacagagatgacatcgtgaagacagtgattgagcccatggccagcgagggcctgcggaccatctgcctggccttccgggacttccctgctggggagcctgagcctgagtgggacaatgaaaatgacatcgtgacaggcctgacctgcatcgctgtggtgggcattgaagatcctgtgcggcctgaggtgcctgatgccatcaagaagtgccagagagctggcatcaccgtgaggatggtgactggagacaacatcaacacagcccgggccatcgccaccaagtgtggcatcctgcaccctggagaggacttcctgtgcctggagggcaaggacttcaacagacgcatcagaaatgaaaaaggagaaattgagcaggagagaattgacaagatctggcccaagctgcgggtgctggcccggagcagccccacagacaagcacaccctggtgaagggcatcatcgacagcacagtgtctgaccagaggcaggtggtggccgtgactggagatggcaccaatgatggccctgccctgaagaaggcagatgtgggctttgccatgggcattgctggaacagatgtggccaaggaggccagtgacatcatcctgacagatgacaacttcaccagcatcgtgaaggctgtgatgtggggcagaaatgtgtatgacagcatcagcaagttcctgcagttccagctgactgtgaatgtggtggccgtcatcgtggccttcaccggggcctgcatcacccaggacagccccctgaaggctgtgcagatgctgtgggtgaacctgatcatggacaccctggccagcctggccctggccacagagcccccaacagagagcctgctgctgaggaagccctatggaagaaacaagcccctcatcagcaggaccatgatgaagaacatcctgggccacgccttctaccagctggtggtggtgttcaccctgctgtttgctggggagaagttctttgacatcgacagcggcagaaatgcccccctgcacgcccctccttctgagcactacaccatcgtgttcaacacctttgtgctgatgcagctgttcaatgagatcaatgccaggaagatccacggggagagaaatgtgtttgagggcatcttcaacaatgccatcttctgcaccatcgtgctgggcacctttgtggtgcagatcatcatcgtgcagtttggaggcaagcccttcagctgcagcgagctgagcattgagcagtggctgtggagcatcttcctgggcatgggcaccctgctgtggggccagctgatcagcaccatccccaccagccggctgaagttcctgaaggaggccggccacggcacccagaaggaggagatccctgaggaggagctggccgaggatgtggaggagattgaccacgccgagcgggagctgcggcggggccagatcctgtggttccggggcctgaaccgcatccagacccagatggatgtggtgaatgccttccagagcggcagcagcatccagggcgccctgcggcggcagcccagcatcgccagccagcaccatgatgtgaccaacatcagcacccccacccacgtggtgttcagcagcagcacagccagcaccaccgtgggctacagcagtggagagtgcatctcctag

SEQ ID NO: 144368 - DNA, 2892 bp, synthetic construct
  misc_feature 1..2892: note = Description of Artificial Sequence: Synthetic coding sequence
  source 1..2892: mol_type = other DNA
atgttcctggtgattggcacccacgtgatggagggcagcggccgcatggtggtgacagctgtgggcgtgaacagccagacaggcatcatcttcaccctgctgggcgctggaggagaggaggaggagaagaaggatgagaagaagaaggagaagaagaacaagaagcaggatggagccattgaaaatagaaacaaggccaaggcccaggatggagctgccatggagatgcagcccctgaagtctgaggagggcggagatggagatgagaaggacaagaagaaggccaacctgcccaagaaggagaagtctgtgctgcagggcaagctgaccaagctggccgtgcagatcggcaaggccggcctgctgatgtctgccatcaccgtcatcatcctggtgctgtactttgtgattgacaccttctgggtgcagaagaggccctggctggccgagtgcacccccatctacatccagtactttgtgaagttcttcatcattggagtgacagtgctggtggtggccgtgcctgagggcctgcccctggccgtgaccatcagcctggcctacagcgtgaagaagatgatgaaggacaacaacctggtgcgccacctggatgcctgtgagaccatgggaaatgccacagccatctgcagcgacaagacaggcaccctgaccatgaacaggatgacagtggtgcaggcctacatcaatgagaagcactacaagaaggtgcctgagcctgaggccatcccccccaacatcctgagctacctggtgacaggcatctctgtgaactgtgcctacaccagcaagatcctgcccccagagaaggagggcggcctgcccaggcatgtgggcaacaagacagaatgtgccctgctgggcctgctgctggacctgaagagggactaccaggatgtgagaaatgagatccctgaggaggccctgtacaaggtgtacaccttcaacagcgtgaggaagtccatgagcacagtgctgaagaacagtgatggcagctaccgcatcttcagcaagggggccagcgagatcatcctgaagaagtgcttcaagatcctgagcgccaatggagaggccaaggtgttccggccccgggacagagatgacatcgtgaagacagtcatcgagcccatggccagcgagggcctgcggaccatctgcctggccttccgggacttccctgctggggagcctgagcctgagtgggacaatgaaaatgacatcgtgacaggcctgacctgcatcgctgtggtgggcatcgaggaccctgtgcggcctgaggtgcctgatgccatcaagaagtgccagagagctggcatcaccgtgaggatggtgactggagacaacatcaacacagcccgggccatcgccaccaagtgtggcatcctgcaccctggagaggacttcctgtgcctggagggcaaggacttcaacagacgcatcagaaatgagaagggggagattgagcaggagagaattgacaagatctggcccaagctgcgggtgctggcccggagcagccccacagacaagcacaccctggtgaagggcatcatcgacagcacagtgtctgaccagaggcaggtggtggccgtgactggagatggcaccaatgatggccctgccctgaagaaggcagatgtgggctttgccatgggcattgctggaacagatgtggccaaggaggccagtgacatcatcctgacagatgacaacttcaccagcatcgtgaaggctgtgatgtggggcagaaatgtgtatgacagcatcagcaagttcctgcagttccagctgactgtgaatgtggtggccgtgattgtggccttcaccggggcctgcatcacccaggacagccccctgaaggctgtgcagatgctgtgggtgaacctgatcatggacaccctggccagcctggccctggccacagagcccccaacagagagcctgctgctgaggaagccctacggcaggaacaagcccctcatcagcaggaccatgatgaagaacatcctgggccacgccttctaccagctggtggtggtgttcaccctgctgtttgctggggagaagttctttgatattgattctggaagaaatgcccccctgcacgccccacccagcgagcactacaccatcgtgttcaacacctttgtgctgatgcagctgttcaatgagatcaatgccaggaagatccatggagagagaaatgtgtttgagggcatcttcaacaatgccatcttctgcaccatcgtgctgggcacctttgtggtgcagatcatcatcgtgcagtttggaggcaagcccttcagctgcagcgagctgagcattgagcagtggctgtggagcatcttcctgggcatgggcaccctgctgtggggccagctgatcagcaccatccccaccagccggctgaagttcctgaaggaggccggccacggcacccagaaggaggagatccctgaggaggagctggctgaagatgtggaggagattgaccatgctgagcgggagctgcggcggggccagatcctgtggttccggggcctgaaccgcatccagacccagatccgggtggtgaatgccttccgcagcagcctgtatgagggcctggagaagccagagagccgcagcagcatccacaacttcatgacccaccctgagttcagaattgaggacagcgagccccacatccccctgattgatgacacagatgctgaagatgatgcccccaccaagaggaacagcagccccccacccagccccaacaagaacaacaatgctgtggacagcggcatccacctgaccatcgagatgaacaagagcgccaccagcagcagccctggcagccccctgcacagcctggagaccagcctgtag

SEQ ID NO: 144369 - DNA, 3663 bp, synthetic construct; identical to SEQ ID NO: 144365
  misc_feature 1..3663: note = Description of Artificial Sequence: Synthetic coding sequence
  source 1..3663: mol_type = other DNA

SEQ ID NO: 144370 - DNA, 306 bp, synthetic construct
  misc_feature 1..306: note = Description of Artificial Sequence: Synthetic coding sequence
  source 1..306: mol_type = other DNA
atgggagacatggccaacaacagcgtggcctacagcggcgtgaagaacagcctgaaggaggccaaccatgatggagactttggcatcaccctggccgagctgcgggccctgatggagctgcggagcacagatgccctgaggaagatccaggagagctatggagatgtgtatggcatctgcaccaagctgaagaccagccccaatgaaggagagttctactatgcctgcttctggttctttgtgcagagggtgctgtacatctggctgatcaatgaacatgcctacatcatcctggccatcgtgtag

SEQ ID NO: 144371 - DNA, 3600 bp, synthetic construct
  misc_feature 1..3600: note = Description of Artificial Sequence: Synthetic coding sequence
  source 1..3600: mol_type = other DNA
atgggagacatgaccaacagcgacttctacagcaagaaccagagaaatgaaagcagccacggcggggagtttggctgcaccatggaggagctgcggagcctgatggagctgcggggcacagaggccgtggtgaagatcaaggagacctacggggacacagaggccatctgccggcggctgaagaccagccctgtggagggcctgcctggaacagccccagacctggagaagaggaagcagatcttcggccagaacttcatcccccccaagaagcccaagaccttcctgcagctggtgtgggaggccctgcaggatgtgaccctcatcatcctggagattgctgccatcatcagcctgggcctgtccttctaccaccccccaggagagggcaatgaaggctgtgccacagcccagggcggcgcagaagatgaaggagaggccgaggccggctggattgagggcgccgccatcctgctgagcgtcatctgtgtggtgctggtgacagccttcaatgactggagcaaggagaagcagttccggggcctgcagagccgcatcgagcaggagcagaagttcaccgtggtgcgggccggccaggtggtgcagatccctgtggccgagatcgtggtgggggacatcgcccaggtgaagtacggggacctgctgcctgcagatggcctcttcatccagggcaatgacctgaagattgatgagagcagcctgaccggggagagtgaccaggtgaggaagtctgtggacaaggaccccatgctgctgagcggcacccacgtgatggagggcagcggccgcatgctggtgacagctgtgggcgtgaacagccagacaggcatcatcttcaccctgctgggcgccggcggggaggaggaggagaagaaggacaagaagggcgtgaagaagggagatggcctgcagctgcctgctgctgatggagctgctgccagcaatgctgctgacagcgccaatgccagcctggtgaatggcaagatgcaggatggaaatgtggatgccagccagagcaaggccaagcagcaggatggagctgctgccatggagatgcagcccctgaagtctgctgagggcggagatgctgatgacaggaagaaggcctccatgcacaagaaggagaagtctgtgctgcagggcaagctgaccaagctggccgtgcagatcggcaaggccggcctggtgatgtctgccatcaccgtcatcatcctggtgctgtacttcaccgtggacacctttgtggtgaacaagaagccctggctgcctgaatgtacccctgtgtatgtgcagtactttgtgaagttcttcatcatcggcgtgacagtgctggtggtggccgtgcctgagggcctgcccctggccgtgaccatcagcctggcctacagcgtgaagaagatgatgaaggacaacaacctggtgcgccacctggatgcctgtgagaccatgggaaatgccacagccatctgcagcgacaagacaggcaccctgaccaccaacaggatgacagtggtgcaggcctacgtgggagatgtgcactacaaggagatcccagaccccagcagcatcaacaccaagaccatggagctgctgatcaatgccatcgccatcaacagcgcctacaccaccaagatcctgcccccagagaaggagggcgccctgccccggcaggtgggcaacaagacagaatgtggcctgctgggctttgtgctggacctgaagcaggactatgagcctgtgcgcagccagatgcctgaggagaagctgtacaaggtgtacaccttcaacagcgtgaggaagtccatgagcaccgtcatcaagctgcctgatgagagcttcaggatgtacagcaaaggagccagcgagatcgtgctgaagaagtgctgcaagatcctgaatggagctggggagcccagggtcttccggccccgggacagagatgagatggtgaagaaggtgattgagcccatggcctgtgatggcctgcggaccatctgtgtggcctacagagacttccccagcagccctgagccagactgggacaatgaaaatgacatcctgaatgagctgacctgcatctgtgtggtgggcatcgaggaccctgtgcggcctgaggtgcctgaggccatcaggaagtgccagagagctggcatcaccgtgaggatggtgactggagacaacatcaacacagcccgggccatcgccatcaagtgtggcatcatccaccctggagaggacttcctgtgcctggagggcaaggagttcaacagacgcatcagaaatgagaagggggagattgagcaggagagaattgacaagatctggcccaagctgcgggtgctggcccggagcagccccacagacaagcacaccctggtgaagggcatcatcgacagcacccacacagagcagaggcaggtggtggccgtgactggagatggcaccaatgatggccctgccctgaagaaggcagatgtgggctttgccatgggcattgctggaacagatgtggccaaggaggccagtgacatcatcctgacagatgacaacttcagcagcatcgtgaaggctgtgatgtggggcagaaatgtgtatgacagcatcagcaagttcctgcagttccagctgactgtgaatgtggtggccgtgattgtggccttcaccggggcctgcatcacccaggacagccccctgaaggctgtgcagatgctgtgggtgaacctgatcatggacacctttgccagcctggccctggccacagagcccccaacagagaccctgctgctgaggaagccctacggcaggaacaagcccctcatcagcaggaccatgatgaagaacatcctgggccatgctgtgtaccagctggccctgatcttcaccctgctgtttgtgggggagaagatgttccagattgattctggaagaaatgcccccctgcacagcccccccagcgagcactacaccatcatcttcaacacctttgtgatgatgcagctgttcaatgagatcaatgccaggaagatccatggagagagaaatgtgtttgatggcatcttcaggaaccccatcttctgcaccatcgtgctgggcacctttgccatccagatcgtcatcgtgcagtttggaggcaagcccttcagctgcagccccctgcagctggaccagtggatgtggtgcatcttcatcggcctgggggagctggtgtggggccaggtgattgccaccatccccaccagccggctgaagttcctgaaggaggccggccgcctgacccagaaggaggagatccctgaggaggagctgaatgaagatgtggaggagattgaccatgctgagcgggagctgcggcggggccagatcctgtggttccggggcctgaaccgcatccagacccagatcgaggtggtgaacaccttcaagagcggggccagcttccagggcgccctgcggcggcagagctctgtgaccagccagagccaggatgtggccaacctgagcagccccagccgggtgtccctgagcaatgccctgagcagccccaccagcctgcccccagctgctgctggccgggagtag

SEQ ID NO: 144372 - DNA, 3690 bp, synthetic construct
  misc_feature 1..3690: note = Description of Artificial Sequence: Synthetic coding sequence
  source 1..3690: mol_type = other DNA
atgggagacatgaccaacagcgacttctacagcaagaaccagagaaatgaaagcagccacggcggggagtttggctgcaccatggaggagctgcggagcctgatggagctgcggggcacagaggccgtggtgaagatcaaggagacctacggggacacagaggccatctgccggcggctgaagaccagccctgtggagggcctgcctggaacagccccagacctggagaagaggaagcagatcttcggccagaacttcatcccccccaagaagcccaagaccttcctgcagctggtgtgggaggccctgcaggatgtgaccctcatcatcctggagattgctgccatcatcagcctgggcctgtccttctaccaccccccaggagagggcaatgaaggctgtgccacagcccagggcggcgcagaagatgaaggagaggccgaggccggctggattgagggcgccgccatcctgctgagcgtcatctgtgtggtgctggtgacagccttcaatgactggagcaaggagaagcagttccggggcctgcagagccgcatcgagcaggagcagaagttcaccgtggtgcgggccggccaggtggtgcagatccctgtggccgagatcgtggtgggggacatcgcccaggtgaagtacggggacctgctgcctgcagatggcctcttcatccagggcaatgacctgaagattgatgagagcagcctgaccggggagagtgaccaggtgaggaagtctgtggacaaggaccccatgctgctgagcggcacccacgtgatggagggcagcggccgcatgctggtgacagctgtgggcgtgaacagccagacaggcatcatcttcaccctgctgggcgccggcggggaggaggaggagaagaaggacaagaagggcgtgaagaagggagatggcctgcagctgcctgctgctgatggagctgctgccagcaatgctgctgacagcgccaatgccagcctggtgaatgccaagcagcaggatggagctgctgccatggagatgcagcccctgaagtctgctgagggcggagatgctgatgacaggaagaaggcctccatgcacaagaaggagaagtctgtgctgcagggcaagctgaccaagctggccgtgcagatcggcaaggccggcctggtgatgtctgccatcaccgtcatcatcctggtgctgtacttcaccgtggacacctttgtggtgaacaagaagccctggctgcctgaatgtacccctgtgtatgtgcagtactttgtgaagttcttcatcatcggcgtgacagtgctggtggtggccgtgcctgagggcctgcccctggccgtgaccatcagcctggcctacagcgtgaagaagatgatgaaggacaacaacctggtgcgccacctggatgcctgtgagaccatgggaaatgccacagccatctgcagcgacaagacaggcaccctgaccaccaacaggatgacagtggtgcaggcctacgtgggagatgtgcactacaaggagatcccagaccccagcagcatcaacaccaagaccatggagctgctgatcaatgccatcgccatcaacagcgcctacaccaccaagatcctgcccccagagaaggagggcgccctgccccggcaggtgggcaacaagacagaatgtggcctgctgggctttgtgctggacctgaagcaggactatgagcctgtgcgcagccagatgcctgaggagaagctgtacaaggtgtacaccttcaacagcgtgaggaagtccatgagcaccgtcatcaagctgcctgatgagagcttcaggatgtacagcaaaggagccagcgagatcgtgctgaagaagtgctgcaagatcctgaatggagctggggagcccagggtcttccggccccgggacagagatgagatggtgaagaaggtgattgagcccatggcctgtgatggcctgcggaccatctgtgtggcctacagagacttccccagcagccctgagccagactgggacaatgaaaatgacatcctgaatgagctgacctgcatctgtgtggtgggcatcgaggaccctgtgcggcctgaggtgcctgaggccatcaggaagtgccagagagctggcatcaccgtgaggatggtgactggagacaacatcaacacagcccgggccatcgccatcaagtgtggcatcatccaccctggagaggacttcctgtgcctggagggcaaggagttcaacagacgcatcagaaatgagaagggggagattgagcaggagagaattgacaagatctggcccaagctgcgggtgctggcccggagcagccccacagacaagcacaccctggtgaagggcatcatcgacagcacccacacagagcagaggcaggtggtggccgtgactggagatggcaccaatgatggccctgccctgaagaaggcagatgtgggctttgccatgggcattgctggaacagatgtggccaaggaggccagtgacatcatcctgacagatgacaacttcagcagcatcgtgaaggctgtgatgtggggcagaaatgtgtatgacagcatcagcaagttcctgcagttccagctgactgtgaatgtggtggccgtgattgtggccttcaccggggcctgcatcacccaggacagccccctgaaggctgtgcagatgctgtgggtgaacctgatcatggacacctttgccagcctggccctggccacagagcccccaacagagaccctgctgctgaggaagccctacggcaggaacaagcccctcatcagcaggaccatgatgaagaacatcctgggccatgctgtgtaccagctggccctgatcttcaccctgctgtttgtgggggagaagatgttccagattgattctggaagaaatgcccccctgcacagcccccccagcgagcactacaccatcatcttcaacacctttgtgatgatgcagctgttcaatgagatcaatgccaggaagatccatggagagagaaatgtgtttgatggcatcttcaggaaccccatcttctgcaccatcgtgctgggcacctttgccatccagatcgtcatcgtgcagtttggaggcaagcccttcagctgcagccccctgcagctggaccagtggatgtggtgcatcttcatcggcctgggggagctggtgtggggccaggtgattgccaccatccccaccagccggctgaagttcctgaaggaggccggccgcctgacccagaaggaggagatccctgaggaggagctgaatgaagatgtggaggagattgaccatgctgagcgggagctgcggcggggccagatcctgtggttccggggcctgaaccgcatccagacccagatccgggtggtgaaggccttccgcagcagcctgtatgagggcctggagaagccagagagcaggaccagcatccacaacttcatggcccaccctgagttcagaattgaggacagccagccccacatccccctgattgatgacacagacctggaggaggatgctgccctgaagcagaacagcagcccccccagcagcctgaacaagaacaacagcgccattgattctggcatcaacctgaccacagacaccagcaagagcgccaccagcagcagccctggcagccccatccacagcctggagaccagcctgtag

SEQ ID NO: 144373 - DNA, 3732 bp, synthetic construct
  misc_feature 1..3732: note = Description of Artificial Sequence: Synthetic coding sequence
  source 1..3732: mol_type = other DNA
atgggagacatgaccaacagcgacttctacagcaagaaccagagaaatgaaagcagccacggcggggagtttggctgcaccatggaggagctgcggagcctgatggagctgcggggcacagaggccgtggtgaagatcaaggagacctacggggacacagaggccatctgccggcggctgaagaccagccctgtggagggcctgcctggaacagccccagacctggagaagaggaagcagatcttcggccagaacttcatcccccccaagaagcccaagaccttcctgcagctggtgtgggaggccctgcaggatgtgaccctcatcatcctggagattgctgccatcatcagcctgggcctgtccttctaccaccccccaggagagggcaatgaaggctgtgccacagcccagggcggcgcagaagatgaaggagaggccgaggccggctggattgagggcgccgccatcctgctgagcgtcatctgtgtggtgctggtgacagccttcaatgactggagcaaggagaagcagttccggggcctgcagagccgcatcgagcaggagcagaagttcaccgtggtgcgggccggccaggtggtgcagatccctgtggccgagatcgtggtgggggacatcgcccaggtgaagtacggggacctgctgcctgcagatggcctcttcatccagggcaatgacctgaagattgatgagagcagcctgaccggggagagtgaccaggtgaggaagtctgtggacaaggaccccatgctgctgagcggcacccacgtgatggagggcagcggccgcatgctggtgacagctgtgggcgtgaacagccagacaggcatcatcttcaccctgctgggcgccggcggggaggaggaggagaagaaggacaagaagggcgtgaagaagggagatggcctgcagctgcctgctgctgatggagctgctgccagcaatgctgctgacagcgccaatgccagcctggtgaatggcaagatgcaggatggaaatgtggatgccagccagagcaaggccaagcagcaggatggagctgctgccatggagatgcagcccctgaagtctgctgagggcggagatgctgatgacaggaagaaggcctccatgcacaagaaggagaagtctgtgctgcagggcaagctgaccaagctggccgtgcagatcggcaaggccggcctggtgatgtctgccatcaccgtcatcatcctggtgctgtacttcaccgtggacacctttgtggtgaacaagaagccctggctgcctgaatgtacccctgtgtatgtgcagtactttgtgaagttcttcatcatcggcgtgacagtgctggtggtggccgtgcctgagggcctgcccctggccgtgaccatcagcctggcctacagcgtgaagaagatgatgaaggacaacaacctggtgcgccacctggatgcctgtgagaccatgggaaatgccacagccatctgcagcgacaagacaggcaccctgaccaccaacaggatgacagtggtgcaggcctacgtgggagatgtgcactacaaggagatcccagaccccagcagcatcaacaccaagaccatggagctgctgatcaatgccatcgccatcaacagcgcctacaccaccaagatcctgcccccagagaaggagggcgccctgccccggcaggtgggcaacaagacagaatgtggcctgctgggctttgtgctggacctgaagcaggactatgagcctgtgcgcagccagatgcctgaggagaagctgtacaaggtgtacaccttcaacagcgtgaggaagtccatgagcaccgtcatcaagctgcctgatgagagcttcaggatgtacagcaaaggagccagcgagatcgtgctgaagaagtgctgcaagatcctgaatggagctggggagcccagggtcttccggccccgggacagagatgagatggtgaagaaggtgattgagcccatggcctgtgatggcctgcggaccatctgtgtggcctacagagacttccccagcagccctgagccagactgggacaatgaaaatgacatcctgaatgagctgacctgcatctgtgtggtgggcatcgaggaccctgtgcggcctgaggtgcctgaggccatcaggaagtgccagagagctggcatcaccgtgaggatggtgactggagacaacatcaacacagcccgggccatcgccatcaagtgtggcatcatccaccctggagaggacttcctgtgcctggagggcaaggagttcaacagacgcatcagaaatgagaagggggagattgagcaggagagaattgacaagatctggcccaagctgcgggtgctggcccggagcagccccacagacaagcacaccctggtgaagggcatcatcgacagcacccacacagagcagaggcaggtggtggccgtgactggagatggcaccaatgatggccctgccctgaagaaggcagatgtgggctttgccatgggcattgctggaacagatgtggccaaggaggccagtgacatcatcctgacagatgacaacttcagcagcatcgtgaaggctgtgatgtggggcagaaatgtgtatgacagcatcagcaagttcctgcagttccagctgactgtgaatgtggtggccgtgattgtggccttcaccggggcctgcatcacccaggacagccccctgaaggctgtgcagatgctgtgggtgaacctgatcatggacacctttgccagcctggccctggccacagagcccccaacagagaccctgctgctgaggaagccctacggcaggaacaagcccctcatcagcaggaccatgatgaagaacatcctgggccatgctgtgtaccagctggccctgatcttcaccctgctgtttgtgggggagaagatgttccagattgattctggaagaaatgcccccctgcacagcccccccagcgagcactacaccatcatcttcaacacctttgtgatgatgcagctgttcaatgagatcaatgccaggaagatccatggagagagaaatgtgtttgatggcatcttcaggaaccccatcttctgcaccatcgtgctgggcacctttgccatccagatcgtcatcgtgcagtttggaggcaagcccttcagctgcagccccctgcagctggaccagtggatgtggtgcatcttcatcggcctgggggagctggtgtggggccaggtgattgccaccatccccaccagccggctgaagttcctgaaggaggccggccgcctgacccagaaggaggagatccctgaggaggagctgaatgaagatgtggaggagattgaccatgctgagcgggagctgcggcggggccagatcctgtggttccggggcctgaaccgcatccagacccagatccgggtggtgaaggccttccgcagcagcctgtatgagggcctggagaagccagagagcaggaccagcatccacaacttcatggcccaccctgagttcagaattgaggacagccagccccacatccccctgattgatgacacagacctggaggaggatgctgccctgaagcagaacagcagcccccccagcagcctgaacaagaacaacagcgccattgattctggcatcaacctgaccacagacaccagcaagagcgccaccagcagcagccctggcagccccatccacagcctggagaccagcctgtag

SEQ ID NO: 144374 - DNA, 3732 bp, synthetic construct; identical to SEQ ID NO: 144373
  misc_feature 1..3732: note = Description of Artificial Sequence: Synthetic coding sequence
  source 1..3732: mol_type = other DNA

SEQ ID NO: 144375 - DNA, 3597 bp, synthetic construct
  misc_feature 1..3597: note = Description of Artificial Sequence: Synthetic coding sequence
  source 1..3597: mol_type = other DNA
atgggagacatgaccaacagcgacttctacagcaagaaccagagaaatgaaagcagccacggcggggagtttggctgcaccatggaggagctgcggagcctgatggagctgcggggcacagaggccgtggtgaagatcaaggagacctacggggacacagaggccatctgccggcggctgaagaccagccctgtggagggcctgcctggaacagccccagacctggagaagaggaagcagatcttcggccagaacttcatcccccccaagaagcccaagaccttcctgcagctggtgtgggaggccctgcaggatgtgaccctcatcatcctggagattgctgccatcatcagcctgggcctgtccttctaccaccccccaggagagggcaatgaaggctgtgccacagcccagggcggcgcagaagatgaaggagaggccgaggccggctggattgagggcgccgccatcctgctgagcgtcatctgtgtggtgctggtgacagccttcaatgactggagcaaggagaagcagttccggggcctgcagagccgcatcgagcaggagcagaagttcaccgtggtgcgggccggccaggtggtgcagatccctgtggccgagatcgtggtgggggacatcgcccaggtgaagtacggggacctgctgcctgcagatggcctcttcatccagggcaatgacctgaagattgatgagagcagcctgaccggggagagtgaccaggtgaggaagtctgtggacaaggaccccatgctgctgagcggcacccacgtgatggagggcagcggccgcatgctggtgacagctgtgggcgtgaacagccagacaggcatcatcttcaccctgctgggcgccggcggggaggaggaggagaagaaggacaagaaggccaagcagcaggatggagctgctgccatggagatgcagcccctgaagtctgctgagggcggagatgctgatgacaggaagaaggcctccatgcacaagaaggagaagtctgtgctgcagggcaagctgaccaagctggccgtgcagatcggcaaggccggcctggtgatgtctgccatcaccgtcatcatcctggtgctgtacttcaccgtggacacctttgtggtgaacaagaagccctggctgcctgagtgcacccctgtgtatgtgcagtactttgtgaagttcttcatcattggagtgacagtgctggtggtggccgtgcctgagggcctgcccctggccgtgaccatcagcctggcctacagcgtgaagaagatgatgaaggacaacaacctggtgcgccacctggatgcctgtgagaccatgggaaatgccacagccatctgcagcgacaagacaggcaccctgaccaccaacaggatgacagtggtgcaggcctacgtgggagatgtgcactacaaggagatcccagaccccagcagcatcaacaccaagaccatggagctgctgatcaatgccatcgccatcaacagcgcctacaccaccaagatcctgcccccagagaaggagggcgccctgccccggcaggtgggcaacaagacagaatgtggcctgctgggctttgtgctggacctgaagcaggactatgagcctgtgcgcagccagatgcctgaggagaagctgtacaaggtgtacaccttcaacagcgtgaggaagtccatgagcaccgtcatcaagctgcctgatgagagcttcaggatgtacagcaagggggccagcgagatcgtgctgaagaagtgctgcaagatcctgaatggagctggggagcccagggtcttccggccccgggacagagatgagatggtgaagaaggtgattgagcccatggcctgtgatggcctgcggaccatctgtgtggcctacagagacttccccagcagccctgagccagactgggacaatgaaaatgacatcctgaatgagctgacctgcatctgtgtggtgggcattgaagatcctgtgcggcctgaggtgcctgaggccatcaggaagtgccagagagctggcatcaccgtgaggatggtgactggagacaacatcaacacagcccgggccatcgccatcaagtgtggcatcatccaccctggagaggacttcctgtgcctggagggcaaggagttcaacagacgcatcagaaatgaaaaaggagaaattgagcaggagagaattgacaagatctggcccaagctgcgggtgctggcccggagcagccccacagacaagcacaccctggtgaagggcatcatcgacagcacccacacagagcagaggcaggtggtggccgtgactggagatggcaccaatgatggccctgccctgaagaaggcagatgtgggctttgccatgggcattgctggaacagatgtggccaaggaggccagtgacatcatcctgacagatgacaacttcagcagcatcgtgaaggctgtgatgtggggcagaaatgtgtatgacagcatcagcaagttcctgcagttccagctgactgtgaatgtggtggccgtcatcgtggccttcaccggggcctgcatcacccaggacagccccctgaaggctgtgcagatgctgtgggtgaacctgatcatggacacctttgccagcctggccctggccacagagcccccaacagagaccctgctgctgaggaagccctatggaagaaacaagcccctcatcagcaggaccatgatgaagaacatcctgggccatgctgtgtaccagctggccctgatcttcaccctgctgtttgtgggggagaagatgttccagattgacagcggcagaaatgcccccctgcacagccccccatctgagcactacaccatcatcttcaacacctttgtgatgatgcagctgttcaatgagatcaatgccaggaagatccacggggagagaaatgtgtttgatggcatcttcaggaaccccatcttctgcaccatcgtgctgggcacctttgccatccagatcgtgattgtgcagtttggaggcaagcccttcagctgcagccccctgcagctggaccagtggatgtggtgcatcttcatcggcctgggggagctggtgtggggccaggtgattgccaccatccccaccagccggctgaagttcctgaaggaggccggccgcctgacccagaaggaggagatccctgaggaggagctgaatgaagatgtggaggagattgaccacgccgagcgggagctgcggcggggccagatcctgtggttccggggcctgaaccgcatccagacccagatccgggtggtgaaggccttccgcagcagcctgtatgagggcctggagaagccagagagcaggaccagcatccacaacttcatggcccaccctgagttcagaattgaggacagccagccccacatccccctgattgatgacacagacctggaggaggatgctgccctgaagcagaacagcagcccccccagcagcctgaacaagaacaacagcgccatcgacagcggcatcaacctgaccacagacaccagcaagagcgccaccagcagcagccctggcagccccatccacagcctggagaccagcctgtag

SEQ ID NO: 144376 - DNA, 3597 bp, synthetic construct; identical to SEQ ID NO: 144375
  misc_feature 1..3597: note = Description of Artificial Sequence: Synthetic coding sequence
  source 1..3597: mol_type = other DNA

SEQ ID NO: 144377 - DNA, 1299 bp, synthetic construct
  misc_feature 1..1299: note = Description of Artificial Sequence: Synthetic coding sequence
  source 1..1299: mol_type = other DNA
atgacagtggtgcaggcctacgtgggagatgtgcactacaaggagatcccagaccccagcagcatcaacaccaagaccatggagctgctgatcaatgccatcgccatcaacagcgcctacaccaccaagatcctgcccccagagaaggagggcgccctgccccggcaggtgggcaatgtgtatgacagcatcagcaagttcctgcagttccagctgactgtgaatgtggtggccgtcatcgtggccttcaccggggcctgcatcacccaggacagccccctgaaggctgtgcagatgctgtgggtgaacctgatcatggacacctttgccagcctggccctggccacagagcccccaacagagaccctgctgctgaggaagccctatggaagaaacaagcccctcatcagcaggaccatgatgaagaacatcctgggccatgctgtgtaccagctggccctgatcttcaccctgctgtttgtgggggagaagatgttccagattgacagcggcagaaatgcccccctgcacagccccccatctgagcactacaccatcatcttcaacacctttgtgatgatgcagctgttcaatgagatcaatgccaggaagatccacggggagagaaatgtgtttgatggcatcttcaggaaccccatcttctgcaccatcgtgctgggcacctttgccatccagatcgtgattgtgcagtttggaggcaagcccttcagctgcagccccctgcagctggaccagtggatgtggtgcatcttcatcggcctgggggagctggtgtggggccaggtgattgccaccatccccaccagccggctgaagttcctgaaggaggccggccgcctgacccagaaggaggagatccctgaggaggagctgaatgaagatgtggaggagattgaccacgccgagcgggagctgcggcggggccagatcctgtggttccggggcctgaaccgcatccagacccagatccgggtggtgaaggccttccgcagcagcctgtatgagggcctggagaagccagagagcaggaccagcatccacaacttcatggcccaccctgagttcagaattgaggacagccagccccacatccccctgattgatgacacagacctggaggaggatgctgccctgaagcagaacagcagcccccccagcagcctgaacaagaacaacagcgccatcgacagcggcatcaacctgaccacagacaccagcaagagcgccaccagcagcagccctggcagccccatccacagcctggagaccagcctgtag

SEQ ID NO: 144378 - DNA, 3537 bp, synthetic construct
  misc_feature 1..3537: note = Description of Artificial Sequence: Synthetic coding sequence
  source 1..3537: mol_type = other DNA
atggagctgcggggcacagaggccgtggtgaagatcaaggagacctacggggacacagaggccatctgccggcggctgaagaccagccctgtggagggcctgcctggaacagccccagacctggagaagaggaagcagatcttcggccagaacttcatcccccccaagaagcccaagaccttcctgcagctggtgtgggaggccctgcaggatgtgaccctcatcatcctggagattgctgccatcatcagcctgggcctgtccttctaccaccccccaggagagggcaatgaaggctgtgccacagcccagggcggcgcagaagatgaaggagaggccgaggccggctggattgagggcgccgccatcctgctgagcgtcatctgtgtggtgctggtgacagccttcaatgactggagcaaggagaagcagttccggggcctgcagagccgcatcgagcaggagcagaagttcaccgtggtgcgggccggccaggtggtgcagatccctgtggccgagatcgtggtgggggacatcgcccaggtgaagtacggggacctgctgcctgcagatggcctcttcatccagggcaatgacctgaagattgatgagagcagcctgaccggggagagtgaccaggtgaggaagtctgtggacaaggaccccatgctgctgagcggcacccacgtgatggagggcagcggccgcatgctggtgacagctgtgggcgtgaacagccagacaggcatcatcttcaccctgctgggcgccggcggggaggaggaggagaagaaggacaagaagggcaagatgcaggatggaaatgtggatgccagccagagcaaggccaagcagcaggatggagctgctgccatggagatgcagcccctgaagtctgctgagggcggagatgctgatgacaggaagaaggcctccatgcacaagaaggagaagtctgtgctgcagggcaagctgaccaagctggccgtgcagatcggcaaggccggcctggtgatgtctgccatcaccgtcatcatcctggtgctgtacttcaccgtggacacctttgtggtgaacaagaagccctggctgcctgagtgcacccctgtgtatgtgcagtactttgtgaagttcttcatcattggagtgacagtgctggtggtggccgtgcctgagggcctgcccctggccgtgaccatcagcctggcctacagcgtgaagaagatgatgaaggacaacaacctggtgcgccacctggatgcctgtgagaccatgggaaatgccacagccatctgcagcgacaagacaggcaccctgaccaccaacaggatgacagtggtgcaggcctacgtgggagatgtgcactacaaggagatcccagaccccagcagcatcaacaccaagaccatggagctgctgatcaatgccatcgccatcaacagcgcctacaccaccaagatcctgcccccagagaaggagggcgccctgccccggcaggtgggcaacaagacagaatgtggcctgctgggctttgtgctggacctgaagcaggactatgagcctgtgcgcagccagatgcctgaggagaagctgtacaaggtgtacaccttcaacagcgtgaggaagtccatgagcaccgtcatcaagctgcctgatgagagcttcaggatgtacagcaagggggccagcgagatcgtgctgaagaagtgctgcaagatcctgaatggagctggggagcccagggtcttccggccccgggacagagatgagatggtgaagaaggtgattgagcccatggcctgtgatggcctgcggaccatctgtgtggcctacagagacttccccagcagccctgagccagactgggacaatgaaaatgacatcctgaatgagctgacctgcatctgtgtggtgggcattgaagatcctgtgcggcctgaggtgcctgaggccatcaggaagtgccagagagctggcatcaccgtgaggatggtgactggagacaacatcaacacagcccgggccatcgccatcaagtgtggcatcatccaccctggagaggacttcctgtgcctggagggcaaggagttcaacagacgcatcagaaatgaaaaaggagaaattgagcaggagagaattgacaagatctggcccaagctgcgggtgctggcccggagcagccccacagacaagcacaccctggtgaagggcatcatcgacagcacccacacagagcagaggcaggtggtggccgtgactggagatggcaccaatgatggccctgccctgaagaaggcagatgtgggctttgccatgggcattgctggaacagatgtggccaaggaggccagtgacatcatcctgacagatgacaacttcagcagcatcgtgaaggctgtgatgtggggcagaaatgtgtatgacagcatcagcaagttcctgcagttccagctgactgtgaatgtggtggccgtcatcgtggccttcaccggggcctgcatcacccaggacagccccctgaaggctgtgcagatgctgtgggtgaacctgatcatggacacctttgccagcctggccctggccacagagcccccaacagagaccctgctgctgaggaagccctatggaagaaacaagcccctcatcagcaggaccatgatgaagaacatcctgggccatgctgtgtaccagctggccctgatcttcaccctgctgtttgtgggggagaagatgttccagattgacagcggcagaaatgcccccctgcacagccccccatctgagcactacaccatcatcttcaacacctttgtgatgatgcagctgttcaatgagatcaatgccaggaagatccacggggagagaaatgtgtttgatggcatcttcaggaaccccatcttctgcaccatcgtgctgggcacctttgccatccagatcgtgattgtgcagtttggaggcaagcccttcagctgcagccccctgcagctggaccagtggatgtggtgcatcttcatcggcctgggggagctggtgtggggccaggtgattgccaccatccccaccagccggctgaagttcctgaaggaggccggccgcctgacccagaaggaggagatccctgaggaggagctgaatgaagatgtggaggagattgaccacgccgagcgggagctgcggcggggccagatcctgtggttccggggcctgaaccgcatccagacccagatccgggtggtgaaggccttccgcagcagcctgtatgagggcctggagaagccagagagcaggaccagcatccacaacttcatggcccaccctgagttcagaattgaggacagccagccccacatccccctgattgatgacacagacctggaggaggatgctgccctgaagcagaacagcagcccccccagcagcctgaacaagaacaacagcgccatcgacagcggcatcaacctgaccacagacaccagcaagagcgccaccagcagcagccctggcagccccatccacagcctggagaccagcctgtag

SEQ ID NO: 144379 - DNA, 3663 bp, synthetic construct
  misc_feature 1..3663: note = Description of Artificial Sequence: Synthetic coding sequence
  source 1..3663: mol_type = other DNA
atgggagacatggccaacagcagcattgagttccaccccaagccccagcagcagagagatgtgccccaggccggcggcttcggctgcaccctggccgagctgcggaccctgatggagctgcggggagctgaggccctgcagaagattgaggaggcctatggagatgtgtctggcctgtgccggcggctgaagaccagccccacagagggcctggccgacaacaccaatgacctggagaagaggcggcagatctacggccagaacttcatcccccccaagcagcccaagaccttcctgcagctggtgtgggaggccctgcaggatgtgaccctcatcatcctggaggtggccgccatcgtgtccctgggcctgtccttctacgcccctcctggagaggagagcgaggcctgtggaaatgtgtctggaggagcagaagatgaaggagaggccgaggccggctggattgaaggagctgccatcctgctgagcgtcatctgtgtggtgctggtgacagccttcaatgactggagcaaggagaagcagttccggggcctgcagagcagaattgagcaggagcagaagttcaccgtcatcagaaatggccagctgctgcaggtgcctgtggccgccctggtggtgggggacatcgcccaggtgaagtatggagacctgctgcctgcagatggagtgctgatccaggccaatgacctgaagattgatgagagcagcctgactggagagagtgaccacgtgaggaagtctgctgacaaggaccccatgctgctgagcggcacccacgtgatggagggcagcggccgcatggtggtgacagctgtgggcgtgaacagccagacaggcatcatcttcaccctgctgggcgctggaggagaggaggaggagaagaaggacaagaagggcaagcagcaggatggagccatggagagcagccagaccaaggccaagaagcaggatggagctgtggccatggagatgcagcccctgaagtctgctgagggcggggagatggaggagcgggagaagaagaaggccaatgcccccaagaaggagaagtctgtgctgcagggcaagctgaccaagctggccgtgcagatcggcaaggccggcctggtgatgtctgccatcaccgtcatcatcctggtgctgtacttcgtcatcgagacctttgtggtggagggccgcacctggctggctgaatgtacccctgtgtatgtgcagtactttgtgaagttcttcatcatcggcgtgacagtgctggtggtggccgtgcctgagggcctgcccctggccgtgaccatcagcctggcctacagcgtgaagaagatgatgaaggacaacaacctggtgcgccacctggatgcctgtgagaccatgggaaatgccacagccatctgcagcgacaagacaggcaccctgaccaccaacaggatgacagtggtgcagagctacctgggggacacccactacaaggagatcccagcccccagcgccctgacccccaagatcctggacctgctggtgcacgccatcagcatcaacagcgcctacaccaccaagatcctgcccccagagaaggagggcgccctgccccggcaggtgggcaacaagacagaatgtgccctgctgggctttgtgctggacctgaagagggacttccagcctgtgcgggagcagatccctgaggacaagctgtacaaggtgtacaccttcaacagcgtgaggaagtccatgagcaccgtcatccgcatgccagatggcggcttccgcctcttcagcaaaggagccagcgagatcctgctgaagaagtgcaccaacatcctgaacagcaatggagagctgcggggcttccggccccgggacagagatgacatggtgaggaagatcatcgagcccatggcctgtgatggcctgcggaccatctgcatcgcctacagagacttctctgctggccaggagccagactgggacaatgaaaatgaggtggtgggggacctgacctgcatcgctgtggtgggcatcgaggaccctgtgcggcctgaggtgcctgaggccatcaggaagtgccagagagctggcatcaccgtgaggatggtgactggagacaacatcaacacagcccgggccatcgccgccaagtgtggcatcatccagcccggggaggacttcctgtgcctggagggcaaggagttcaacagacgcatcagaaatgagaagggggagattgagcaggagcggctggacaaggtgtggcccaagctgcgggtgctggcccggagcagccccacagacaagcacaccctggtgaagggcatcatcgacagcaccaccggggagcagaggcaggtggtggccgtgactggagatggcaccaatgatggccctgccctgaagaaggcagatgtgggctttgccatgggcattgctggaacagatgtggccaaggaggccagtgacatcatcctgacagatgacaacttcaccagcatcgtgaaggctgtgatgtggggcagaaatgtgtatgacagcatcagcaagttcctgcagttccagctgactgtgaatgtggtggccgtgattgtggccttcaccggggcctgcatcacccaggacagccccctgaaggctgtgcagatgctgtgggtgaacctgatcatggacacctttgccagcctggccctggccacagagcccccaacagagagcctgctgctgaggaagccctacggccgggacaagcccctcatcagcaggaccatgatgaagaacatcctgggccatgctgtgtaccagctggccatcatcttcaccctgctgtttgtgggggagctgttctttgatattgattctggaagaaatgcccccctgcacagcccccccagcgagcactacaccatcatcttcaacacctttgtgatgatgcagctgttcaatgagatcaatgccaggaagatccatggagagagaaatgtgtttgatggcatcttcagcaaccccatcttctgcaccatcgtgctgggcaccttcggcatccagatcgtcatcgtgcagtttggaggcaagcccttcagctgcagccccctgagcacagagcagtggctgtggtgcctgtttgtgggcgtgggggagctggtgtggggccaggtgattgccaccatccccaccagccagctgaagtgcctgaaggaggccggccacggccctgggaaggatgagatgacagatgaggagctggccgagggggaggaggagattgaccatgctgagcgggagctgcggcggggccagatcctgtggttccggggcctgaaccgcatccagacccagatccgggtggtgaaggccttccgcagcagcctgtatgagggcctggagaagccagagagcaagaccagcatccacaacttcatggccaccccagagttcctgatcaatgactacacccacaacatccccctgattgatgacacagatgtggatgaaaatgaggagcggctgcgggcccctcctccacccagccccaaccagaacaacaatgccatcgacagcggcatctacctgaccacccacgtgaccaagagcgccaccagctctgtgttcagcagcagccctggcagccccctgcacagcgtggagaccagcctgtag

SEQ ID NO: 144380 - DNA, 3663 bp, synthetic construct; identical to SEQ ID NO: 144379
  misc_feature 1..3663: note = Description of Artificial Sequence: Synthetic coding sequence
  source 1..3663: mol_type = other DNA

SEQ ID NO: 144381 - DNA, 3522 bp, synthetic construct
  misc_feature 1..3522: note = Description of Artificial Sequence: Synthetic coding sequence
  source 1..3522: mol_type = other DNA
atgggagacatggccaacagcagcattgagttccaccccaagccccagcagcagagagatgtgccccaggccggcggcttcggctgcaccctggccgagctgcggaccctgatggagctgcggggagctgaggccctgcagaagattgaggaggcctatggagatgtgtctggcctgtgccggcggctgaagaccagccccacagagggcctggccgacaacaccaatgacctggagaagaggcggcagatctacggccagaacttcatcccccccaagcagcccaagaccttcctgcagctggtgtgggaggccctgcaggatgtgaccctcatcatcctggaggtggccgccatcgtgtccctgggcctgtccttctacgcccctcctggagaggagagcgaggcctgtggaaatgtgtctggaggagcagaagatgaaggagaggccgaggccggctggattgaaggagctgccatcctgctgagcgtcatctgtgtggtgctggtgacagccttcaatgactggagcaaggagaagcagttccggggcctgcagagcagaattgagcaggagcagaagttcaccgtcatcagaaatggccagctgctgcaggtgcctgtggccgccctggtggtgggggacatcgcccaggtgaagtatggagacctgctgcctgcagatggagtgctgatccaggccaatgacctgaagattgatgagagcagcctgactggagagagtgaccacgtgaggaagtctgctgacaaggaccccatgctgctgagcggcacccacgtgatggagggcagcggccgcatggtggtgacagctgtgggcgtgaacagccagacaggcatcatcttcaccctgctgggcgctggaggagaggaggaggagaagaaggacaagaagggcaagcagcaggatggagccatggagagcagccagaccaaggccaagaagcaggatggagctgtggccatggagatgcagcccctgaagtctgctgagggcggggagatggaggagcgggagaagaagaaggccaatgcccccaagaaggagaagtctgtgctgcagggcaagctgaccaagctggccgtgcagatcggcaaggccggcctggtgatgtctgccatcaccgtcatcatcctggtgctgtacttcgtcatcgagacctttgtggtggagggccgcacctggctggctgaatgtacccctgtgtatgtgcagtactttgtgaagttcttcatcatcggcgtgacagtgctggtggtggccgtgcctgagggcctgcccctggccgtgaccatcagcctggcctacagcgtgaagaagatgatgaaggacaacaacctggtgcgccacctggatgcctgtgagaccatgggaaatgccacagccatctgcagcgacaagacaggcaccctgaccaccaacaggatgacagtggtgcagagctacctgggggacacccactacaaggagatcccagcccccagcgccctgacccccaagatcctggacctgctggtgcacgccatcagcatcaacagcgcctacaccaccaagatcctgcccccagagaaggagggcgccctgccccggcaggtgggcaacaagacagaatgtgccctgctgggctttgtgctggacctgaagagggacttccagcctgtgcgggagcagatccctgaggacaagctgtacaaggtgtacaccttcaacagcgtgaggaagtccatgagcaccgtcatccgcatgccagatggcggcttccgcctcttcagcaaaggagccagcgagatcctgctgaagaagtgcaccaacatcctgaacagcaatggagagctgcggggcttccggccccgggacagagatgacatggtgaggaagatcatcgagcccatggcctgtgatggcctgcggaccatctgcatcgcctacagagacttctctgctggccaggagccagactgggacaatgaaaatgaggtggtgggggacctgacctgcatcgctgtggtgggcatcgaggaccctgtgcggcctgaggtgcctgaggccatcaggaagtgccagagagctggcatcaccgtgaggatggtgactggagacaacatcaacacagcccgggccatcgccgccaagtgtggcatcatccagcccggggaggacttcctgtgcctggagggcaaggagttcaacagacgcatcagaaatgagaagggggagattgagcaggagcggctggacaaggtgtggcccaagctgcgggtgctggcccggagcagccccacagacaagcacaccctggtgaagggcatcatcgacagcaccaccggggagcagaggcaggtggtggccgtgactggagatggcaccaatgatggccctgccctgaagaaggcagatgtgggctttgccatgggcattgctggaacagatgtggccaaggaggccagtgacatcatcctgacagatgacaacttcaccagcatcgtgaaggctgtgatgtggggcagaaatgtgtatgacagcatcagcaagttcctgcagttccagctgactgtgaatgtggtggccgtgattgtggccttcaccggggcctgcatcacccaggacagccccctgaaggctgtgcagatgctgtgggtgaacctgatcatggacacctttgccagcctggccctggccacagagcccccaacagagagcctgctgctgaggaagccctacggccgggacaagcccctcatcagcaggaccatgatgaagaacatcctgggccatgctgtgtaccagctggccatcatcttcaccctgctgtttgtgggggagctgttctttgatattgattctggaagaaatgcccccctgcacagcccccccagcgagcactacaccatcatcttcaacacctttgtgatgatgcagctgttcaatgagatcaatgccaggaagatccatggagagagaaatgtgtttgatggcatcttcagcaaccccatcttctgcaccatcgtgctgggcaccttcggcatccagatcgtcatcgtgcagtttggaggcaagcccttcagctgcagccccctgagcacagagcagtggctgtggtgcctgtttgtgggcgtgggggagctggtgtggggccaggtgattgccaccatccccaccagccagctgaagtgcctgaaggaggccggccacggccctgggaaggatgagatgacagatgaggagctggccgagggggaggaggagattgaccatgctgagcgggagctgcggcggggccagatcctgtggttccggggcctgaaccgcatccagacccagatggaggtggtgtccaccttcaagaggagcggctctgtgcagggcgctgtgagaagaagaagctctgtgctgagccagctgcatgatgtgaccaacctgagcacccccacccacgccatcctgtctgctgccaaccccaccagcgctgctggcaaccctggaggagagagcgtgccctag

SEQ ID NO: 144382 - DNA, 3480 bp, synthetic construct
  misc_feature 1..3480: note = Description of Artificial Sequence: Synthetic coding sequence
  source 1..3480: mol_type = other DNA
atgggagacatggccaacagcagcattgagttccaccccaagccccagcagcagagagatgtgccccaggccggcggcttcggctgcaccctggccgagctgcggaccctgatggagctgcggggagctgaggccctgcagaagattgaggaggcctatggagatgtgtctggcctgtgccggcggctgaagaccagccccacagagggcctggccgacaacaccaatgacctggagaagaggcggcagatctacggccagaacttcatcccccccaagcagcccaagaccttcctgcagctggtgtgggaggccctgcaggatgtgaccctcatcatcctggaggtggccgccatcgtgtccctgggcctgtccttctacgcccctcctggagaggagagcgaggcctgtggaaatgtgtctggaggagcagaagatgaaggagaggccgaggccggctggattgaaggagctgccatcctgctgagcgtcatctgtgtggtgctggtgacagccttcaatgactggagcaaggagaagcagttccggggcctgcagagcagaattgagcaggagcagaagttcaccgtcatcagaaatggccagctgctgcaggtgcctgtggccgccctggtggtgggggacatcgcccaggtgaagtatggagacctgctgcctgcagatggagtgctgatccaggccaatgacctgaagattgatgagagcagcctgactggagagagtgaccacgtgaggaagtctgctgacaaggaccccatgctgctgagcggcacccacgtgatggagggcagcggccgcatggtggtgacagctgtgggcgtgaacagccagacaggcatcatcttcaccctgctgggcgctggaggagaggaggaggagaagaaggacaagaaggccaagaagcaggatggagctgtggccatggagatgcagcccctgaagtctgctgagggcggggagatggaggagcgggagaagaagaaggccaatgcccccaagaaggagaagtctgtgctgcagggcaagctgaccaagctggccgtgcagatcggcaaggccggcctggtgatgtctgccatcaccgtcatcatcctggtgctgtacttcgtcatcgagacctttgtggtggagggccgcacctggctggctgaatgtacccctgtgtatgtgcagtactttgtgaagttcttcatcatcggcgtgacagtgctggtggtggccgtgcctgagggcctgcccctggccgtgaccatcagcctggcctacagcgtgaagaagatgatgaaggacaacaacctggtgcgccacctggatgcctgtgagaccatgggaaatgccacagccatctgcagcgacaagacaggcaccctgaccaccaacaggatgacagtggtgcagagctacctgggggacacccactacaaggagatcccagcccccagcgccctgacccccaagatcctggacctgctggtgcacgccatcagcatcaacagcgcctacaccaccaagatcctgcccccagagaaggagggcgccctgccccggcaggtgggcaacaagacagaatgtgccctgctgggctttgtgctggacctgaagagggacttccagcctgtgcgggagcagatccctgaggacaagctgtacaaggtgtacaccttcaacagcgtgaggaagtccatgagcaccgtcatccgcatgccagatggcggcttccgcctcttcagcaaaggagccagcgagatcctgctgaagaagtgcaccaacatcctgaacagcaatggagagctgcggggcttccggccccgggacagagatgacatggtgaggaagatcatcgagcccatggcctgtgatggcctgcggaccatctgcatcgcctacagagacttctctgctggccaggagccagactgggacaatgaaaatgaggtggtgggggacctgacctgcatcgctgtggtgggcatcgaggaccctgtgcggcctgaggtgcctgaggccatcaggaagtgccagagagctggcatcaccgtgaggatggtgactggagacaacatcaacacagcccgggccatcgccgccaagtgtggcatcatccagcccggggaggacttcctgtgcctggagggcaaggagttcaacagacgcatcagaaatgagaagggggagattgagcaggagcggctggacaaggtgtggcccaagctgcgggtgctggcccggagcagccccacagacaagcacaccctggtgaagggcatcatcgacagcaccaccggggagcagaggcaggtggtggccgtgactggagatggcaccaatgatggccctgccctgaagaaggcagatgtgggctttgccatgggcattgctggaacagatgtggccaaggaggccagtgacatcatcctgacagatgacaacttcaccagcatcgtgaaggctgtgatgtggggcagaaatgtgtatgacagcatcagcaagttcctgcagttccagctgactgtgaatgtggtggccgtgattgtggccttcaccggggcctgcatcacccaggacagccccctgaaggctgtgcagatgctgtgggtgaacctgatcatggacacctttgccagcctggccctggccacagagcccccaacagagagcctgctgctgaggaagccctacggccgggacaagcccctcatcagcaggaccatgatgaagaacatcctgggccatgctgtgtaccagctggccatcatcttcaccctgctgtttgtgggggagctgttctttgatattgattctggaagaaatgcccccctgcacagcccccccagcgagcactacaccatcatcttcaacacctttgtgatgatgcagctgttcaatgagatcaatgccaggaagatccatggagagagaaatgtgtttgatggcatcttcagcaaccccatcttctgcaccatcgtgctgggcaccttcggcatccagatcgtcatcgtgcagtttggaggcaagcccttcagctgcagccccctgagcacagagcagtggctgtggtgcctgtttgtgggcgtgggggagctggtgtggggccaggtgattgccaccatccccaccagccagctgaagtgcctgaaggaggccggccacggccctgggaaggatgagatgacagatgaggagctggccgagggggaggaggagattgaccatgctgagcgggagctgcggcggggccagatcctgtggttccggggcctgaaccgcatccagacccagatggaggtggtgtccaccttcaagaggagcggctctgtgcagggcgctgtgagaagaagaagctctgtgctgagccagctgcatgatgtgaccaacctgagcacccccacccacgccatcctgtctgctgccaaccccaccagcgctgctggcaaccctggaggagagagcgtgccctag

SEQ ID NO: 144383 - DNA, 3480 bp, synthetic construct; identical to SEQ ID NO: 144382
  misc_feature 1..3480: note = Description of Artificial Sequence: Synthetic coding sequence
  source 1..3480: mol_type = other DNA

SEQ ID NO: 144384 - DNA, 3465 bp, synthetic construct
  misc_feature 1..3465: note = Description of Artificial Sequence: Synthetic coding sequence
  source 1..3465: mol_type = other DNA
atgggagacatggccaacagcagcattgagttccaccccaagccccagcagcagagagatgtgccccaggccggcggcttcggctgcaccctggccgagctgcggaccctgatggagctgcggggagctgaggccctgcagaagattgaggaggcctatggagatgtgtctggcctgtgccggcggctgaagaccagccccacagagggcctggccgacaacaccaatgacctggagaagaggcggcagatctacggccagaacttcatcccccccaagcagcccaagaccttcctgcagctggtgtgggaggccctgcaggatgtgaccctcatcatcctggaggtggccgccatcgtgtccctgggcctgtccttctacgcccctcctggagaggagagcgaggcctgtggaaatgtgtctggaggagcagaagatgaaggagaggccgaggccggctggattgaaggagctgccatcctgctgagcgtcatctgtgtggtgctggtgacagccttcaatgactggagcaaggagaagcagttccggggcctgcagagcagaattgagcaggagcagaagttcaccgtcatcagaaatggccagctgctgcaggtgcctgtggccgccctggtggtgggggacatcgcccaggtgaagtatggagacctgctgcctgcagatggagtgctgatccaggccaatgacctgaagattgatgagagcagcctgactggagagagtgaccacgtgaggaagtctgctgacaaggaccccatgctgctgagcggcacccacgtgatggagggcagcggccgcatggtggtgacagctgtgggcgtgaacagccagacaggcatcatcttcaccctgctgggcgctggaggagaggaggaggagaagaaggacaagaaggccaagaagcaggatggagctgtggccatggagatgcagcccctgaagtctgctgagggcggggagatggaggagcgggagaagaagaaggccaatgcccccaagaaggagaagtctgtgctgcagggcaagctgaccaagctggccgtgcagatcggcaaggccggcctggtgatgtctgccatcaccgtcatcatcctggtgctgtacttcgtcatcgagacctttgtggtggagggccgcacctggctggctgaatgtacccctgtgtatgtgcagtactttgtgaagttcttcatcatcggcgtgacagtgctggtggtggccgtgcctgagggcctgcccctggccgtgaccatcagcctggcctacagcgtgaagaagatgatgaaggacaacaacctggtgcgccacctggatgcctgtgagaccatgggaaatgccacagccatctgcagcgacaagacaggcaccctgaccaccaacaggatgacagtggtgcagagctacctgggggacacccactacaaggagatcccagcccccagcgccctgacccccaagatcctggacctgctggtgcacgccatcagcatcaacagcgcctacaccaccaagatcctgcccccagagaaggagggcgccctgccccggcaggtgggcaacaagacagaatgtgccctgctgggctttgtgctggacctgaagagggacttccagcctgtgcgggagcagatccctgaggacaagctgtacaaggtgtacaccttcaacagcgtgaggaagtccatgagcaccgtcatccgcatgccagatggcggcttccgcctcttcagcaaaggagccagcgagatcctgctgaagaagtgcaccaacatcctgaacagcaatggagagctgcggggcttccggccccgggacagagatgacatggtgaggaagatcatcgagcccatggcctgtgatggcctgcggaccatctgcatcgcctacagagacttctctgctggccaggagccagactgggacaatgaaaatgaggtggtgggggacctgacctgcatcgctgtggtgggcatcgaggaccctgtgcggcctgaggtgcctgaggccatcaggaagtgccagagagctggcatcaccgtgaggatggtgactggagacaacatcaacacagcccgggccatcgccgccaagtgtggcatcatccagcccggggaggacttcctgtgcctggagggcaaggagttcaacagacgcatcagaaatgagaagggggagattgagcaggagcggctggacaaggtgtggcccaagctgcgggtgctggcccggagcagccccacagacaagcacaccctggtgaagggcatcatcgacagcaccaccggggagcagaggcaggtggtggccgtgactggagatggcaccaatgatggccctgccctgaagaaggcagatgtgggctttgccatgggcattgctggaacagatgtggccaaggaggccagtgacatcatcctgacagatgacaacttcaccagcatcgtgaaggctgtgatgtggggcagaaatgtgtatgacagcatcagcaagttcctgcagttccagctgactgtgaatgtggtggccgtgattgtggccttcaccggggcctgcatcacccaggacagccccctgaaggctgtgcagatgctgtgggtgaacctgatcatggacacctttgccagcctggccctggccacagagcccccaacagagagcctgctgctgaggaagccctacggccgggacaagcccctcatcagcaggaccatgatgaagaacatcctgggccatgctgtgtaccagctggccatcatcttcaccctgctgtttgtgggggagctgttctttgatattgattctggaagaaatgcccccctgcacagcccccccagcgagcactacaccatcatcttcaacacctttgtgatgatgcagctgttcaatgagatcaatgccaggaagatccatggagagagaaatgtgtttgatggcatcttcagcaaccccatcttctgcaccatcgtgctgggcaccttcggcatccagatcgtcatcgtgcagtttggaggcaagcccttcagctgcagccccctgagcacagagcagtggctgtggtgcctgtttgtgggcgtgggggagctggtgtggggccaggtgattgccaccatccccaccagccagctgaagtgcctgaaggaggccggccacggccctgggaaggatgagatgacagatgaggagctggccgagggggaggaggagattgaccatgctgagcgggagctgcggcggggccagatcctgtggttccggggcctgaaccgcatccagacccagatggaggtggtgtccaccttcaagaggagcggctctgtgcagggcgctgtgagaagaagaagctctgtgctgagccagctgcatgatgtgaccaacctgagcacccccacccacgccatcctgtctgctgccaaccccaccagcgctgctggcagcgagagctag

SEQ ID NO: 144385 - DNA, 3513 bp, synthetic construct
  misc_feature 1..3513: note = Description of Artificial Sequence: Synthetic coding sequence
  source 1..3513: mol_type = other DNA
atgaccaaccccagcgacagagtgctgcctgccaacagcatggccgagagccgggagggggactttggctgcaccgtgatggagctgaggaagctgatggagctgcggagcagagatgccctgacccagatcaacgtgcactacggcggcgtgcagaacctgtgcagccggctgaagaccagccctgtggagggcctgagcggcaacccagctgacctggagaagaggcggcaggtgtttggccacaacgtcatcccccccaagaagcccaagaccttcctggagctggtgtgggaggccctgcaggatgtgaccctcatcatcctggagattgctgccatcatcagcctggtgctgtccttctacagacctgctggggaggagaatgagctgtgtggccaggtggccaccaccccagaagatgaaaatgaggcccaggccggctggattgagggcgccgccatcctcttcagcgtcatcatcgtggtgctggtgacagccttcaatgactggagcaaggagaagcagttccggggcctgcagtgccgcatcgagcaggagcagaagttcagcatcatcagaaatggccagctgatccagctgcctgtggccgagatcgtggtgggggacatcgcccaggtgaagtacggggacctgctgcctgcagatggcatcctgatccagggcaatgacctgaagattgatgagagcagcctgaccggggagagtgaccacgtgaagaagagcctggacaaggaccccatgctgctgagcggcacccacgtgatggagggcagcggccgcatggtggtgacagctgtgggcgtgaacagccagacaggcatcatcctgaccctgctgggcgtgaatgaagatgatgaaggagagaagaagaagaagggcaagaagcagggcgtgcctgagaacagaaacaaggccaagacccaggatggagtggccctggagatccagcccctgaacagccaggagggcatcgacaatgaggagaaggacaagaaggctgtgaaggtgcccaagaaggagaagtctgtgctgcagggcaagctgacccggctggccgtgcagatcggcaaggccggcctgctgatgtctgccctgaccgtcttcatcctgatcctgtacttcgtcatcgacaactttgtgatcaacagaagaccctggctgcctgaatgtacccccatctacatccagtactttgtgaagttcttcatcatcggcatcaccgtgctggtggtggccgtgcctgagggcctgcccctggccgtgaccatcagcctggcctacagcgtgaagaagatgatgaaggacaacaacctggtgcgccacctggatgcctgtgagaccatgggaaatgccacagccatctgcagcgacaagacaggcaccctgaccatgaacaggatgacagtggtgcaggcctacatcggcggcatccactaccggcagatccccagcccagatgtgttcctgcccaaggtgctggacctgattgtgaatggcatcagcatcaacagcgcctacaccagcaagatcctgcccccagagaaggagggcggcctgccccggcaggtgggcaacaagacagaatgtgccctgctgggctttgtgacagacctgaagcaggactaccaggccgtgagaaatgaggtgcctgaggagaagctgtacaaggtgtacaccttcaacagcgtgaggaagtccatgagcaccgtcatccggaaccccaatggaggcttcaggatgtacagcaaaggagccagcgagatcatcctgaggaagtgcaaccgcatcctggacaggaagggggaggccgtgcccttcaagaacaaggacagagatgacatggtgaggacagtgattgagcccatggcctgtgatggcctgcggaccatctgcatcgcctacagagactttgatgacacagagcccagctgggacaatgaaaatgagatcctgacagagctgacctgcatcgctgtggtgggcattgaagatcctgtgcggcctgaggtgcctgatgccatcgccaagtgcaagcaggccggcatcaccgtgaggatggtgactggagacaacatcaacacagcccgggccatcgccaccaagtgtggcatcctgaccccaggagatgacttcctgtgcctggagggcaaggagttcaacagactcatcagaaatgaaaaaggagaggtggagcaggagaagctggacaagatctggcccaagctgcgggtgctggcccggagcagccccacagacaagcacaccctggtgaagggcatcatcgacagcacagtgggggagcaccggcaggtggtggccgtgactggagatggcaccaatgatggccctgccctgaagaaggcagatgtgggctttgccatgggcattgctggaacagatgtggccaaggaggccagtgacatcatcctgacagatgacaacttcaccagcatcgtgaaggctgtgatgtggggcagaaatgtgtatgacagcatcagcaagttcctgcagttccagctgactgtgaatgtggtggccgtcatcgtggccttcaccggggcctgcatcacccaggacagccccctgaaggctgtgcagatgctgtgggtgaacctgatcatggacacctttgccagcctggccctggccacagagcccccaacagagagcctgctgaagaggcggccctatggaagaaacaagcccctcatcagcaggaccatgatgaagaacatcctgggccacgccttctaccagctgattgtcatcttcatcctggtgtttgctggggagaagttctttgacatcgacagcggcaggaaggcccccctgcacagcccccccagccagcactacaccatcgtgttcaacacctttgtgctgatgcagctgttcaatgagatcaacagcaggaagatccacggggagaagaatgtgttttctggcatctacagaaacatcatcttctgcagcgtggtgctgggcaccttcatctgccagatcttcatcgtggagtttggaggcaagcccttcagctgcaccagcctgagcctgagccagtggctgtggtgcctcttcatcggcattggagagctgctgtggggccagttcatcagcgccatccccaccaggagcctgaagttcctgaaggaggccggccacggcaccaccaaggaggagatcaccaaggatgctgagggcctggatgaaattgaccacgccgagatggagctgcggcggggccagatcctgtggttccggggcctgaaccgcatccagacccagattgatgtgatcaacaccttccagacaggagccagcttcaagggcgtgctgcggcggcagaacatgggccagcacctggatgtgaagctggtgcccagcagcagctatgtggccgtggcccctgtgaagagcagccccaccacctctgtgcctgctgtgagcagcccccccatgggcaaccagagcggccagagcgtgccctag

SEQ ID NO: 144386 - DNA, 390 bp, synthetic construct
  misc_feature 1..390: note = Description of Artificial Sequence: Synthetic coding sequence
  source 1..390: mol_type = other DNA
tgaattggagagctgctgtggggccagttcatcagcgccatccccaccaggagcctgaagttcctgaaggaggccggccacggcaccaccaaggaggagatcaccaaggatgctgagggcctggatgaaattgaccatgctgagatggagctgcggcggggccagatcctgtggttccggggcctgaaccgcatccagacccagattgatgtgatcaacaccttccagacaggagccagcttcaagggcgtgctgcggcggcagaacatgggccagcacctggatgtgaagctggtgcccagcagcagctatgtggccgtggcccctgtgaagagcagccccaccacctctgtgcctgctgtgagcagcccccccatgggcagcgagtag

SEQ ID NO: 144387 - DNA, 3618 bp, synthetic construct
  misc_feature 1..3618: note = Description of Artificial Sequence: Synthetic coding sequence
  source 1..3618: mol_type = other DNA
atgaccaaccccagcgacagagtgctgcctgccaacagcatggccgagagccgggagggggactttggctgcaccgtgatggagctgaggaagctgatggagctgcggagcagagatgccctgacccagatcaacgtgcactacggcggcgtgcagaacctgtgcagccggctgaagaccagccctgtggagggcctgagcggcaacccagctgacctggagaagaggcggcaggtgtttggccacaacgtcatcccccccaagaagcccaagaccttcctggagctggtgtgggaggccctgcaggatgtgaccctcatcatcctggagattgctgccatcatcagcctggtgctgtccttctacagacctgctggggaggagaatgagctgtgtggccaggtggccaccaccccagaagatgaaaatgaggcccaggccggctggattgagggcgccgccatcctcttcagcgtcatcatcgtggtgctggtgacagccttcaatgactggagcaaggagaagcagttccggggcctgcagtgccgcatcgagcaggagcagaagttcagcatcatcagaaatggccagctgatccagctgcctgtggccgagatcgtggtgggggacatcgcccaggtgaagtacggggacctgctgcctgcagatggcatcctgatccagggcaatgacctgaagattgatgagagcagcctgaccggggagagtgaccacgtgaagaagagcctggacaaggaccccatgctgctgagcggcacccacgtgatggagggcagcggccgcatggtggtgacagctgtgggcgtgaacagccagacaggcatcatcctgaccctgctgggcgtgaatgaagatgatgaaggagagaagaagaagaagggcaagaagcagggcgtgcctgagaacagaaacaaggccaagacccaggatggagtggccctggagatccagcccctgaacagccaggagggcatcgacaatgaggagaaggacaagaaggctgtgaaggtgcccaagaaggagaagtctgtgctgcagggcaagctgacccggctggccgtgcagatcggcaaggccggcctgctgatgtctgccctgaccgtcttcatcctgatcctgtacttcgtcatcgacaactttgtgatcaacagaagaccctggctgcctgaatgtacccccatctacatccagtactttgtgaagttcttcatcatcggcatcaccgtgctggtggtggccgtgcctgagggcctgcccctggccgtgaccatcagcctggcctacagcgtgaagaagatgatgaaggacaacaacctggtgcgccacctggatgcctgtgagaccatgggaaatgccacagccatctgcagcgacaagacaggcaccctgaccatgaacaggatgacagtggtgcaggcctacatcggcggcatccactaccggcagatccccagcccagatgtgttcctgcccaaggtgctggacctgattgtgaatggcatcagcatcaacagcgcctacaccagcaagatcctgcccccagagaaggagggcggcctgccccggcaggtgggcaacaagacagaatgtgccctgctgggctttgtgacagacctgaagcaggactaccaggccgtgagaaatgaggtgcctgaggagaagctgtacaaggtgtacaccttcaacagcgtgaggaagtccatgagcaccgtcatccggaaccccaatggaggcttcaggatgtacagcaaaggagccagcgagatcatcctgaggaagtgcaaccgcatcctggacaggaagggggaggccgtgcccttcaagaacaaggacagagatgacatggtgaggacagtgattgagcccatggcctgtgatggcctgcggaccatctgcatcgcctacagagactttgatgacacagagcccagctgggacaatgaaaatgagatcctgacagagctgacctgcatcgctgtggtgggcattgaagatcctgtgcggcctgaggtgcctgatgccatcgccaagtgcaagcaggccggcatcaccgtgaggatggtgactggagacaacatcaacacagcccgggccatcgccaccaagtgtggcatcctgaccccaggagatgacttcctgtgcctggagggcaaggagttcaacagactcatcagaaatgaaaaaggagaggtggagcaggagaagctggacaagatctggcccaagctgcgggtgctggcccggagcagccccacagacaagcacaccctggtgaagggcatcatcgacagcacagtgggggagcaccggcaggtggtggccgtgactggagatggcaccaatgatggccctgccctgaagaaggcagatgtgggctttgccatgggcattgctggaacagatgtggccaaggaggccagtgacatcatcctgacagatgacaacttcaccagcatcgtgaaggctgtgatgtggggcagaaatgtgtatgacagcatcagcaagttcctgcagttccagctgactgtgaatgtggtggccgtcatcgtggccttcaccggggcctgcatcacccaggacagccccctgaaggctgtgcagatgctgtgggtgaacctgatcatggacacctttgccagcctggccctggccacagagcccccaacagagagcctgctgaagaggcggccctatggaagaaacaagcccctcatcagcaggaccatgatgaagaacatcctgggccacgccttctaccagctgattgtcatcttcatcctggtgtttgctggggagaagttctttgacatcgacagcggcaggaaggcccccctgcacagcccccccagccagcactacaccatcgtgttcaacacctttgtgctgatgcagctgttcaatgagatcaacagcaggaagatccacggggagaagaatgtgttttctggcatctacagaaacatcatcttctgcagcgtggtgctgggcaccttcatctgccagatcttcatcgtggagtttggaggcaagcccttcagctgcaccagcctgagcctgagccagtggctgtggtgcctcttcatcggcattggagagctgctgtggggccagttcatcagcgccatccccaccaggagcctgaagttcctgaaggaggccggccacggcaccaccaaggaggagatcaccaaggatgctgagggcctggatgaaattgaccacgccgagatggagctgcggcggggccagatcctgtggttccggggcctgaaccgcatccagacccagatcaaggtggtgaaggccttccacagcagcctgcacgagagcatccagaagccctacaaccagaagagcatccacagcttcatgacccaccctgagtttgccatcgaggaggagctgcccaggacccccctgctggatgaggaggaggaggagaacccagacaaggccagcaagtttggcaccagggtgctgctgctggatggagaggtgaccccctatgccaacaccaacaacaatgctgtggactgcaaccaggtgcagctgccccagagcgacagcagcctgcagagcctggagacctctgtgtag

SEQ ID NO: 144388 - DNA, 3513 bp, synthetic construct; identical to SEQ ID NO: 144385
  misc_feature 1..3513: note = Description of Artificial Sequence: Synthetic coding sequence
  source 1..3513: mol_type = other DNA

SEQ ID NO: 144389 - DNA, 3477 bp, synthetic construct
  misc_feature 1..3477: note = Description of Artificial Sequence: Synthetic coding sequence
  source 1..3477: mol_type = other DNA
atgaccaaccccagcgacagagtgctgcctgccaacagcatggccgagagccgggagggggactttggctgcaccgtgatggagctgaggaagctgatggagctgcggagcagagatgccctgacccagatcaacgtgcactacggcggcgtgcagaacctgtgcagccggctgaagaccagccctgtggagggcctgagcggcaacccagctgacctggagaagaggcggcaggtgtttggccacaacgtcatcccccccaagaagcccaagaccttcctggagctggtgtgggaggccctgcaggatgtgaccctcatcatcctggagattgctgccatcatcagcctggtgctgtccttctacagacctgctggggaggagaatgagctgtgtggccaggtggccaccaccccagaagatgaaaatgaggcccaggccggctggattgagggcgccgccatcctcttcagcgtcatcatcgtggtgctggtgacagccttcaatgactggagcaaggagaagcagttccggggcctgcagtgccgcatcgagcaggagcagaagttcagcatcatcagaaatggccagctgatccagctgcctgtggccgagatcgtggtgggggacatcgcccaggtgaagtacggggacctgctgcctgcagatggcatcctgatccagggcaatgacctgaagattgatgagagcagcctgaccggggagagtgaccacgtgaagaagagcctggacaaggaccccatgctgctgagcggcacccacgtgatggagggcagcggccgcatggtggtgacagctgtgggcgtgaacagccagacaggcatcatcctgaccctgctgggcgtgaatgaagatgatgaaggagagaagaagaagaaggccaagacccaggatggagtggccctggagatccagcccctgaacagccaggagggcatcgacaatgaggagaaggacaagaaggctgtgaaggtgcccaagaaggagaagtctgtgctgcagggcaagctgacccggctggccgtgcagatcggcaaggccggcctgctgatgtctgccctgaccgtcttcatcctgatcctgtacttcgtcatcgacaactttgtgatcaacagaagaccctggctgcctgaatgtacccccatctacatccagtactttgtgaagttcttcatcatcggcatcaccgtgctggtggtggccgtgcctgagggcctgcccctggccgtgaccatcagcctggcctacagcgtgaagaagatgatgaaggacaacaacctggtgcgccacctggatgcctgtgagaccatgggaaatgccacagccatctgcagcgacaagacaggcaccctgaccatgaacaggatgacagtggtgcaggcctacatcggcggcatccactaccggcagatccccagcccagatgtgttcctgcccaaggtgctggacctgattgtgaatggcatcagcatcaacagcgcctacaccagcaagatcctgcccccagagaaggagggcggcctgccccggcaggtgggcaacaagacagaatgtgccctgctgggctttgtgacagacctgaagcaggactaccaggccgtgagaaatgaggtgcctgaggagaagctgtacaaggtgtacaccttcaacagcgtgaggaagtccatgagcaccgtcatccggaaccccaatggaggcttcaggatgtacagcaaaggagccagcgagatcatcctgaggaagtgcaaccgcatcctggacaggaagggggaggccgtgcccttcaagaacaaggacagagatgacatggtgaggacagtgattgagcccatggcctgtgatggcctgcggaccatctgcatcgcctacagagactttgatgacacagagcccagctgggacaatgaaaatgagatcctgacagagctgacctgcatcgctgtggtgggcattgaagatcctgtgcggcctgaggtgcctgatgccatcgccaagtgcaagcaggccggcatcaccgtgaggatggtgactggagacaacatcaacacagcccgggccatcgccaccaagtgtggcatcctgaccccaggagatgacttcctgtgcctggagggcaaggagttcaacagactcatcagaaatgaaaaaggagaggtggagcaggagaagctggacaagatctggcccaagctgcgggtgctggcccggagcagccccacagacaagcacaccctggtgaagggcatcatcgacagcacagtgggggagcaccggcaggtggtggccgtgactggagatggcaccaatgatggccctgccctgaagaaggcagatgtgggctttgccatgggcattgctggaacagatgtggccaaggaggccagtgacatcatcctgacagatgacaacttcaccagcatcgtgaaggctgtgatgtggggcagaaatgtgtatgacagcatcagcaagttcctgcagttccagctgactgtgaatgtggtggccgtcatcgtggccttcaccggggcctgcatcacccaggacagccccctgaaggctgtgcagatgctgtgggtgaacctgatcatggacacctttgccagcctggccctggccacagagcccccaacagagagcctgctgaagaggcggccctatggaagaaacaagcccctcatcagcaggaccatgatgaagaacatcctgggccacgccttctaccagctgattgtcatcttcatcctggtgtttgctggggagaagttctttgacatcgacagcggcaggaaggcccccctgcacagcccccccagccagcactacaccatcgtgttcaacacctttgtgctgatgcagctgttcaatgagatcaacagcaggaagatccacggggagaagaatgtgttttctggcatctacagaaacatcatcttctgcagcgtggtgctgggcaccttcatctgccagatcttcatcgtggagtttggaggcaagcccttcagctgcaccagcctgagcctgagccagtggctgtggtgcctcttcatcggcattggagagctgctgtggggccagttcatcagcgccatccccaccaggagcctgaagttcctgaaggaggccggccacggcaccaccaaggaggagatcaccaaggatgctgagggcctggatgaaattgaccacgccgagatggagctgcggcggggccagatcctgtggttccggggcctgaaccgcatccagacccagattgatgtgatcaacaccttccagacaggagccagcttcaagggcgtgctgcggcggcagaacatgggccagcacctggatgtgaagctggtgcccagcagcagctatgtggccgtggcccctgtgaagagcagccccaccacctctgtgcctgctgtgagcagcccccccatgggcaaccagagcggccagagcgtgccctag

SEQ ID NO: 144390 - DNA, 3405 bp, synthetic construct
  misc_feature 1..3405: note = Description of Artificial Sequence: Synthetic coding sequence
  source 1..3405: mol_type = other DNA
atgaccaaccccagcgacagagtgctgcctgccaacagcatggccgagagccgggagggggactttggctgcaccgtgatggagctgaggaagctgatggagctgcggagcagagatgccctgacccagatcaacgtgcactacggcggcgtgcagaacctgtgcagccggctgaagaccagccctgtggagggcctgagcggcaacccagctgacctggagaagaggcggcaggtgtttggccacaacgtcatcccccccaagaagcccaagaccttcctggagctggtgtgggaggccctgcaggatgtgaccctcatcatcctggagattgctgccatcatcagcctggtgctgtccttctacagacctgctggggaggagaatgagctgtgtggccaggtggccaccaccccagaagatgaaaatgaggcccaggccggctggattgagggcgccgccatcctcttcagcgtcatcatcgtggtgctggtgacagccttcaatgactggagcaaggagaagcagttccggggcctgcagtgccgcatcgagcaggagcagaagttcagcatcatcagaaatggccagctgatccagctgcctgtggccgagatcgtggtgggggacatcgcccaggtgaagtacggggacctgctgcctgcagatggcatcctgatccagggcaatgacctgaagattgatgagagcagcctgaccggggagagtgaccacgtgaagaagagcctggacaaggaccccatgctgctgagcggcacccacgtgatggagggcagcggccgcatggtggtgacagctgtgggcgtgaacagccagacaggcatcatcctgaccctgctgggcgtgaatgaagatgatgaaggagagaagaagaagaagggcaagaagcagggcgtgcctgagaacagaaacaaggccaagacccaggatggagtggccctggagatccagcccctgaacagccaggagggcatcgacaatgaggagaaggacaagaaggctgtgaaggtgcccaagaaggagaagtctgtgctgcagggcaagctgacccggctggccgtgcagatcggcaaggccggcctgctgatgtctgccctgaccgtcttcatcctgatcctgtacttcgtcatcgacaactttgtgatcaacagaagaccctggctgcctgaatgtacccccatctacatccagtactttgtgaagttcttcatcatcggcatcaccgtgctggtggtggccgtgcctgagggcctgcccctggccgtgaccatcagcctggcctacagcgtgaagaagatgatgaaggacaacaacctggtgcgccacctggatgcctgtgagaccatgggaaatgccacagccatctgcagcgacaagacaggcaccctgaccatgaacaggatgacagtggtgcaggcctacatcggcggcatccactaccggcagatccccagcccagatgtgttcctgcccaaggtgctggacctgattgtgaatggcatcagcatcaacagcgcctacaccagcaagatcctgcccccagagaaggagggcggcctgccccggcaggtgggcaacaagacagaatgtgccctgctgggctttgtgacagacctgaagcaggactaccaggccgtgagaaatgaggtgcctgaggagaagctgtacaaggtgtacaccttcaacagcgtgaggaagtccatgagcaccgtcatccggaaccccaatggaggcttcaggatgtacagcaaaggagccagcgagatcatcctgaggaagtgcaaccgcatcctggacaggaagggggaggccgtgcccttcaagaacaaggacagagatgacatggtgaggacagtgattgagcccatggcctgtgatggcctgcggaccatctgcatcgcctacagagactttgatgacacagagcccagctgggacaatgaaaatgagatcctgacagagctgacctgcatcgctgtggtgggcattgaagatcctgtgcggcctgaggtgcctgatgccatcgccaagtgcaagcaggccggcatcaccgtgaggatggtgactggagacaacatcaacacagcccgggccatcgccaccaagtgtggcatcctgaccccaggagatgacttcctgtgcctggagggcaaggagttcaacagactcatcagaaatgaaaaaggagaggtggagcaggagaagctggacaagatctggcccaagctgcgggtgctggcccggagcagccccacagacaagcacaccctggtgaagggcatcatcgacagcacagtgggggagcaccggcaggtggtggccgtgactggagatggcaccaatgatggccctgccctgaagaaggcagatgtgggctttgccatgggcattgctggaacagatgtggccaaggaggccagtgacatcatcctgacagatgacaacttcaccagcatcgtgaaggctgtgatgtggggcagaaatgtgtatgacagcatcagcaagttcctgcagttccagctgactgtgaatgtggtggccgtcatcgtggccttcaccggggcctgcatcacccaggacagccccctgaaggctgtgcagatgctgtgggtgaacctgatcatggacacctttgccagcctggccctggccacagagcccccaacagagagcctgctgaagaggcggccctatggaagaaacaagcccctcatcagcaggaccatgatgaagaacatcctgggccacgccttctaccagctgattgtcatcttcatcctggtgtttgctggggagaagttctttgacatcgacagcggcaggaaggcccccctgcacagcccccccagccagcactacaccatcgtgttcaacacctttgtgctgatgcagctgttcaatgagatcaacagcaggaagatccacggggagaagaatgtgttttctggcatctacagaaacatcatcttctgcagcgtggtgctgggcaccttcatctgccagttcatcagcgccatccccaccaggagcctgaagttcctgaaggaggccggccacggcaccaccaaggaggagatcaccaaggatgctgagggcctggatgaaattgaccacgccgagatggagctgcggcggggccagatcctgtggttccggggcctgaaccgcatccagacccagattgatgtgatcaacaccttccagacaggagccagcttcaagggcgtgctgcggcggcagaacatgggccagcacctggatgtgaagctggtgcccagcagcagctatgtggccgtggcccctgtgaagagcagccccaccacctctgtgcctgctgtgagcagcccccccatgggcaaccagagcggccagagcgtgccctag

SEQ ID NO: 144391 - DNA, 354 bp, synthetic construct
  misc_feature 1..354: note = Description of Artificial Sequence: Synthetic coding sequence
  source 1..354: mol_type = other DNA
tgaggaggcaagcccttcagctgcaccagcctgagcctgagccagtggctgtggtgcctcttcatcggcatcggggagctgctgtggggccagttcatcagcgccatccccaccaggagcctgaagttcctgaaggaggccggccacggcaccaccaaggaggagatcaccaaggatgctgagggcctggatgaaattgaccatgctgagatggagctgcggcggggccagatcctgtggttccggggcctgaaccgcatccagacccagcacctgctgcaggacagcgacctgctgcctgacaaggaggaggccatcatcagcagcagcctcttccccagctgcaacttctag

SEQ ID NO: 144392 - DNA, 2667 bp, synthetic construct
  misc_feature 1..2667: note = Description of Artificial Sequence: Synthetic coding sequence
  source 1..2667: mol_type = other DNA
atgaaggtggcccgcttccagaagatccccaatggagaaaatgagaccatgatccctgtgctgaccagcaagaaggccagcgagctgcctgtgtctgaggtggccagcatcctgcaggccgacctgcagaatggcctgaacaagtgtgaggtgagccaccggcgggccttccacggctggaatgaatttgacatcagtgaagatgagcccctgtggaagaagtacatcagccagttcaagaaccccctcatcatgctgctgctggccagcgctgtgatctctgtgctgatgcaccagtttgatgatgctgtgtccatcaccgtggccatcctgattgtggtgacagtggcctttgtgcaggagtacagaagtgagaagagcctggaggagctgagcaagctggtgcccccagagtgccactgtgtgcgggagggcaagctggagcacaccctggcccgggacctggtgcctggggacacagtgtgcctgtctgtgggggacagagtgcctgctgacctgcggctgtttgaggccgtggacctgagcattgatgagagcagcctgactggagagaccaccccctgcagcaaggtgacagccccccagcctgctgccaccaatggagacctggccagccgcagcaacatcgccttcatgggcaccctggtgcgctgtgggaaggccaagggcgtggtgattggaactggagaaaattctgaatttggagaggtgttcaagatgatgcaggccgaggaggcccccaagacccccctgcagaagtccatggacctgctgggcaagcagctgtccttctacagctttggcatcatcggcatcatcatgctggtgggctggctgctgggcaaggacatcctggagatgttcaccatctctgtgtccctggccgtggccgccatccctgagggcctgcccatcgtggtgacagtgaccctggccctgggcgtgatgaggatggtgaagaagagggccatcgtgaagaagctgcccatcgtggagaccctgggctgctgcaacgtcatctgcagcgacaagacaggcaccctgaccaagaatgagatgacagtgacccacatcttcaccagtgatggcctgcatgctgaggtgactggagtgggctacaaccagtttggagaggtgattgtggatggagatgtggtgcacggcttctacaacccagctgtgagccgcatcgtggaggccggctgtgtgtgcaatgatgctgtgatccggaacaacaccctgatgggcaagcccacagagggcgccctgattgccctggccatgaagatgggcctggatggcctgcagcaggactacatcaggaaggccgagtaccccttcagcagcgagcagaagtggatggctgtgaagtgtgtgcacaggacccagcaggacaggcctgagatctgcttcatgaagggggcctatgagcaggtgatcaagtactgcaccacctaccagagcaagggccagaccctgaccctgacccagcagcagagagatgtgtaccagcaggagaaggccaggatgggcagcgctggcctgcgggtgctggccctggccagcggccctgagctgggccagctgaccttcctgggcctggtgggcatcattgatcctcccaggactggagtgaaggaggccgtgaccaccctcatcgccagcggcgtgtccatcaagatgatcaccggggacagccaggagacagctgtggccatcgccagccggctgggcctgtacagcaagaccagccagagcgtgtctggagaggagattgatgccatggatgtgcagcagctgagccagatcgtgcccaaggtggccgtgttctaccgggccagccccaggcacaagatgaagatcatcaagagcctgcagaagaatggatctgtggtggccatgactggagatggagtgaatgatgctgtggccctgaaggctgctgacattggagtggccatgggccagacaggaacagatgtgtgcaaggaggccgctgacatgatcctggtggatgatgacttccagaccatcatgtctgccatcgaggagggcaagggcatctacaacaacatcaagaactttgtgcgcttccagctgagcaccagcattgctgccctgaccctcatcagcctggccaccctgatgaacttccccaaccccctgaatgccatgcagatcctgtggatcaacatcatcatggatggccccccagcccagagcctgggcgtggagcctgtggacaaggatgtgatcaggaagccacccaggaactggaaggacagcatcctgaccaagaacctgatcctgaagatcctggtgagcagcatcatcatcgtgtgtggcaccctgtttgtgttctggagggagctgcgggacaacgtcatcaccccccgggacaccaccatgaccttcacctgctttgtgttctttgacatgtttaatgccctgagcagccgcagccagaccaagtctgtgtttgagatcggcctgtgcagcaacaggatgttctgctatgctgtgctgggcagcatcatgggccagctgctggtgatctacttcccccccctgcagaaggtgttccagacagagagcctgagcatcctgggcctggccctgggggaggagtggacagctgctggatag

SEQ ID NO: 144393 - DNA, 2877 bp, synthetic construct
  misc_feature 1..2877: note = Description of Artificial Sequence: Synthetic coding sequence
  source 1..2877: mol_type = other DNA
aaggtggcccgcttccagaagatccccaacggggagaatgagaccatgatccctgtgctgaccagcaagaaggccagcgagctgcctgtgtctgaggtggccagcatcctgcaggccgacctgcagaatggcctgaacaagtgtgaggtgagccacagaagagccttccacggctggaatgaatttgacatcagtgaagatgagcccctgtggaagaagtacatcagccagttcaagaaccccctcatcatgctgctgctggccagcgctgtgatctctgtgctgatgcaccagtttgatgatgctgtgtccatcaccgtggccatcctgattgtggtgacagtggcctttgtgcaggagtacagaagtgagaagagcctggaggagctgagcaagctggtgcccccagagtgccactgtgtgcgggagggcaagctggagcacaccctggcccgggacctggtgcctggggacacagtgtgcctgtctgtgggggacagagtgcctgctgacctgcggctgtttgaagctgtggacctgagcattgatgagagcagcctgaccggggagaccaccccctgcagcaaggtgacagccccccagcctgctgccaccaacggggacctggccagccgcagcaacatcgccttcatgggcaccctggtgcgctgtgggaaggccaagggcgtggtgattggcaccggggagaacagcgagtttggagaggtgttcaagatgatgcaggccgaggaggcccccaagacccccctgcagaagtccatggacctgctgggcaagcagctgtccttctacagctttggcatcatcggcatcatcatgctggtgggctggctgctgggcaaggacatcctggagatgttcaccatctctgtgtccctggccgtggccgccatccctgagggcctgcccatcgtggtgacagtgaccctggccctgggcgtgatgaggatggtgaagaagagggccatcgtgaagaagctgcccatcgtggagaccctgggctgctgcaacgtcatctgcagcgacaagacaggcaccctgaccaagaatgagatgacagtgacccacatcttcaccagtgatggcctgcacgccgaggtgactggagtgggctacaaccagtttggagaggtgattgtggatggagatgtggtgcacggcttctacaacccagctgtgtccagaattgtggaggccggctgtgtgtgcaatgatgctgtgatccggaacaacaccctgatgggcaagcccacagaaggagccctgattgccctggccatgaagatgggcctggatggcctgcagcaggactacatcaggaaggccgagtaccccttcagcagcgagcagaagtggatggctgtgaagtgtgtgcacaggacccagcaggacaggcctgagatctgcttcatgaagggggcctatgagcaggtgatcaagtactgcaccacctaccagagcaagggccagaccctgaccctgacccagcagcagagagatgtgtaccagcaggagaaggccaggatgggcagcgctggcctgcgggtgctggccctggccagcggccctgagctgggccagctgaccttcctgggcctggtgggcatcatcgacccccccaggactggagtgaaggaggccgtgaccaccctgattgccagcggcgtgtccatcaagatgatcactggagacagccaggagacagctgtggccatcgccagccggctgggcctgtacagcaagaccagccagagcgtgtctggagaggagattgatgccatggatgtgcagcagctgagccagatcgtgcccaaggtggccgtgttctaccgggccagccccaggcacaagatgaagatcatcaagagcctgcagaagaatggatctgtggtggccatgactggagatggagtgaatgatgctgtggccctgaaggctgctgacatcggcgtggccatgggccagacaggaacagatgtgtgcaaggaggccgctgacatgatcctggtggatgatgacttccagaccatcatgtctgccatcgaggagggcaagggcatctacaacaacatcaagaactttgtgcgcttccagctgagcaccagcattgctgccctgaccctcatcagcctggccaccctgatgaacttccccaaccccctgaatgccatgcagatcctgtggatcaacatcatcatggatggccccccagcccagagcctgggcgtggagcctgtggacaaggatgtgatcaggaagcccccaagaaactggaaggacagcatcctgaccaagaacctgatcctgaagatcctggtgagcagcatcatcatcgtgtgtggcaccctgtttgtgttctggagggagctgcgggacaacgtcatcaccccccgggacaccaccatgaccttcacctgctttgtgttctttgacatgtttaatgccctgagcagccgcagccagaccaagtctgtgtttgaaattggcctgtgcagcaacaggatgttctgctatgctgtgctgggcagcatcatgggccagctgctggtgatctacttcccccccctgcagaaggtgttccagacagagagcctgagcatcctggacctgctcttcctgctgggcctgaccagctctgtgtgcatcgtggccgagatcatcaagaaggtggagaggagccgggagaagatccagaagcacgtgagcagcaccagcagcagcttcctggaggtgagcagcagcagcggcaactttgtggccgtgtggctgtgggagaggagcggccagcagctggtggagatccacccccacctggagaccggcctgcccctgacagaagatgtgtcctgtgtgtag

SEQ ID NO: 144394 - DNA, 2850 bp, synthetic construct
  misc_feature 1..2850: note = Description of Artificial Sequence: Synthetic coding sequence
  source 1..2850: mol_type = other DNA
atgaaggtggcccgcttccagaagatccccaatggagaaaatgagaccatgatccctgtgctgaccagcaagaaggccagcgagctgcctgtgtctgaggtggccagcatcctgcaggccgacctgcagaatggcctgaacaagtgtgaggtgagccaccggcgggccttccacggctggaatgaatttgacatcagtgaagatgagcccctgtggaagaagtacatcagccagttcaagaaccccctcatcatgctgctgctggccagcgctgtgatctctgtgctgatgcaccagtttgatgatgctgtgtccatcaccgtggccatcctgattgtggtgacagtggcctttgtgcaggagtacagaagtgagaagagcctggaggagctgagcaagctggtgcccccagagtgccactgtgtgcgggagggcaagctggagcacaccctggcccgggacctggtgcctggggacacagtgtgcctgtctgtgggggacagagtgcctgctgacctgcggctgtttgaggccgtggacctgagcattgatgagagcagcctgactggagagaccaccccctgcagcaaggtgacagccccccagcctgctgccaccaatggagacctggccagccgcagcaacatcgccttcatgggcaccctggtgcgctgtgggaaggccaagggcgtggtgattggaactggagaaaattctgaatttggagaggtgttcaagatgatgcaggccgaggaggcccccaagacccccctgcagaagtccatggacctgctgggcaagcagctgtccttctacagctttggcatcatcggcatcatcatgctggtgggctggctgctgggcaaggacatcctggagatgttcaccatctctgtgtccctggccgtggccgccatccctgagggcctgcccatcgtggtgacagtgaccctggccctgggcgtgatgaggatggtgaagaagagggccatcgtgaagaagctgcccatcgtggagaccctgggctgctgcaacgtcatctgcagcgacaagacaggcaccctgaccaagaatgagatgacagtgacccacatcttcaccagtgatggcctgcatgctgaggtgactggagtgggctacaaccagtttggagaggtgattgtggatggagatgtggtgcacggcttctacaacccagctgtgagccgcatcgtggaggccggctgtgtgtgcaatgatgctgtgatccggaacaacaccctgatgggcaagcccacagagggcgccctgattgccctggccatgaagatgggcctggatggcctgcagcaggactacatcaggaaggccgagtaccccttcagcagcgagcagaagtggatggctgtgaagtgtgtgcacaggacccagcaggacaggcctgagatctgcttcatgaagggggcctatgagcaggtgatcaagtactgcaccacctaccagagcaagggccagaccctgaccctgacccagcagcagagagatgtgtaccagcaggagaaggccaggatgggcagcgctggcctgcgggtgctggccctggccagcggccctgagctgggccagctgaccttcctgggcctggtgggcatcattgatcctcccaggactggagtgaaggaggccgtgaccaccctcatcgccagcggcgtgtccatcaagatgatcaccggggacagccaggagacagctgtggccatcgccagccggctgggcctgtacagcaagaccagccagagcgtgtctggagaggagattgatgccatggatgtgcagcagctgagccagatcgtgcccaaggtggccgtgttctaccgggccagccccaggcacaagatgaagatcatcaagagcctgcagaagaatggatctgtggtggccatgactggagatggagtgaatgatgctgtggccctgaaggctgctgacattggagtggccatgggccagacaggaacagatgtgtgcaaggaggccgctgacatgatcctggtggatgatgacttccagaccatcatgtctgccatcgaggagggcaagggcatctacaacaacatcaagaactttgtgcgcttccagctgagcaccagcattgctgccctgaccctcatcagcctggccaccctgatgaacttccccaaccccctgaatgccatgcagatcctgtggatcaacatcatcatggatggccccccagcccagagcctgggcgtggagcctgtggacaaggatgtgatcaggaagccacccaggaactggaaggacagcatcctgaccaagaacctgatcctgaagatcctggtgagcagcatcatcatcgtgtgtggcaccctgtttgtgttctggagggagctgcgggacaacgtcatcaccccccgggacaccaccatgaccttcacctgctttgtgttctttgacatgtttaatgccctgagcagccgcagccagaccaagtctgtgtttgagatcggcctgtgcagcaacaggatgttctgctatgctgtgctgggcagcatcatgggccagctgctggtgatctacttcccccccctgcagaaggtgttccagacagagagcctgagcatcctggacctgctcttcctgctgggcctgaccagctctgtgtgcatcgtggccgagatcatcaagaaggtggagaggagccgggagaagatccagaagcacgtgagcagcaccagcagcagcttcctggaggtgtggctgtgggagaggagcggccagcagctggtggagatccacccccacctggagaccggcctgcccctgacagaagatgtgtcctgtgtgtag

SEQ ID NO: 144395 - DNA, 2922 bp, synthetic construct
  misc_feature 1..2922: note = Description of Artificial Sequence: Synthetic coding sequence
  source 1..2922: mol_type = other DNA
atggacagcctgctgccccccagccgcttctcctacttcaagaagtaccccctgcacgccatccgccgctacctgagcaccctgaggaaccagagagctgaggagcaggtggcccgcttccagaagatccccaatggagaaaatgagaccatgatccctgtgctgaccagcaagaaggccagcgagctgcctgtgtctgaggtggccagcatcctgcaggccgacctgcagaatggcctgaacaagtgtgaggtgagccaccggcgggccttccacggctggaatgaatttgacatcagtgaagatgagcccctgtggaagaagtacatcagccagttcaagaaccccctcatcatgctgctgctggccagcgctgtgatctctgtgctgatgcaccagtttgatgatgctgtgtccatcaccgtggccatcctgattgtggtgacagtggcctttgtgcaggagtacagaagtgagaagagcctggaggagctgagcaagctggtgcccccagagtgccactgtgtgcgggagggcaagctggagcacaccctggcccgggacctggtgcctggggacacagtgtgcctgtctgtgggggacagagtgcctgctgacctgcggctgtttgaggccgtggacctgagcattgatgagagcagcctgactggagagaccaccccctgcagcaaggtgacagccccccagcctgctgccaccaatggagacctggccagccgcagcaacatcgccttcatgggcaccctggtgcgctgtgggaaggccaagggcgtggtgattggaactggagaaaattctgaatttggagaggtgttcaagatgatgcaggccgaggaggcccccaagacccccctgcagaagtccatggacctgctgggcaagcagctgtccttctacagctttggcatcatcggcatcatcatgctggtgggctggctgctgggcaaggacatcctggagatgttcaccatctctgtgtccctggccgtggccgccatccctgagggcctgcccatcgtggtgacagtgaccctggccctgggcgtgatgaggatggtgaagaagagggccatcgtgaagaagctgcccatcgtggagaccctgggctgctgcaacgtcatctgcagcgacaagacaggcaccctgaccaagaatgagatgacagtgacccacatcttcaccagtgatggcctgcatgctgaggtgactggagtgggctacaaccagtttggagaggtgattgtggatggagatgtggtgcacggcttctacaacccagctgtgagccgcatcgtggaggccggctgtgtgtgcaatgatgctgtgatccggaacaacaccctgatgggcaagcccacagagggcgccctgattgccctggccatgaagatgggcctggatggcctgcagcaggactacatcaggaaggccgagtaccccttcagcagcgagcagaagtggatggctgtgaagtgtgtgcacaggacccagcaggacaggcctgagatctgcttcatgaagggggcctatgagcaggtgatcaagtactgcaccacctaccagagcaagggccagaccctgaccctgacccagcagcagagagatgtgtaccagcaggagaaggccaggatgggcagcgctggcctgcgggtgctggccctggccagcggccctgagctgggccagctgaccttcctgggcctggtgggcatcattgatcctcccaggactggagtgaaggaggccgtgaccaccctcatcgccagcggcgtgtccatcaagatgatcaccggggacagccaggagacagctgtggccatcgccagccggctgggcctgtacagcaagaccagccagagcgtgtctggagaggagattgatgccatggatgtgcagcagctgagccagatcgtgcccaaggtggccgtgttctaccgggccagccccaggcacaagatgaagatcatcaagagcctgcagaagaatggatctgtggtggccatgactggagatggagtgaatgatgctgtggccctgaaggctgctgacattggagtggccatgggccagacaggaacagatgtgtgcaaggaggccgctgacatgatcctggtggatgatgacttccagaccatcatgtctgccatcgaggagggcaagggcatctacaacaacatcaagaactttgtgcgcttccagctgagcaccagcattgctgccctgaccctcatcagcctggccaccctgatgaacttccccaaccccctgaatgccatgcagatcctgtggatcaacatcatcatggatggccccccagcccagagcctgggcgtggagcctgtggacaaggatgtgatcaggaagccacccaggaactggaaggacagcatcctgaccaagaacctgatcctgaagatcctggtgagcagcatcatcatcgtgtgtggcaccctgtttgtgttctggagggagctgcgggacaacgtcatcaccccccgggacaccaccatgaccttcacctgctttgtgttctttgacatgtttaatgccctgagcagccgcagccagaccaagtctgtgtttgagatcggcctgtgcagcaacaggatgttctgctatgctgtgctgggcagcatcatgggccagctgctggtgatctacttcccccccctgcagaaggtgttccagacagagagcctgagcatcctggacctgctcttcctgctgggcctgaccagctctgtgtgcatcgtggccgagatcatcaagaaggtggagaggagccgggagaagatccagaagcacgtgtggctgtgggagaggagcggccagcagctggtggagatccacccccacctggagaccggcctgcccctgacagaagatgtgtcctgtgtgtag

SEQ ID NO: 144396 - DNA, 2820 bp, synthetic construct
  misc_feature 1..2820: note = Description of Artificial Sequence: Synthetic coding sequence
  source 1..2820: mol_type = other DNA
atgaaggtggcccgcttccagaagatccccaatggagaaaatgagaccatgatccctgtgctgaccagcaagaaggccagcgagctgcctgtgtctgaggtggccagcatcctgcaggccgacctgcagaatggcctgaacaagtgtgaggtgagccaccggcgggccttccacggctggaatgaatttgacatcagtgaagatgagcccctgtggaagaagtacatcagccagttcaagaaccccctcatcatgctgctgctggccagcgctgtgatctctgtgctgatgcaccagtttgatgatgctgtgtccatcaccgtggccatcctgattgtggtgacagtggcctttgtgcaggagtacagaagtgagaagagcctggaggagctgagcaagctggtgcccccagagtgccactgtgtgcgggagggcaagctggagcacaccctggcccgggacctggtgcctggggacacagtgtgcctgtctgtgggggacagagtgcctgctgacctgcggctgtttgaggccgtggacctgagcattgatgagagcagcctgactggagagaccaccccctgcagcaaggtgacagccccccagcctgctgccaccaatggagacctggccagccgcagcaacatcgccttcatgggcaccctggtgcgctgtgggaaggccaagggcgtggtgattggaactggagaaaattctgaatttggagaggtgttcaagatgatgcaggccgaggaggcccccaagacccccctgcagaagtccatggacctgctgggcaagcagctgtccttctacagctttggcatcatcggcatcatcatgctggtgggctggctgctgggcaaggacatcctggagatgttcaccatctctgtgtccctggccgtggccgccatccctgagggcctgcccatcgtggtgacagtgaccctggccctgggcgtgatgaggatggtgaagaagagggccatcgtgaagaagctgcccatcgtggagaccctgggctgctgcaacgtcatctgcagcgacaagacaggcaccctgaccaagaatgagatgacagtgacccacatcttcaccagtgatggcctgcatgctgaggtgactggagtgggctacaaccagtttggagaggtgattgtggatggagatgtggtgcacggcttctacaacccagctgtgagccgcatcgtggaggccggctgtgtgtgcaatgatgctgtgatccggaacaacaccctgatgggcaagcccacagagggcgccctgattgccctggccatgaagatgggcctggatggcctgcagcaggactacatcaggaaggccgagtaccccttcagcagcgagcagaagtggatggctgtgaagtgtgtgcacaggacccagcaggacaggcctgagatctgcttcatgaagggggcctatgagcaggtgatcaagtactgcaccacctaccagagcaagggccagaccctgaccctgacccagcagcagagagatgtgtaccagcaggagaaggccaggatgggcagcgctggcctgcgggtgctggccctggccagcggccctgagctgggccagctgaccttcctgggcctggtgggcatcattgatcctcccaggactggagtgaaggaggccgtgaccaccctcatcgccagcggcgtgtccatcaagatgatcaccggggacagccaggagacagctgtggccatcgccagccggctgggcctgtacagcaagaccagccagagcgtgtctggagaggagattgatgccatggatgtgcagcagctgagccagatcgtgcccaaggtggccgtgttctaccgggccagccccaggcacaagatgaagatcatcaagagcctgcagaagaatggatctgtggtggccatgactggagatggagtgaatgatgctgtggccctgaaggctgctgacattggagtggccatgggccagacaggaacagatgtgtgcaaggaggccgctgacatgatcctggtggatgatgacttccagaccatcatgtctgccatcgaggagggcaagggcatctacaacaacatcaagaactttgtgcgcttccagctgagcaccagcattgctgccctgaccctcatcagcctggccaccctgatgaacttccccaaccccctgaatgccatgcagatcctgtggatcaacatcatcatggatggccccccagcccagagcctgggcgtggagcctgtggacaaggatgtgatcaggaagccacccaggaactggaaggacagcatcctgaccaagaacctgatcctgaagatcctggtgagcagcatcatcatcgtgtgtggcaccctgtttgtgttctggagggagctgcgggacaacgtcatcaccccccgggacaccaccatgaccttcacctgctttgtgttctttgacatgtttaatgccctgagcagccgcagccagaccaagtctgtgtttgagatcggcctgtgcagcaacaggatgttctgctatgctgtgctgggcagcatcatgggccagctgctggtgatctacttcccccccctgcagaaggtgttccagacagagagcctgagcatcctggacctgctcttcctgctgggcctgaccagctctgtgtgcatcgtggccgagatcatcaagaaggtggagaggagccgggagaagatccagaagcacgtgtggctgtgggagaggagcggccagcagctggtggagatccacccccacctggagaccggcctgcccctgacagaagatgtgtcctgtgtgtag

SEQ ID NO: 144397 - DNA, 2760 bp, synthetic construct
  misc_feature 1..2760: note = Description of Artificial Sequence: Synthetic coding sequence
  source 1..2760: mol_type = other DNA
atgaaggtggcccgcttccagaagatccccaatggagaaaatgagaccatgatccctgtgctgaccagcaagaaggccagcgagctgcctgtgtctgaggtggccagcatcctgcaggccgacctgcagaatggcctgaacaagtgtgaggtgagccaccggcgggccttccacggctggaatgaatttgacatcagtgaagatgagcccctgtggaagaagtacatcagccagttcaagaaccccctcatcatgctgctgctggccagcgctgtgatctctgtgctgatgcaccagtttgatgatgctgtgtccatcaccgtggccatcctgattgtggtgacagtggcctttgtgcaggagtacagaagtgagaagagcctggaggagctgagcaagctggtgcccccagagtgccactgtgtgcgggagggcaagctggagcacaccctggcccgggacctggtgcctggggacacagtgtgcctgtctgtgggggacagagtgcctgctgacctgcggctgtttgaggccgtggacctgagcattgatgagagcagcctgactggagagaccaccccctgcagcaaggtgacagccccccagcctgctgccaccaatggagacctggccagccgcagcaacatcgccttcatgggcaccctggtgcgctgtgggaaggccaagggcgtggtgattggaactggagaaaattctgaatttggagaggtgttcaagatgatgcaggccgaggaggcccccaagacccccctgcagaagtccatggacctgctgggcaagcagctgtccttctacagctttggcatcatcggcatcatcatgctggtgggctggctgctgggcaaggacatcctggagatgttcaccatctctgtgtccctggccgtggccgccatccctgagggcctgcccatcgtggtgacagtgaccctggccctgggcgtgatgaggatggtgaagaagagggccatcgtgaagaagctgcccatcgtggagaccctgggctgctgcaacgtcatctgcagcgacaagacaggcaccctgaccaagaatgagatgacagtgacccacatcttcaccagtgatggcctgcatgctgaggtgactggagtgggctacaaccagtttggagaggtgattgtggatggagatgtggtgcacggcttctacaacccagctgtgagccgcatcgtggaggccggctgtgtgtgcaatgatgctgtgatccggaacaacaccctgatgggcaagcccacagagggcgccctgattgccctggccatgaagatgggcctggatggcctgcagcaggactacatcaggaaggccgagtaccccttcagcagcgagcagaagtggatggctgtgaagtgtgtgcacaggacccagcaggacaggcctgagatctgcttcatgaagggggcctatgagcaggtgatcaagtactgcaccacctaccagagcaagggccagaccctgaccctgacccagcagcagagagatgtgtaccagcaggagaaggccaggatgggcagcgctggcctgcgggtgctggccctggccagcggccctgagctgggccagctgaccttcctgggcctggtgggcatcattgatcctcccaggactggagtgaaggaggccgtgaccaccctcatcgccagcggcgtgtccatcaagatgatcaccggggacagccaggagacagctgtggccatcgccagccggctgggcctgtacagcaagaccagccagagcgtgtctggagaggagattgatgccatggatgtgcagcagctgagccagatcgtgcccaaggtggccgtgttctaccgggccagccccaggcacaagatgaagatcatcaagagcctgcagaagaatggatctgtggtggccatgactggagatggagtgaatgatgctgtggccctgaaggctgctgacattggagtggccatgggccagacaggaacagatgtgtgcaaggaggccgctgacatgatcctggtggatgatgacttccagaccatcatgtctgccatcgaggagggcaagggcatctacaacaacatcaagaactttgtgcgcttccagctgagcaccagcattgctgccctgaccctcatcagcctggccaccctgatgaacttccccaaccccctgaatgccatgcagatcctgtggatcaacatcatcatggatggccccccagcccagagcctgggcgtggagcctgtggacaaggatgtgatcaggaagccacccaggaactggaaggacagcatcctgaccaagaacctgatcctgaagatcctggtgagcagcatcatcatcgtgtgtggcaccctgtttgtgttctggagggagctgcgggacaacgtcatcaccccccgggacaccaccatgaccttcacctgctttgtgttctttgacatgtttaatgccctgagcagccgcagccagaccaagtctgtgtttgagatcggcctgtgcagcaacaggatgttctgctatgctgtgctgggcagcatcatgggccagctgctggtgatctacttcccccccctgcagaaggtgttccagacagagagcctgagcatcctggacctgctcttcctgctgggcctgaccagctctgtgtgcatcgtggccgagatcatcaagaaggtggagaggagccgggagaagatccagaagcacgtgagcagcaccagcagcagcttcctggaggtgtag

SEQ ID NO: 144398 - DNA, 2712 bp, synthetic construct
  misc_feature 1..2712: note = Description of Artificial Sequence: Synthetic coding sequence
  source 1..2712: mol_type = other DNA
atgatccctgtgctgaccagcaagaaggccagcgagctgcctgtgtctgaggtggccagcatcctgcaggccgacctgcagaatggcctgaacaagtgtgaggtgagccaccggcgggccttccacggctggaatgaatttgacatcagtgaagatgagcccctgtggaagaagtacatcagccagttcaagaaccccctcatcatgctgctgctggccagcgctgtgatctctgtgctgatgcaccagtttgatgatgctgtgtccatcaccgtggccatcctgattgtggtgacagtggcctttgtgcaggagtacagaagtgagaagagcctggaggagctgagcaagctggtgcccccagagtgccactgtgtgcgggagggcaagctggagcacaccctggcccgggacctggtgcctggggacacagtgtgcctgtctgtgggggacagagtgcctgctgacctgcggctgtttgaggccgtggacctgagcattgatgagagcagcctgactggagagaccaccccctgcagcaaggtgacagccccccagcctgctgccaccaatggagacctggccagccgcagcaacatcgccttcatgggcaccctggtgcgctgtgggaaggccaagggcgtggtgattggaactggagaaaattctgaatttggagaggtgttcaagatgatgcaggccgaggaggcccccaagacccccctgcagaagtccatggacctgctgggcaagcagctgtccttctacagctttggcatcatcggcatcatcatgctggtgggctggctgctgggcaaggacatcctggagatgttcaccatctctgtgtccctggccgtggccgccatccctgagggcctgcccatcgtggtgacagtgaccctggccctgggcgtgatgaggatggtgaagaagagggccatcgtgaagaagctgcccatcgtggagaccctgggctgctgcaacgtcatctgcagcgacaagacaggcaccctgaccaagaatgagatgacagtgacccacatcttcaccagtgatggcctgcatgctgaggtgactggagtgggctacaaccagtttggagaggtgattgtggatggagatgtggtgcacggcttctacaacccagctgtgagccgcatcgtggaggccggctgtgtgtgcaatgatgctgtgatccggaacaacaccctgatgggcaagcccacagagggcgccctgattgccctggccatgaagatgggcctggatggcctgcagcaggactacatcaggaaggccgagtaccccttcagcagcgagcagaagtggatggctgtgaagtgtgtgcacaggacccagcaggacaggcctgagatctgcttcatgaagggggcctatgagcaggtgatcaagtactgcaccacctaccagagcaagggccagaccctgaccctgacccagcagcagagagatgtgtaccagcaggagaaggccaggatgggcagcgctggcctgcgggtgctggccctggccagcggccctgagctgggccagctgaccttcctgggcctggtgggcatcattgatcctcccaggactggagtgaaggaggccgtgaccaccctcatcgccagcggcgtgtccatcaagatgatcaccggggacagccaggagacagctgtggccatcgccagccggctgggcctgtacagcaagaccagccagagcgtgtctggagaggagattgatgccatggatgtgcagcagctgagccagatcgtgcccaaggtggccgtgttctaccgggccagccccaggcacaagatgaagatcatcaagagcctgcagaagaatggatctgtggtggccatgactggagatggagtgaatgatgctgtggccctgaaggctgctgacattggagtggccatgggccagacaggaacagatgtgtgcaaggaggccgctgacatgatcctggtggatgatgacttccagaccatcatgtctgccatcgaggagggcaagggcatctacaacaacatcaagaactttgtgcgcttccagctgagcaccagcattgctgccctgaccctcatcagcctggccaccctgatgaacttccccaaccccctgaatgccatgcagatcctgtggatcaacatcatcatggatggccccccagcccagagcctgggcgtggagcctgtggacaaggatgtgatcaggaagccacccaggaactggaaggacagcatcctgaccaagaacctgatcctgaagatcctggtgagcagcatcatcatcgtgtgtggcaccctgtttgtgttctggagggagctgcgggacaacgtcatcaccccccgggacaccaccatgaccttcacctgctttgtgttctttgacatgtttaatgccctgagcagccgcagccagaccaagtctgtgtttgagatcggcctgtgcagcaacaggatgttctgctatgctgtgctgggcagcatcatgggccagctgctggtgatctacttcccccccctgcagaaggtgttccagacagagagcctgagcatcctggacctgctcttcctgctgggcctgaccagctctgtgtgcatcgtggccgagatcatcaagaaggtggagaggagccgggagaagatccagaagcacgtgagcagcaccagcagcagcttcctggaggtgtag

SEQ ID NO: 144399 - DNA, 363 bp, synthetic construct
  misc_feature 1..363: note = Description of Artificial Sequence: Synthetic coding sequence
  source 1..363: mol_type = other DNA
atgaaggtggcccgcttccagaagatccccaatggagaaaatgagaccatgatccctgtgctgaccagcaagaaggccagcgagctgcctgtgtctgaggtggccagcatcctgcaggccgacctgcagaatggcctgaacaagtgtgaggtgagccaccggcgggccttccacggctggaatgaatttgacatcagtgaagatgagcccctgtggaagaagtacatcagccagttcaagaaccccctcatcatgctgctgctggccagcgctgtgatctctgtgctgatgcaccagtttgatgatgctgtgtccatcaccgtggccatcctgattgtggtgacagtggcctttgtgcagtag

SEQ ID NO: 144400 - DNA, 2712 bp, synthetic construct; identical to SEQ ID NO: 144398
  misc_feature 1..2712: note = Description of Artificial Sequence: Synthetic coding sequence
  source 1..2712: mol_type = other DNA

SEQ ID NO: 144401 - DNA, 2772 bp, synthetic construct
  misc_feature 1..2772: note = Description of Artificial Sequence: Synthetic coding sequence
  source 1..2772: mol_type = other DNA
atgatccctgtgctgaccagcaagaaggccagcgagctgcctgtgtctgaggtggccagcatcctgcaggccgacctgcagaatggcctgaacaagtgtgaggtgagccaccggcgggccttccacggctggaatgaatttgacatcagtgaagatgagcccctgtggaagaagtacatcagccagttcaagaaccccctcatcatgctgctgctggccagcgctgtgatctctgtgctgatgcaccagtttgatgatgctgtgtccatcaccgtggccatcctgattgtggtgacagtggcctttgtgcaggagtacagaagtgagaagagcctggaggagctgagcaagctggtgcccccagagtgccactgtgtgcgggagggcaagctggagcacaccctggcccgggacctggtgcctggggacacagtgtgcctgtctgtgggggacagagtgcctgctgacctgcggctgtttgaggccgtggacctgagcattgatgagagcagcctgactggagagaccaccccctgcagcaaggtgacagccccccagcctgctgccaccaatggagacctggccagccgcagcaacatcgccttcatgggcaccctggtgcgctgtgggaaggccaagggcgtggtgattggaactggagaaaattctgaatttggagaggtgttcaagatgatgcaggccgaggaggcccccaagacccccctgcagaagtccatggacctgctgggcaagcagctgtccttctacagctttggcatcatcggcatcatcatgctggtgggctggctgctgggcaaggacatcctggagatgttcaccatctctgtgtccctggccgtggccgccatccctgagggcctgcccatcgtggtgacagtgaccctggccctgggcgtgatgaggatggtgaagaagagggccatcgtgaagaagctgcccatcgtggagaccctgggctgctgcaacgtcatctgcagcgacaagacaggcaccctgaccaagaatgagatgacagtgacccacatcttcaccagtgatggcctgcatgctgaggtgactggagtgggctacaaccagtttggagaggtgattgtggatggagatgtggtgcacggcttctacaacccagctgtgagccgcatcgtggaggccggctgtgtgtgcaatgatgctgtgatccggaacaacaccctgatgggcaagcccacagagggcgccctgattgccctggccatgaagatgggcctggatggcctgcagcaggactacatcaggaaggccgagtaccccttcagcagcgagcagaagtggatggctgtgaagtgtgtgcacaggacccagcaggacaggcctgagatctgcttcatgaagggggcctatgagcaggtgatcaagtactgcaccacctaccagagcaagggccagaccctgaccctgacccagcagcagagagatgtgtaccagcaggagaaggccaggatgggcagcgctggcctgcgggtgctggccctggccagcggccctgagctgggccagctgaccttcctgggcctggtgggcatcattgatcctcccaggactggagtgaaggaggccgtgaccaccctcatcgccagcggcgtgtccatcaagatgatcaccggggacagccaggagacagctgtggccatcgccagccggctgggcctgtacagcaagaccagccagagcgtgtctggagaggagattgatgccatggatgtgcagcagctgagccagatcgtgcccaaggtggccgtgttctaccgggccagccccaggcacaagatgaagatcatcaagagcctgcagaagaatggatctgtggtggccatgactggagatggagtgaatgatgctgtggccctgaaggctgctgacattggagtggccatgggccagacaggaacagatgtgtgcaaggaggccgctgacatgatcctggtggatgatgacttccagaccatcatgtctgccatcgaggagggcaagggcatctacaacaacatcaagaactttgtgcgcttccagctgagcaccagcattgctgccctgaccctcatcagcctggccaccctgatgaacttccccaaccccctgaatgccatgcagatcctgtggatcaacatcatcatggatggccccccagcccagagcctgggcgtggagcctgtggacaaggatgtgatcaggaagccacccaggaactggaaggacagcatcctgaccaagaacctgatcctgaagatcctggtgagcagcatcatcatcgtgtgtggcaccctgtttgtgttctggagggagctgcgggacaacgtcatcaccccccgggacaccaccatgaccttcacctgctttgtgttctttgacatgtttaatgccctgagcagccgcagccagaccaagtctgtgtttgagatcggcctgtgcagcaacaggatgttctgctatgctgtgctgggcagcatcatgggccagctgctggtgatctacttcccccccctgcagaaggtgttccagacagagagcctgagcatcctggacctgctcttcctgctgggcctgaccagctctgtgtgcatcgtggccgagatcatcaagaaggtggagaggagccgggagaagatccagaagcacgtgtggctgtgggagaggagcggccagcagctggtggagatccacccccacctggagaccggcctgcccctgacagaagatgtgtcctgtgtgtag

SEQ ID NO: 144402 - DNA, 249 bp, synthetic construct
  misc_feature 1..249: note = Description of Artificial Sequence: Synthetic coding sequence
  source 1..249: mol_type = other DNA
atgatccctgtgctgaccagcaagaaggccagcgagctgcctgtgtctgaggtggccagcatcctgcaggccgacctgcagaatggcctgaacaagtgtgaggtgagccaccggcgggccttccacggctggaatgaatttgacatcagtgaagatgagcccctgtggaagaagtacatcagccagttcaagaaccccctcatcatgctgctgctggccagcgctgtgatctctgtgctgatgcactag

SEQ ID NO: 144403 - DNA, 2760 bp, synthetic construct; identical to SEQ ID NO: 144397
  misc_feature 1..2760: note = Description of Artificial Sequence: Synthetic coding sequence
  source 1..2760: mol_type = other DNA

SEQ ID NO: 144404 - DNA, 309 bp, synthetic construct
  misc_feature 1..309: note = Description of Artificial Sequence: Synthetic coding sequence
  source 1..309: mol_type = other DNA
atgaaggtggcccgcttccagaagatccccaatggagaaaatgagaccatgatccctgtgctgaccagcaagaaggccagcgagctgcctgtgtctgaggtggccagcatcctgcaggccgacctgcagaatggcctgaacaagtgtgaggtgagccaccggcgggccttccacggctggaatgaatttgacatcagtgaagatgagcccctgtggaagaagtacatcagccagttcaagaaccccctcatcatgctgctgctggccagcgctgtgatctctgtgctgatgcaccagtttgatgactag

SEQ ID NO: 144405 - DNA, 2760 bp, synthetic construct; identical to SEQ ID NO: 144397
  misc_feature 1..2760: note = Description of Artificial Sequence: Synthetic coding sequence
  source 1..2760: mol_type = other DNA

SEQ ID NO: 144406 - DNA, 2772 bp, synthetic construct; identical to SEQ ID NO: 144401
  misc_feature 1..2772: note = Description of Artificial Sequence: Synthetic coding sequence
  source 1..2772: mol_type = other DNA

SEQ ID NO: 144407 - DNA, 2835 bp, synthetic construct
  misc_feature 1..2835: note = Description of Artificial Sequence: Synthetic coding sequence
  source 1..2835: mol_type = other DNA
atggacagcctgctgccccccagccgcttctcctacttcaagaagtaccccctgcacgccatccgccgctacctgagcaccctgaggaaccagagagctgaggagcaggtggcccgcttccagaagatccccaatggagaaaatgagaccatgatccctgtgctgaccagcaagaaggccagcgagctgcctgtgtctgaggtggccagcatcctgcagttcaagaaccccctcatcatgctgctgctggccagcgctgtgatctctgtgctgatgcaccagtttgatgatgctgtgtccatcaccgtggccatcctgattgtggtgacagtggcctttgtgcaggagtacagaagtgagaagagcctggaggagctgagcaagctggtgcccccagagtgccactgtgtgcgggagggcaagctggagcacaccctggcccgggacctggtgcctggggacacagtgtgcctgtctgtgggggacagagtgcctgctgacctgcggctgtttgaagctgtggacctgagcattgatgagagcagcctgaccggggagaccaccccctgcagcaaggtgacagccccccagcctgctgccaccaacggggacctggccagccgcagcaacatcgccttcatgggcaccctggtgcgctgtgggaaggccaagggcgtggtgattggcaccggggagaacagcgagtttggagaggtgttcaagatgatgcaggccgaggaggcccccaagacccccctgcagaagtccatggacctgctgggcaagcagctgtccttctacagctttggcatcatcggcatcatcatgctggtgggctggctgctgggcaaggacatcctggagatgttcaccatctctgtgtccctggccgtggccgccatccctgagggcctgcccatcgtggtgacagtgaccctggccctgggcgtgatgaggatggtgaagaagagggccatcgtgaagaagctgcccatcgtggagaccctgggctgctgcaacgtcatctgcagcgacaagacaggcaccctgaccaagaatgagatgacagtgacccacatcttcaccagtgatggcctgcacgccgaggtgactggagtgggctacaaccagtttggagaggtgattgtggatggagatgtggtgcacggcttctacaacccagctgtgtccagaattgtggaggccggctgtgtgtgcaatgatgctgtgatccggaacaacaccctgatgggcaagcccacagaaggagccctgattgccctggccatgaagatgggcctggatggcctgcagcaggactacatcaggaaggccgagtaccccttcagcagcgagcagaagtggatggctgtgaagtgtgtgcacaggacccagcaggacaggcctgagatctgcttcatgaagggggcctatgagcaggtgatcaagtactgcaccacctaccagagcaagggccagaccctgaccctgacccagcagcagagagatgtgtaccagcaggagaaggccaggatgggcagcgctggcctgcgggtgctggccctggccagcggccctgagctgggccagctgaccttcctgggcctggtgggcatcatcgacccccccaggactggagtgaaggaggccgtgaccaccctgattgccagcggcgtgtccatcaagatgatcactggagacagccaggagacagctgtggccatcgccagccggctgggcctgtacagcaagaccagccagagcgtgtctggagaggagattgatgccatggatgtgcagcagctgagccagatcgtgcccaaggtggccgtgttctaccgggccagccccaggcacaagatgaagatcatcaagagcctgcagaagaatggatctgtggtggccatgactggagatggagtgaatgatgctgtggccctgaaggctgctgacatcggcgtggccatgggccagacaggaacagatgtgtgcaaggaggccgctgacatgatcctggtggatgatgacttccagaccatcatgtctgccatcgaggagggcaagggcatctacaacaacatcaagaactttgtgcgcttccagctgagcaccagcattgctgccctgaccctcatcagcctggccaccctgatgaacttccccaaccccctgaatgccatgcagatcctgtggatcaacatcatcatggatggccccccagcccagagcctgggcgtggagcctgtggacaaggatgtgatcaggaagcccccaagaaactggaaggacagcatcctgaccaagaacctgatcctgaagatcctggtgagcagcatcatcatcgtgtgtggcaccctgtttgtgttctggagggagctgcgggacaacgtcatcaccccccgggacaccaccatgaccttcacctgctttgtgttctttgacatgtttaatgccctgagcagccgcagccagaccaagtctgtgtttgaaattggcctgtgcagcaacaggatgttctgctatgctgtgctgggcagcatcatgggccagctgctggtgatctacttcccccccctgcagaaggtgttccagacagagagcctgagcatcctggacctgctcttcctgctgggcctgaccagctctgtgtgcatcgtggccgagatcatcaagaaggtggagaggagccgggagaagatccagaagcacgtgagcagcaccagcagcagcttcctggaggtgtggctgtgggagaggagcggccagcagctggtggagatccacccccacctggagaccggcctgcccctgacagaagatgtgtcctgtgtgtag

SEQ ID NO: 144408 - DNA, 2841 bp, synthetic construct
  misc_feature 1..2841: note = Description of Artificial Sequence: Synthetic coding sequence
  source 1..2841: mol_type = other DNA
atggtggagggccgggtgtctgagttcctgaagaagctgggcttcagcggcggcggccggcagtaccaggccctggagaaggatgaggaggaggccctgattgatgagcagagcgagctgaaggccatcgagaaggagaagaaggtgacagccctgccccccaaggaggcctgcaagtgccagaaggaggacctggcccgggccttctgtgtggacctgcacacaggcctgtctgagttctctgtgacccagaggcggctggcccacggctggaatgaatttgtggccgacaacagcgagcctgtgtggaagaagtacctggaccagttcaagaaccccctcatcctgctgctgctgggcagcgccctggtgtctgtgctgaccaaggagtatgaagatgctgtgtccatcgccacagctgtgctggtggtggtgacagtggccttcatccaggagtacagaagtgagaagagcctggaggagctgaccaagatggtgcccccagagtgcaactgcctgcgggagggcaagctgcagcacctgctggcccgggagctggtgcctggagatgtggtgtccctgagcatcggggaccgcatcccagctgacatccggctgacagaggtgacagacctgctggtggatgagagcagcttcaccggggaggccgagccctgcagcaagacagacagccccctgaccggcggcggggacctgaccaccctgagcaacatcgtgttcatgggcaccctggtgcagtatggccggggccagggcgtggtgattggcaccggggagagcagccagtttggagaggtgttcaagatgatgcaggccgaggagacccccaagacccccctgcagaagtccatggaccggctgggcaagcagctgaccctcttctcctttggcatcatcggcctcatcatgctgattggctggagccagggcaagcagctgctgtccatgttcaccatcggcgtgtccctggccgtggccgccatccctgagggcctgcccatcgtggtgatggtgaccctggtgctgggcgtgctgaggatggccaagaagagggtcatcgtgaagaagctgcccatcgtggagaccctgggctgctgcagcgtgctgtgcagcgacaagacaggcaccctgacagccaatgagatgacagtgacccagctggtgaccagtgatggcctgcgggcagaggtgtctggagtgggctatgatggccagggcaccgtgtgcctgctgcccagcaaggaggtgatcaaggagttcagcaatgtgtctgtgggcaagctggtggaggccggctgtgtggccaacaatgctgtgatcaggaagaatgctgtgatgggccagcccacagaaggagccctgatggccctggccatgaagatggacctgagtgacatcaagaacagctacatcaggaagaaggagatccccttcagcagcgagcagaagtggatggctgtgaagtgcagcctgaagacagaggaccaggaggacatctacttcatgaagggggccctggaggaggtgatccgctactgcaccatgtacaacaatggaggcatccccctgcccctgaccccccagcagaggagcttctgcctgcaggaggagaagaggatgggcagcctgggcctgcgggtgctggccctggccagcggccctgagctgggccgcctgaccttcctgggcctggtgggcatcattgatcctccccgggtgggcgtgaaggaggccgtgcaggtgctgtctgagagcggcgtgtctgtgaagatgatcactggagatgccctggagacagccctggccatcggcaggaacatcggcctgtgcaatggcaagctgcaggccatgtctggagaggaggtggacagcgtggagaagggggagctggccgacagagtgggcaaggtgtctgtgttcttccgcaccagccccaagcacaagctgaagatcatcaaggccctgcaggagagcggggccatcgtggccatgactggagatggagtgaatgatgctgtggccctgaagtctgctgacattggaattgccatgggccagacaggaacagatgtgtccaaggaggccgccaacatgatcctggtggatgatgacttcagcgccatcatgaatgctgtggaggagggcaagggcatcttctacaacatcaagaactttgtgcgcttccagctgagcaccagcatcagcgccctgagcctcatcaccctgagcacagtgttcaacctgcccagccccctgaatgccatgcagatcctgtggatcaacatcatcatggatggccccccagcccagagcctgggcgtggagcctgtggacaaggatgccttccggcagccccccaggtctgtgcgggacaccatcctgagccgggccctgatcctgaagatcctgatgtctgctgccatcatcatcagcggcaccctcttcatcttctggaaggagatgcctgaggaccgggccagcacccccaggaccaccaccatgaccttcacctgctttgtgttctttgacctcttcaatgccctgacctgccgcagccagaccaagctgatctttgaaattggcttcctgaggaaccacatgttcctgtacagcgtgctgggcagcatcctgggccagctggccgtcatctacatcccccccctgcagagggtcttccagacagagaacctgggcgccctggacctgctcttcctgaccggcctggccagcagcgtcttcatcctgtctgagctgctgaagctgtgtgagaagtactgctgcagccccaagagggtgcagatgcacccagaagatgtgtag

SEQ ID NO: 144409 - DNA, 2928 bp, synthetic construct
  misc_feature 1..2928: note = Description of Artificial Sequence: Synthetic coding sequence
  source 1..2928: mol_type = other DNA
atggtggagggccgggtgtctgagttcctgaagaagctgggcttcagcggcggcggccggcagtaccaggccctggagaaggatgaggaggaggccctgattgatgagcagagcgagctgaaggccatcgagaaggagaagaaggtgacagccctgccccccaaggaggcctgcaagtgccagaaggaggacctggcccgggccttctgtgtggacctgcacacaggcctgtctgagttctctgtgacccagaggcggctggcccacggctggaatgaatttgtggccgacaacagcgagcctgtgtggaagaagtacctggaccagttcaagaaccccctcatcctgctgctgctgggcagcgccctggtgtctgtgctgaccaaggagtatgaagatgctgtgtccatcgccacagctgtgctggtggtggtgacagtggccttcatccaggagtacagaagtgagaagagcctggaggagctgaccaagatggtgcccccagagtgcaactgcctgcgggagggcaagctgcagcacctgctggcccgggagctggtgcctggagatgtggtgtccctgagcatcggggaccgcatcccagctgacatccggctgacagaggtgacagacctgctggtggatgagagcagcttcaccggggaggccgagccctgcagcaagacagacagccccctgaccggcggcggggacctgaccaccctgagcaacatcgtgttcatgggcaccctggtgcagtatggccggggccagggcgtggtgattggcaccggggagagcagccagtttggagaggtgttcaagatgatgcaggccgaggagacccccaagacccccctgcagaagtccatggaccggctgggcaagcagctgaccctcttctcctttggcatcatcggcctcatcatgctgattggctggagccagggcaagcagctgctgtccatgttcaccatcggcgtgtccctggccgtggccgccatccctgagggcctgcccatcgtggtgatggtgaccctggtgctgggcgtgctgaggatggccaagaagagggtcatcgtgaagaagctgcccatcgtggagaccctgggctgctgcagcgtgctgtgcagcgacaagacaggcaccctgacagccaatgagatgacagtgacccagctggtgaccagtgatggcctgcgggcagaggtgtctggagtgggctatgatggccagggcaccgtgtgcctgctgcccagcaaggaggtgatcaaggagttcagcaatgtgtctgtgggcaagctggtggaggccggctgtgtggccaacaatgctgtgatcaggaagaatgctgtgatgggccagcccacagaaggagccctgatggccctggccatgaagatggacctgagtgacatcaagaacagctacatcaggaagaaggagatccccttcagcagcgagcagaagtggatggctgtgaagtgcagcctgaagacagaggaccaggaggacatctacttcatgaagggggccctggaggaggtgatccgctactgcaccatgtacaacaatggaggcatccccctgcccctgaccccccagcagaggagcttctgcctgcaggaggagaagaggatgggcagcctgggcctgcgggtgctggccctggccagcggccctgagctgggccgcctgaccttcctgggcctggtgggcatcattgatcctccccgggtgggcgtgaaggaggccgtgcaggtgctgtctgagagcggcgtgtctgtgaagatgatcactggagatgccctggagacagccctggccatcggcaggaacatcggcctgtgcaatggcaagctgcaggccatgtctggagaggaggtggacagcgtggagaagggggagctggccgacagagtgggcaaggtgtctgtgttcttccgcaccagccccaagcacaagctgaagatcatcaaggccctgcaggagagcggggccatcgtggccatgactggagatggagtgaatgatgctgtggccctgaagtctgctgacattggaattgccatgggccagacaggaacagatgtgtccaaggaggccgccaacatgatcctggtggatgatgacttcagcgccatcatgaatgctgtggaggagggcaagggcatcttctacaacatcaagaactttgtgcgcttccagctgagcaccagcatcagcgccctgagcctcatcaccctgagcacagtgttcaacctgcccagccccctgaatgccatgcagatcctgtggatcaacatcatcatggatggccccccagcccagaggagcagccagaagacagaggtgtgctgcacagctgtgcggctgggcgtggagggccgcggggagagcacctgggccggccgggccggcctgggcgtggagcctgtggacaaggatgccttccggcagcccccaagatctgtgcgggacaccatcctgagccgggccctgatcctgaagatcctgatgtctgctgccatcatcatcagcggcaccctcttcatcttctggaaggagatgccagaagatcgggccagcacccccaggaccaccaccatgaccttcacctgctttgtgttctttgacctcttcaatgccctgacctgccgcagccagaccaagctgatctttgagatcggcttcctgaggaaccacatgttcctgtacagcgtgctgggcagcatcctgggccagctggccgtcatctacatcccccccctgcagagggtcttccagacagagaacctgggcgccctggacctgctcttcctgaccggcctggccagctctgtgttcatcctgtctgagctgctgaagctgtgtgagaagtactgctgcagccccaagagggtgcagatgcacccagaagatgtgtag

SEQ ID NO: 144410 - DNA, 2388 bp, synthetic construct
  misc_feature 1..2388: note = Description of Artificial Sequence: Synthetic coding sequence
  source 1..2388: mol_type = other DNA
atgaggaccccatctgccagcccccggcagtgcctgtcctggagcctgagccccagcagcagcctgcgggagggcaagctgcagcacctgctggcccgggagctggtgcctggagatgtggtgtccctgagcattggagaccgcatcccagctgacatccggctgacagaggtgacagacctgctggtggatgagagcagcttcaccggggaggccgagccctgcagcaagacagacagccccctgactggaggaggagacctgaccaccctgagcaacatcgtgttcatgggcaccctggtgcagtatggccggggccagggcgtggtgattggaactggagagagcagccagtttggagaggtgttcaagatgatgcaggccgaggagacccccaagacccccctgcagaagtccatggaccggctgggcaagcagctgaccctcttctcctttggcatcatcggcctcatcatgctgattggctggagccagggcaagcagctgctgtccatgttcaccatcggcgtgtccctggccgtggccgccatccctgagggcctgcccatcgtggtgatggtgaccctggtgctgggcgtgctgaggatggccaagaagagggtgattgtgaagaagctgcccatcgtggagaccctgggctgctgcagcgtgctgtgcagcgacaagacaggcaccctgacagccaatgagatgacagtgacccagctggtgaccagtgatggcctgcgggcagaggtgtctggagtgggctatgatggccagggcaccgtgtgcctgctgcccagcaaggaggtgatcaaggagttcagcaatgtgtctgtgggcaagctggtggaggccggctgtgtggccaacaatgctgtgatcaggaagaatgctgtgatgggccagcccacagagggcgccctgatggccctggccatgaagatggacctgagtgacatcaagaacagctacatcaggaagaaggagatccccttcagcagcgagcagaagtggatggctgtgaagtgcagcctgaagacagaggaccaggaggacatctacttcatgaagggggccctggaggaggtgatccgctactgcaccatgtacaacaacggcggcatccccctgcccctgaccccccagcagaggagcttctgcctgcaggaggagaagaggatgggcagcctgggcctgcgggtgctggccctggccagcggccctgagctgggccgcctgaccttcctgggcctggtgggcatcatcgaccccccccgggtgggcgtgaaggaggccgtgcaggtgctgtctgagagcggcgtgtctgtgaagatgatcactggagatgccctggagacagccctggccatcggcagaaatattggcctgtgcaatggcaagctgcaggccatgtctggagaggaggtggacagcgtggagaagggggagctggccgacagagtgggcaaggtgtctgtgttcttccgcaccagccccaagcacaagctgaagatcatcaaggccctgcaggagagcggggccatcgtggccatgactggagatggagtgaatgatgctgtggccctgaagtctgctgacatcggcatcgccatgggccagacaggaacagatgtgtccaaggaggccgccaacatgatcctggtggatgatgacttcagcgccatcatgaatgctgtggaggagggcaagggcatcttctacaacatcaagaactttgtgcgcttccagctgagcaccagcatcagcgccctgagcctcatcaccctgagcaccgtcttcaacctgcccagccccctgaatgccatgcagatcctgtggatcaacatcatcatggatggccccccagcccagagcctgggcgtggagcctgtggacaaggatgccttccggcagcccccaagatctgtgcgggacaccatcctgagccgggccctgatcctgaagatcctgatgtctgctgccatcatcatcagcggcaccctcttcatcttctggaaggagatgccagaagatcgggccagcacccccaggaccaccaccatgaccttcacctgctttgtgttctttgacctcttcaatgccctgacctgccgcagccagaccaagctgatctttgagatcggcttcctgaggaaccacatgttcctgtacagcgtgctgggcagcatcctgggccagctggccgtcatctacatcccccccctgcagagggtcttccagacagagaacctgggcgccctggacctgctcttcctgaccggcctggccagctctgtgttcatcctgtctgagctgctgaagctgtgtgagaagtactgctgcagccccaagagggtgcagatgcacccagaagatgtgtag

SEQ ID NO: 144411 - DNA, 3090 bp, synthetic construct
  misc_feature 1..3090: note = Description of Artificial Sequence: Synthetic coding sequence
  source 1..3090: mol_type = other DNA
atggaggccgcccacctgctgcctgctgctgatgtgctgcggcacttctctgtgacagctgagggcggcctgagccctgcccaggtgactggagcccgggagagatatggccccaatgagctgcccagcgaggagggcaagagcctgtgggagctggtgctggagcagtttgaggacctgctggtgcgcatcctgctgctggccgccctggtgtcctttgtgctggcctggtttgaggagggggaggagaccaccacagcctttgtggagcccctggtgatcatgctgatcctggtggccaatgccatcgtgggcgtgtggcaggagagaaatgctgagagcgccatcgaggccctgaaggagtatgagcctgagatgggcaaggtgatccgcagtgacagaaaaggagtgcagaggatccgggcccgggacatcgtgcctggggacatcgtggaggtggccgtgggggacaaggtgcctgctgacctgcggctcatcgagatcaagagcaccaccctgcgggtggaccagagcatcctgactggagagagcgtgtctgtgaccaagcacacagaggccatcccagaccccagggctgtgaaccaggacaagaagaacatgctgttcagcggcaccaacatcaccagcggcaaggctgtgggcgtggccgtggccaccggcctgcacacagagctgggcaagatccgcagccagatggctgctgtggagcctgagaggacccccctgcagaggaagctggatgaatttggccggcagctgagccacgccatcagcgtcatctgtgtggccgtgtgggtgatcaacatcggccactttgctgaccctgcccacggcggctcctggctgcggggagctgtgtactacttcaagattgctgtggccctggccgtggccgccatccctgagggcctgcctgctgtgatcaccacctgcctggccctgggcaccaggaggatggccaggaagaatgccatcgtgcgcagcctgcccagcgtggagaccctgggctgcaccagcgtcatctgcagcgacaagacaggcaccctgaccaccaaccagatgtctgtgtgcaggatgtttgtggtggccgaggctgatgctggcagctgcctgctgcacgagttcaccatcagcggcaccacctacaccccagagggggaggtgcggcagggcgaccagcctgtgcgctgtggccagtttgatggcctggtggagctggccaccatctgtgccctgtgcaatgattctgccctggactacaatgaggccaagggcgtgtatgagaaggtgggggaggccacagaaacagccctgacctgcctggtggagaagatgaatgtgtttgacacagacctgcaggccctgagccgggtggagcgggccggggcctgcaacacagtcatcaagcagctgatgaggaaggagttcaccctggagttcagccgggacaggaagtccatgtctgtgtactgcacccccacccggccccaccccaccggccagggcagcaagatgtttgtgaagggggcccctgagagcgtcatcgagcgctgcagctctgtgcgggtgggcagcaggacagcccccctgacccccaccagccgggagcagatcctggccaagatccgggactggggcagcggcagtgacaccctgcgctgcctggccctggccaccagagatgccccacccaggaaggaggacatggagctggatgactgcagcaagtttgtgcagtatgaaacagacctgacctttgtgggctgtgtgggcatgctggacccccccaggcctgaggtggccgcctgcatcacccgctgctaccaggccggcatccgggtggtgatgatcactggagacaacaagggcacagctgtggccatctgccggcggctgggcatctttggagacacagaagatgtggccggcaaggcctacacaggccgggagtttgatgacctgagccctgagcagcagaggcaggcctgcaggacagcccgctgctttgcccgggtggagcccgcccacaagagcagaattgtggagaacctgcagagcttcaatgagatcacagccatgactggagatggagtgaatgatgccccagccctgaagaaggccgagatcggcatcgccatgggcagcggcacagctgtggccaagtctgctgctgagatggtgctgagtgatgacaactttgccagcatcgtggccgctgtggaggagggccgggccatctacagcaacatgaagcagttcatccgctacctgatcagcagcaatgtgggggaggtggtgtgcatcttcctgacagccatcctgggcctgcctgaggccctgatccctgtgcagctgctgtgggtgaacctggtgacagatggcctgcctgccacagccctgggcttcaaccccccagacctggacatcatggagaagctgcccaggagcccccgggaggccctgatcagcggctggctgttcttccgctacctggccatcggcgtgtatgtgggcctggccaccgtggccgccgccacctggtggtttgtgtatgatgctgagggcccccacatcaacttctaccagctgaggaacttcctgaagtgcagcgaggacaaccccctgtttgctggcatcgactgtgaggtgtttgagagccgcttccccaccaccatggccctgtctgtgctggtgaccatcgagatgtgcaatgccctgaacagcgtgtctgagaaccagagcctgctgaggatgccaccctggatgaacccctggctgctggtggccgtggccatgtccatggccctgcacttcctgatcctgctggtgccccccctgcccctcatcttccaggtgacccccctgagcggccggcagtgggtggtggtgctgcagatcagcctgcccgtcatcctgctggatgaggccctgaagtacctgagcaggaaccacatgcacgcctgcctgtacccaggcctgctgaggacagtgtcccaggcctggagccggcagcccctgaccacctcctggaccccagaccacacaggcctggccagcctgaagaagtag

SEQ ID NO: 144412 - DNA, 3132 bp, synthetic construct
  misc_feature 1..3132: note = Description of Artificial Sequence: Synthetic coding sequence
  source 1..3132: mol_type = other DNA
atggaggccgcccacctgctgcctgctgctgatgtgctgcggcacttctctgtgacagctgagggcggcctgagccctgcccaggtgactggagcccgggagagatatggccccaatgagctgcccagcgaggagggcaagagcctgtgggagctggtgctggagcagtttgaggacctgctggtgcgcatcctgctgctggccgccctggtgtcctttgtgctggcctggtttgaggagggggaggagaccaccacagcctttgtggagcccctggtgatcatgctgatcctggtggccaatgccatcgtgggcgtgtggcaggagagaaatgctgagagcgccatcgaggccctgaaggagtatgagcctgagatgggcaaggtgatccgcagtgacagaaaaggagtgcagaggatccgggcccgggacatcgtgcctggggacatcgtggaggtggccgtgggggacaaggtgcctgctgacctgcggctcatcgagatcaagagcaccaccctgcgggtggaccagagcatcctgactggagagagcgtgtctgtgaccaagcacacagaggccatcccagaccccagggctgtgaaccaggacaagaagaacatgctgttcagcggcaccaacatcaccagcggcaaggctgtgggcgtggccgtggccaccggcctgcacacagagctgggcaagatccgcagccagatggctgctgtggagcctgagaggacccccctgcagaggaagctggatgaatttggccggcagctgagccacgccatcagcgtcatctgtgtggccgtgtgggtgatcaacatcggccactttgctgaccctgcccacggcggctcctggctgcggggagctgtgtactacttcaagattgctgtggccctggccgtggccgccatccctgagggcctgcctgctgtgatcaccacctgcctggccctgggcaccaggaggatggccaggaagaatgccatcgtgcgcagcctgcccagcgtggagaccctgggctgcaccagcgtcatctgcagcgacaagacaggcaccctgaccaccaaccagatgtctgtgtgcaggatgtttgtggtggccgaggctgatgctggcagctgcctgctgcacgagttcaccatcagcggcaccacctacaccccagagggggaggtgcggcagggcgaccagcctgtgcgctgtggccagtttgatggcctggtggagctggccaccatctgtgccctgtgcaatgattctgccctggactacaatgaggccaagggcgtgtatgagaaggtgggggaggccacagaaacagccctgacctgcctggtggagaagatgaatgtgtttgacacagacctgcaggccctgagccgggtggagcgggccggggcctgcaacacagtcatcaagcagctgatgaggaaggagttcaccctggagttcagccgggacaggaagtccatgtctgtgtactgcacccccacccggccccaccccaccggccagggcagcaagatgtttgtgaagggggcccctgagagcgtcatcgagcgctgcagctctgtgcgggtgggcagcaggacagcccccctgacccccaccagccgggagcagatcctggccaagatccgggactggggcagcggcagtgacaccctgcgctgcctggccctggccaccagagatgccccacccaggaaggaggacatggagctggatgactgcagcaagtttgtgcagtatgaaacagacctgacctttgtgggctgtgtgggcatgctggacccccccaggcctgaggtggccgcctgcatcacccgctgctaccaggccggcatccgggtggtgatgatcactggagacaacaagggcacagctgtggccatctgccggcggctgggcatctttggagacacagaagatgtggccggcaaggcctacacaggccgggagtttgatgacctgagccctgagcagcagaggcaggcctgcaggacagcccgctgctttgcccgggtggagcccgcccacaagagcagaattgtggagaacctgcagagcttcaatgagatcacagccatgactggagatggagtgaatgatgccccagccctgaagaaggccgagatcggcatcgccatgggcagcggcacagctgtggccaagtctgctgctgagatggtgctgagtgatgacaactttgccagcatcgtggccgctgtggaggagggccgggccatctacagcaacatgaagcagttcatccgctacctgatcagcagcaatgtgggggaggtggtgtgcatcttcctgacagccatcctgggcctgcctgaggccctgatccctgtgcagctgctgtgggtgaacctggtgacagatggcctgcctgccacagccctgggcttcaaccccccagacctggacatcatggagaagctgcccaggagcccccgggaggccctgatcagcggctggctgttcttccgctacctggccatcggcgtgtatgtgggcctggccaccgtggccgccgccacctggtggtttgtgtatgatgctgagggcccccacatcaacttctaccagctgaggaacttcctgaagtgcagcgaggacaaccccctgtttgctggcatcgactgtgaggtgtttgagagccgcttccccaccaccatggccctgtctgtgctggtgaccatcgagatgtgcaatgccctgaacagcgtgtctgagaaccagagcctgctgaggatgccaccctggatgaacccctggctgctggtggccgtggccatgtccatggccctgcacttcctgatcctgctggtgccccccctgcccctcatcttccaggtgacccccctgagcggccggcagtgggtggtggtgctgcagatcagcctgcccgtcatcctgctggatgaggccctgaagtacctgagcaggaaccacatgcacgcctgcctgtacccaggcctgctgaggacagtgtcccaggcctggagccggcagcccctgaccacctcctggaccccagaccacactggaagaaatgaacctgaggtgtctgctggcaacagagtggagagccctgtgtgcaccagtgactag

SEQ ID NO: 144413 - DNA, 3159 bp, synthetic construct
  misc_feature 1..3159: note = Description of Artificial Sequence: Synthetic coding sequence
  source 1..3159: mol_type = other DNA
atggaggccgcccacctgctgcctgctgctgatgtgctgcggcacttctctgtgacagctgagggcggcctgagccctgcccaggtgactggagcccgggagagatatggccccaatgagctgcccagcgaggagggcaagagcctgtgggagctggtgctggagcagtttgaggacctgctggtgcgcatcctgctgctggccgccctggtgtcctttgtgctggcctggtttgaggagggggaggagaccaccacagcctttgtggagcccctggtgatcatgctgatcctggtggccaatgccatcgtgggcgtgtggcaggagagaaatgctgagagcgccatcgaggccctgaaggagtatgagcctgagatgggcaaggtgatccgcagtgacagaaaaggagtgcagaggatccgggcccgggacatcgtgcctggggacatcgtggaggtggccgtgggggacaaggtgcctgctgacctgcggctcatcgagatcaagagcaccaccctgcgggtggaccagagcatcctgactggagagagcgtgtctgtgaccaagcacacagaggccatcccagaccccagggctgtgaaccaggacaagaagaacatgctgttcagcggcaccaacatcaccagcggcaaggctgtgggcgtggccgtggccaccggcctgcacacagagctgggcaagatccgcagccagatggctgctgtggagcctgagaggacccccctgcagaggaagctggatgaatttggccggcagctgagccacgccatcagcgtcatctgtgtggccgtgtgggtgatcaacatcggccactttgctgaccctgcccacggcggctcctggctgcggggagctgtgtactacttcaagattgctgtggccctggccgtggccgccatccctgagggcctgcctgctgtgatcaccacctgcctggccctgggcaccaggaggatggccaggaagaatgccatcgtgcgcagcctgcccagcgtggagaccctgggctgcaccagcgtcatctgcagcgacaagacaggcaccctgaccaccaaccagatgtctgtgtgcaggatgtttgtggtggccgaggctgatgctggcagctgcctgctgcacgagttcaccatcagcggcaccacctacaccccagagggggaggtgcggcagggcgaccagcctgtgcgctgtggccagtttgatggcctggtggagctggccaccatctgtgccctgtgcaatgattctgccctggactacaatgaggccaagggcgtgtatgagaaggtgggggaggccacagaaacagccctgacctgcctggtggagaagatgaatgtgtttgacacagacctgcaggccctgagccgggtggagcgggccggggcctgcaacacagtcatcaagcagctgatgaggaaggagttcaccctggagttcagccgggacaggaagtccatgtctgtgtactgcacccccacccggccccaccccaccggccagggcagcaagatgtttgtgaagggggcccctgagagcgtcatcgagcgctgcagctctgtgcgggtgggcagcaggacagcccccctgacccccaccagccgggagcagatcctggccaagatccgggactggggcagcggcagtgacaccctgcgctgcctggccctggccaccagagatgccccacccaggaaggaggacatggagctggatgactgcagcaagtttgtgcagtatgaaacagacctgacctttgtgggctgtgtgggcatgctggacccccccaggcctgaggtggccgcctgcatcacccgctgctaccaggccggcatccgggtggtgatgatcactggagacaacaagggcacagctgtggccatctgccggcggctgggcatctttggagacacagaagatgtggccggcaaggcctacacaggccgggagtttgatgacctgagccctgagcagcagaggcaggcctgcaggacagcccgctgctttgcccgggtggagcccgcccacaagagcagaattgtggagaacctgcagagcttcaatgagatcacagccatgactggagatggagtgaatgatgccccagccctgaagaaggccgagatcggcatcgccatgggcagcggcacagctgtggccaagtctgctgctgagatggtgctgagtgatgacaactttgccagcatcgtggccgctgtggaggagggccgggccatctacagcaacatgaagcagttcatccgctacctgatcagcagcaatgtgggggaggtggtgtgcatcttcctgacagccatcctgggcctgcctgaggccctgatccctgtgcagctgctgtgggtgaacctggtgacagatggcctgcctgccacagccctgggcttcaaccccccagacctggacatcatggagaagctgcccaggagcccccgggaggccctgatcagcggctggctgttcttccgctacctggccatcggcgtgtatgtgggcctggccaccgtggccgccgccacctggtggtttgtgtatgatgctgagggcccccacatcaacttctaccagctgaggaacttcctgaagtgcagcgaggacaaccccctgtttgctggcatcgactgtgaggtgtttgagagccgcttccccaccaccatggccctgtctgtgctggtgaccatcgagatgtgcaatgccctgaacagcgtgtctgagaaccagagcctgctgaggatgccaccctggatgaacccctggctgctggtggccgtggccatgtccatggccctgcacttcctgatcctgctggtgccccccctgcccctcatcttccaggtgacccccctgagcggccggcagtgggtggtggtgctgcagatcagcctgcccgtcatcctgctggatgaggccctgaagtacctgagcaggaaccacatgcacgcctgcctgtacccaggcctgctgaggacagtgtcccaggcctggagccggcagcccctgaccacctcctggaccccagaccacacaggcctggccagcctgggccagggccacagcatcgtgtccctgtctgagctgctgcgggagggcggcagccgggaggagatgagccagaagtag

SEQ ID NO: 144414 - DNA, 3090 bp, synthetic construct; identical to SEQ ID NO: 144411
  misc_feature 1..3090: note = Description of Artificial Sequence: Synthetic coding sequence
  source 1..3090: mol_type = other DNA

SEQ ID NO: 144415 - DNA, 651 bp, synthetic construct
  misc_feature 1..651: note = Description of Artificial Sequence: Synthetic coding sequence
  source 1..651: mol_type = other DNA
atggagaagctgcccaggagcccccgggaggccctgatcagcggctggctgttcttccgctacctggccatcggcgtgtatgtgggcctggccaccgtggccgccgccacctggtggtttgtgtatgatgctgagggcccccacatcaacttctaccagctgaggaacttcctgaagtgcagcgaggacaaccccctgtttgctggcatcgactgtgaggtgtttgagagccgcttccccaccaccatggccctgtctgtgctggtgaccatcgagatgtgcaatgccctgaacagcgtgtctgagaaccagagcctgctgaggatgccaccctggatgaacccctggctgctggtggccgtggccatgtccatggccctgcacttcctgatcctgctggtgccccccctgcccctcatcttccaggtgacccccctgagcggccggcagtgggtggtggtgctgcagatcagcctgcccgtcatcctgctggatgaggccctgaagtacctgagcaggaaccacatgcacggccctggcacccagcaccggctggccgtgcgggccgcccagaggggcaggaagcagggcagaaatgaacctgaggtgtctgctggcaacagagtggagagccctggccctgggggctag

SEQ ID NO: 144416 - DNA, 3000 bp, synthetic construct
  misc_feature 1..3000: note = Description of Artificial Sequence: Synthetic coding sequence
  source 1..3000: mol_type = other DNA
atggaggccgcccacctgctgcctgctgctgatgtgctgcggcacttctctgtgacagctgagggcggcctgagccctgcccaggtgactggagcccgggagagatatggccccaatgagctgcccagcgaggagggcaagagcctgtgggagctggtgctggagcagtttgaggacctgctggtgcgcatcctgctgctggccgccctggtgtcctttgtgctggcctggtttgaggagggggaggagaccaccacagcctttgtggagcccctggtgatcatgctgatcctggtggccaatgccatcgtgggcgtgtggcaggagagaaatgctgagagcgccatcgaggccctgaaggagtatgagcctgagatgggcaaggtgatccgcagtgacagaaaaggagtgcagaggatccgggcccgggacatcgtgcctggggacatcgtggaggtggccgtgggggacaaggtgcctgctgacctgcggctcatcgagatcaagagcaccaccctgcgggtggaccagagcatcctgactggagagagcgtgtctgtgaccaagcacacagaggccatcccagaccccagggctgtgaaccaggacaagaagaacatgctgttcagcggcaccaacatcaccagcggcaaggctgtgggcgtggccgtggccaccggcctgcacacagagctgggcaagatccgcagccagatggctgctgtggagcctgagaggacccccctgcagaggaagctggatgaatttggccggcagctgagccacgccatcagcgtcatctgtgtggccgtgtgggtgatcaacatcggccactttgctgaccctgcccacggcggctcctggctgcggggagctgtgtactacttcaagattgctgtggccctggccgtggccgccatccctgagggcctgcctgctgtgatcaccacctgcctggccctgggcaccaggaggatggccaggaagaatgccatcgtgcgcagcctgcccagcgtggagaccctgggctgcaccagcgtcatctgcagcgacaagacaggcaccctgaccaccaaccagatgtctgtgtgcaggatgtttgtggtggccgaggctgatgctggcagctgcctgctgcacgagttcaccatcagcggcaccacctacaccccagagggggaggtgcggcagggcgaccagcctgtgcgctgtggccagtttgatggcctggtggagctggccaccatctgtgccctgtgcaatgattctgccctggactacaatgaggccaagggcgtgtatgagaaggtgggggaggccacagaaacagccctgacctgcctggtggagaagatgaatgtgtttgacacagacctgcaggccctgagccgggtggagcgggccggggcctgcaacacagtcatcaagcagctgatgaggaaggagttcaccctggagttcagccgggacaggaagtccatgtctgtgtactgcacccccacccggccccaccccaccggccagggcagcaagatgtttgtgaagggggcccctgagagcgtcatcgagcgctgcagctctgtgcgggtgggcagcaggacagcccccctgacccccaccagccgggagcagatcctggccaagatccgggactggggcagcggcagtgacaccctgcgctgcctggccctggccaccagagatgccccacccaggaaggaggacatggagctggatgactgcagcaagtttgtgcagtatgaaacagacctgacctttgtgggctgtgtgggcatgctggacccccccaggcctgaggtggccgcctgcatcacccgctgctaccaggccggcatccgggtggtgatgatcactggagacaacaagggcacagctgtggccatctgccggcggctgggcatctttggagacacagaagatgtggccggcaaggcctacacaggccgggagtttgatgacctgagccctgagcagcagaggcaggcctgcaggacagcccgctgctttgcccgggtggagcccgcccacaagagcagaattgtggagaacctgcagagcttcaatgagatcacagccatgactggagatggagtgaatgatgccccagccctgaagaaggccgagatcggcatcgccatgggcagcggcacagctgtggccaagtctgctgctgagatggtgctgagtgatgacaactttgccagcatcgtggccgctgtggaggagggccgggccatctacagcaacatgaagcagttcatccgctacctgatcagcagcaatgtgggggaggtggtgtgcatcttcctgacagccatcctgggcctgcctgaggccctgatccctgtgcagctgctgtgggtgaacctggtgacagatggcctgcctgccacagccctgggcttcaaccccccagacctggacatcatggagaagctgcccaggagcccccgggaggccctgatcagcggctggctgttcttccgctacctggccatcggcgtgtatgtgggcctggccaccgtggccgccgccacctggtggtttgtgtatgatgctgagggcccccacatcaacttctaccagctgaggaacttcctgaagtgcagcgaggacaaccccctgtttgctggcatcgactgtgaggtgtttgagagccgcttccccaccaccatggccctgtctgtgctggtgaccatcgagatgtgcaatgccctgaacagcgtgtctgagaaccagagcctgctgaggatgccaccctggatgaacccctggctgctggtggccgtggccatgtccatggccctgcacttcctgatcctgctggtgccccccctgcccctcatcttccaggtgacccccctgagcggccggcagtgggtggtggtgctgcagatcagcctgcccgtcatcctgctggatgaggccctgaagtacctgagcaggaaccacatgcatgaggagatgagccagaagtag

SEQ ID NO: 144417 - DNA, 2997 bp, synthetic construct
  misc_feature 1..2997: note = Description of Artificial Sequence: Synthetic coding sequence
  source 1..2997: mol_type = other DNA
atggaggccgcccacctgctgcctgctgctgatgtgctgcggcacttctctgtgacagctgagggcggcctgagccctgcccaggtgactggagcccgggagagatatggccccaatgagctgcccagcgaggagggcaagagcctgtgggagctggtgctggagcagtttgaggacctgctggtgcgcatcctgctgctggccgccctggtgtcctttgtgctggcctggtttgaggagggggaggagaccaccacagcctttgtggagcccctggtgatcatgctgatcctggtggccaatgccatcgtgggcgtgtggcaggagagaaatgctgagagcgccatcgaggccctgaaggagtatgagcctgagatgggcaaggtgatccgcagtgacagaaaaggagtgcagaggatccgggcccgggacatcgtgcctggggacatcgtggaggtggccgtgggggacaaggtgcctgctgacctgcggctcatcgagatcaagagcaccaccctgcgggtggaccagagcatcctgactggagagagcgtgtctgtgaccaagcacacagaggccatcccagaccccagggctgtgaaccaggacaagaagaacatgctgttcagcggcaccaacatcaccagcggcaaggctgtgggcgtggccgtggccaccggcctgcacacagagctgggcaagatccgcagccagatggctgctgtggagcctgagaggacccccctgcagaggaagctggatgaatttggccggcagctgagccacgccatcagcgtcatctgtgtggccgtgtgggtgatcaacatcggccactttgctgaccctgcccacggcggctcctggctgcggggagctgtgtactacttcaagattgctgtggccctggccgtggccgccatccctgagggcctgcctgctgtgatcaccacctgcctggccctgggcaccaggaggatggccaggaagaatgccatcgtgcgcagcctgcccagcgtggagaccctgggctgcaccagcgtcatctgcagcgacaagacaggcaccctgaccaccaaccagatgtctgtgtgcaggatgtttgtggtggccgaggctgatgctggcagctgcctgctgcacgagttcaccatcagcggcaccacctacaccccagagggggaggtgcggcagggcgaccagcctgtgcgctgtggccagtttgatggcctggtggagctggccaccatctgtgccctgtgcaatgattctgccctggactacaatgaggccaagggcgtgtatgagaaggtgggggaggccacagaaacagccctgacctgcctggtggagaagatgaatgtgtttgacacagacctgcaggccctgagccgggtggagcgggccggggcctgcaacacagtcatcaagcagctgatgaggaaggagttcaccctggagttcagccgggacaggaagtccatgtctgtgtactgcacccccacccggccccaccccaccggccagggcagcaagatgtttgtgaagggggcccctgagagcgtcatcgagcgctgcagctctgtgcgggtgggcagcaggacagcccccctgacccccaccagccgggagcagatcctggccaagatccgggactggggcagcggcagtgacaccctgcgctgcctggccctggccaccagagatgccccacccaggaaggaggacatggagctggatgactgcagcaagtttgtgcagtatgaaacagacctgacctttgtgggctgtgtgggcatgctggacccccccaggcctgaggtggccgcctgcatcacccgctgctaccaggccggcatccgggtggtgatgatcactggagacaacaagggcacagctgtggccatctgccggcggctgggcatctttggagacacagaagatgtggccggcaaggcctacacaggccgggagtttgatgacctgagccctgagcagcagaggcaggcctgcaggacagcccgctgctttgcccgggtggagcccgcccacaagagcagaattgtggagaacctgcagagcttcaatgagatcacagccatgactggagatggagtgaatgatgccccagccctgaagaaggccgagatcggcatcgccatgggcagcggcacagctgtggccaagtctgctgctgagatggtgctgagtgatgacaactttgccagcatcgtggccgctgtggaggagggccgggccatctacagcaacatgaagcagttcatccgctacctgatcagcagcaatgtgggggaggtggtgtgcatcttcctgacagccatcctgggcctgcctgaggccctgatccctgtgcagctgctgtgggtgaacctggtgacagatggcctgcctgccacagccctgggcttcaaccccccagacctggacatcatggagaagctgcccaggagcccccgggaggccctgatcagcggctggctgttcttccgctacctggccatcggcgtgtatgtgggcctggccaccgtggccgccgccacctggtggtttgtgtatgatgctgagggcccccacatcaacttctaccagctgaggaacttcctgaagtgcagcgaggacaaccccctgtttgctggcatcgactgtgaggtgtttgagagccgcttccccaccaccatggccctgtctgtgctggtgaccatcgagatgtgcaatgccctgaacagcgtgtctgagaaccagagcctgctgaggatgccaccctggatgaacccctggctgctggtggccgtggccatgtccatggccctgcacttcctgatcctgctggtgccccccctgcccctcatcttccaggtgacccccctgagcggccggcagtgggtggtggtgctgcagatcagcctgcccgtcatcctgctggatgaggccctgaagtacctgagcaggaaccacatgcacggccacacccagagctag

SEQ ID NO: 144418 - DNA, 2997 bp, synthetic construct
  misc_feature 1..2997: note = Description of Artificial Sequence: Synthetic coding sequence
  source 1..2997: mol_type = other DNA
atggaggccgcccacctgctgcctgctgctgatgtgctgcggcacttctctgtgacagctgagggcggcctgagccctgcccaggtgactggagcccgggagagatatggccccaatgagctgcccagcgaggagggcaagagcctgtgggagctggtgctggagcagtttgaggacctgctggtgcgcatcctgctgctggccgccctggtgtcctttgtgctggcctggtttgaggagggggaggagaccaccacagcctttgtggagcccctggtgatcatgctgatcctggtggccaatgccatcgtgggcgtgtggcaggagagaaatgctgagagcgccatcgaggccctgaaggagtatgagcctgagatgggcaaggtgatccgcagtgacagaaaaggagtgcagaggatccgggcccgggacatcgtgcctggggacatcgtggaggtggccgtgggggacaaggtgcctgctgacctgcggctcatcgagatcaagagcaccaccctgcgggtggaccagagcatcctgactggagagagcgtgtctgtgaccaagcacacagaggccatcccagaccccagggctgtgaaccaggacaagaagaacatgctgttcagcggcaccaacatcaccagcggcaaggctgtgggcgtggccgtggccaccggcctgcacacagagctgggcaagatccgcagccagatggctgctgtggagcctgagaggacccccctgcagaggaagctggatgaatttggccggcagctgagccacgccatcagcgtcatctgtgtggccgtgtgggtgatcaacatcggccactttgctgaccctgcccacggcggctcctggctgcggggagctgtgtactacttcaagattgctgtggccctggccgtggccgccatccctgagggcctgcctgctgtgatcaccacctgcctggccctgggcaccaggaggatggccaggaagaatgccatcgtgcgcagcctgcccagcgtggagaccctgggctgcaccagcgtcatctgcagcgacaagacaggcaccctgaccaccaaccagatgtctgtgtgcaggatgtttgtggtggccgaggctgatgctggcagctgcctgctgcacgagttcaccatcagcggcaccacctacaccccagagggggaggtgcggcagggcgaccagcctgtgcgctgtggccagtttgatggcctggtggagctggccaccatctgtgccctgtgcaatgattctgccctggactacaatgaggccaagggcgtgtatgagaaggtgggggaggccacagaaacagccctgacctgcctggtggagaagatgaatgtgtttgacacagacctgcaggccctgagccgggtggagcgggccggggcctgcaacacagtcatcaagcagctgatgaggaaggagttcaccctggagttcagccgggacaggaagtccatgtctgtgtactgcacccccacccggccccaccccaccggccagggcagcaagatgtttgtgaagggggcccctgagagcgtcatcgagcgctgcagctctgtgcgggtgggcagcaggacagcccccctgacccccaccagccgggagcagatcctggccaagatccgggactggggcagcggcagtgacaccctgcgctgcctggccctggccaccagagatgccccacccaggaaggaggacatggagctggatgactgcagcaagtttgtgcagtatgaaacagacctgacctttgtgggctgtgtgggcatgctggacccccccaggcctgaggtggccgcctgcatcacccgctgctaccaggccggcatccgggtggtgatgatcactggagacaacaagggcacagctgtggccatctgccggcggctgggcatctttggagacacagaagatgtggccggcaaggcctacacaggccgggagtttgatgacctgagccctgagcagcagaggcaggcctgcaggacagcccgctgctttgcccgggtggagcccgcccacaagagcagaattgtggagaacctgcagagcttcaatgagatcacagccatgactggagatggagtgaatgatgccccagccctgaagaaggccgagatcggcatcgccatgggcagcggcacagctgtggccaagtctgctgctgagatggtgctgagtgatgacaactttgccagcatcgtggccgctgtggaggagggccgggccatctacagcaacatgaagcagttcatccgctacctgatcagcagcaatgtgggggaggtggtgtgcatcttcctgacagccatcctgggcctgcctgaggccctgatccctgtgcagctgctgtgggtgaacctggtgacagatggcctgcctgccacagccctgggcttcaaccccccagacctggacatcatggagaagctgcccaggagcccccgggaggccctgatcagcggctggctgttcttccgctacctggccatcggcgtgtatgtgggcctggccaccgtggccgccgccacctggtggtttgtgtatgatgctgagggcccccacatcaacttctaccagctgaggaacttcctgaagtgcagcgaggacaaccccctgtttgctggcatcgactgtgaggtgtttgagagccgcttccccaccaccatggccctgtctgtgctggtgaccatcgagatgtgcaatgccctgaacagcgtgtctgagaaccagagcctgctgaggatgccaccctggatgaacccctggctgctggtggccgtggccatgtccatggccctgcacttcctgatcctgctggtgccccccctgcccctcatcttccaggtgacccccctgagcggccggcagtgggtggtggtgctgcagatcagcctgcccgtcatcctgctggatgaggccctgaagtacctgagcaggaaccacatgcatgagatgagccagaagtag

SEQ ID NO: 144419 - DNA, 1386 bp, synthetic construct
  misc_feature 1..1386: note = Description of Artificial Sequence: Synthetic coding sequence
  source 1..1386: mol_type = other DNA
atgacagtgcccaaggagatgcctgagaagtgggcccgggcccaggcccctccttcctggagcaggaagaagcccagctggggcacagaggaggagcggcgggcccgggccaatgaccgggagtacaatgagaagttccagtatgccagcaactgcatcaagaccagcaagtacaacatcctgaccttcctgcctgtgaacctgtttgagcagttccaggaggtggccaacacctacttcctgttcctgctgatcctgcagctgatcccccagatcagcagcctgtcctggttcaccaccatcgtgcccctggtgctggtgctgaccatcacagctgtgaaggatgccacagatgactacttccgccacaagagtgacaaccaggtgaacaaccggcagagccaggtgctgatcaatggcatcctgcagcaggagcagtggatgaatgtgtgtgtgggggacatcatcaagctggagaacaaccagtttgtggccgctgacctgctgctgctgagcagcagcgagccccacggcctgtgctacatcgagacagctgagctggatggagagaccaacatgaaggtgcggcaggccatccctgtgaccagcgagctgggggacatcagcaagctggccaagtttgatggagaggtgatctgtgagccccccaacaacaagctggacaagttcagcggcaccctgtactggaaggagaacaagttccccctgagcaaccagaacatgctgctgcggggctgtgtgctgaggaacacagagtggtgcttcggcctggtgatctttgctggccctgacaccaagctgatgcagaacagcggccgcaccaagttcaagaggaccagcattgaccggctgatgaacaccctggtgctgtggatcttcggcttcctggtgtgcatgggcgtcatcctggccatcggaaatgccatctgggagcacgaggtgggcatgaggttccaggtgtacctgccctgggatgaggccgtggacagcgccttcttcagcggcttcctgtccttctggagctacatcatcatcctgaacacagtggtgcccatcagcctgtatgtgtctgtggaggtgatccggctgggccacagctacttcatcaactgggacaagaagatgttctgcatgaagaagaggaccccagctgaggcccggaccaccaccctgaatgaggagctgggccaggtggagtacatcttcagtgacaagacaggcaccctgacccagaacatcatggtgttcaacaagtgcagcatcaatggccacagctatgtgggcagcgagggccccaggaggaagggccccagctggccaggcaccgtggcccacgcctacagccacagcaccctgggcggctag

SEQ ID NO: 144420 - DNA, 1164 bp, synthetic construct
  misc_feature 1..1164: note = Description of Artificial Sequence: Synthetic coding sequence
  source 1..1164: mol_type = other DNA
atggctgtgtgtgccaagaagaggcctcctgaggaggagcggcgggcccgggccaatgaccgggagtacaatgagaagttccagtatgccagcaactgcatcaagaccagcaagtacaacatcctgaccttcctgcctgtgaacctgtttgagcagttccaggaggtggccaacacctacttcctgttcctgctgatcctgcagctgatcccccagatcagcagcctgtcctggttcaccaccatcgtgcccctggtgctggtgctgaccatcacagctgtgaaggatgccacagatgactacttccgccacaagagtgacaaccaggtgaacaaccggcagagccaggtgctgatcaatggcatcctgcagcaggagcagtggatgaatgtgtgtgtgggggacatcatcaagctggagaacaaccagtttgtggccgctgacctgctgctgctgagcagcagcgagccccacggcctgtgctacattgaaacagctgagctggatggagagaccaacatgaaggtgcggcaggccatccctgtgaccagcgagctgggggacatcagcaagctggccaagtttgatggagaggtgatctgtgagccccccaacaacaagctggacaagttcagcggcaccctgtactggaaggagaacaagttccccctgagcaaccagaacatgctgctgcggggctgtgtgctgaggaacacagagtggtgcttcggcctggtgatctttgctggccctgacaccaagctgatgcagaacagcggccgcaccaagttcaagaggaccagcattgaccggctgatgaacaccctggtgctgtggatcttcggcttcctggtgtgcatgggcgtcatcctggccatcggaaatgccatctgggagcacgaggtgggcatgaggttccaggtgtacctgccctgggatgaagctgtggacagcgccttcttcagcggcttcctgtccttctggagctacatcatcatcctgaacacagtggtgcccatcagcctgtatgtgcgctacgtgcccagcctgacctggggcctgagccgggagagcggcggccccatcgagctgttcttctccatgaagatgaagagcctgcggagcaatgagaagagcagcagcagctgcaccgtgaacatctag

SEQ ID NO: 144421 - DNA, 3672 bp, synthetic construct
  misc_feature 1..3672: note = Description of Artificial Sequence: Synthetic coding sequence
  source 1..3672: mol_type = other DNA
atggacaccctgcgggctgtgcccctcttcagcatcagcggcctcttctccttcccctacagagtgagccacggcattgctggcatcctgctgggggagatggctgtgtgtgccaagaagaggcctcctgaggaggagcggcgggcccgggccaatgaccgggagtacaatgagaagttccagtatgccagcaactgcatcaagaccagcaagtacaacatcctgaccttcctgcctgtgaacctgtttgagcagttccaggaggtggccaacacctacttcctgttcctgctgatcctgcagctgatcccccagatcagcagcctgtcctggttcaccaccatcgtgcccctggtgctggtgctgaccatcacagctgtgaaggatgccacagatgactacttccgccacaagagtgacaaccaggtgaacaaccggcagagccaggtgctgatcaatggcatcctgcagcaggagcagtggatgaatgtgtgtgtgggggacatcatcaagctggagaacaaccagtttgtggccgctgacctgctgctgctgagcagcagcgagccccacggcctgtgctacatcgagacagctgagctggatggagagaccaacatgaaggtgcggcaggccatccctgtgaccagcgagctgggggacatcagcaagctggccaagtttgatggagaggtgatctgtgagccccccaacaacaagctggacaagttcagcggcaccctgtactggaaggagaacaagttccccctgagcaaccagaacatgctgctgcggggctgtgtgctgaggaacacagagtggtgcttcggcctggtgatctttgctggccctgacaccaagctgatgcagaacagcggccgcaccaagttcaagaggaccagcattgaccggctgatgaacaccctggtgctgtggatcttcggcttcctggtgtgcatgggcgtcatcctggccatcggaaatgccatctgggagcacgaggtgggcatgaggttccaggtgtacctgccctgggatgaggccgtggacagcgccttcttcagcggcttcctgtccttctggagctacatcatcatcctgaacacagtggtgcccatcagcctgtatgtgtctgtggaggtgatccggctgggccacagctacttcatcaactgggacaagaagatgttctgcatgaagaagaggaccccagctgaggcccggaccaccaccctgaatgaggagctgggccaggtggagtacatcttcagtgacaagacaggcaccctgacccagaacatcatggtgttcaacaagtgcagcatcaatggccacagctatggagatgtgtttgatgtgctgggccacaaggccgagctgggggagaggcctgagcctgtggacttctccttcaaccccctggccgacaagaagttcctgttctgggaccccagcctgctggaggccgtgaagatcggggacccccacacccatgagttcttccggctgctgagcctgtgccacacagtgatgtctgaggagaagaatgaaggagagctgtactacaaggcccagagcccagatgagggcgccctggtgacagctgccaggaactttggatttgtgttccgcagcaggacccccaagaccatcaccgtgcatgagatgggcacagccatcacctaccagctgctggccatcctggacttcaacaacatcaggaagaggatgtctgtcatcgtgaggaaccctgagggcaagatccggctgtactgcaagggagctgacaccatcctgctggaccggctgcaccacagcacccaggagctgctgaacaccaccatggaccacctgaatgaatatgctggggagggcctgcggaccctggtgctggcctacaaggacctggatgaggagtactatgaggagtgggccgagcggcggctgcaggccagcctggcccaggacagcagagaagatcggctggccagcatctatgaggaggtggagaacaacatgatgctgctgggcgccacagccatcgaggacaagctgcagcagggcgtgcctgagaccatcgccctgctgaccctggccaacatcaagatctgggtgctgactggagacaagcaggagacagctgtgaacatcggctacagctgcaagatgctgacagatgacatgacagaggtgttcatcgtgacaggccacacagtgctggaggtgcgggaggagctgaggaaggcccgggagaagatgatggacagcagccgctctgtgggcaatggcttcacctaccaggacaagctgagcagcagcaagctgacctctgtgctggaggccgtggccggggagtatgccctggtgatcaatggccacagcctggcccacgccctggaggccgacatggagctggagttcctggagacagcctgtgcctgcaaggccgtcatctgctgccgggtgacccccctgcagaaggcccaggtggtggagctggtgaagaagtacaagaaggctgtgaccctggccatcggagatggagccaatgatgtgtccatgatcaagacagcccacatcggcgtgggcatcagcggccaggagggcatccaggccgtgctggccagtgactacagcttcagccagttcaagttcctgcagaggctgctgctggtgcacggccgctggagctacctgaggatgtgcaagttcctgtgctacttcttctacaagaactttgccttcaccatggtgcacttctggtttggcttcttctgtggcttcagcgcccagacagtgtatgaccagtacttcatcaccctgtacaacatcgtgtacaccagcctgcctgtgctggccatgggcgtgtttgaccaggatgtgcctgagcagaggtccatggagtaccccaagctgtatgagcccggccagctgaacctgctcttcaacaagcgggagttcttcatctgcatcgcccagggcatctacacctctgtgctgatgttcttcatcccctacggcgtgtttgctgatgccaccagagatgatggcacccagctggccgactaccagagctttgctgtgacagtggccaccagcctggtgattgtggtgtctgtgcagatcggcctggacaccggctactggacagccatcaaccacttcttcatctggggcagcctggccgtgtactttgccatcctgtttgccatgcacagcaatggcctgtttgacatgttccccaaccagttccgctttgtgggcaatgcccagaacaccctggcccagcccaccgtgtggctgaccatcgtgctgaccaccgtggtgtgcatcatgcctgtggtggccttccgcttcctgcggctgaacctgaagccagacctgagtgacacagtgcgctacacccagctggtgaggaagaagcagaaggcccagcaccgctgcatgagaagagtgggccgcacaggcagccgccgcagcggctacgccttcagccaccaggagggctttggagagctgatcatgtctgggaagaacatgaggctgagcagcctggccctgagcagcttcaccaccaggagcagcagctcctggattgagagcctgcggaggaagaagagtgacagcgccagcagccccagcggcggcgctgacaagcccctgaagggctag

SEQ ID NO: 144422 - DNA, 3444 bp, synthetic construct
  misc_feature 1..3444: note = Description of Artificial Sequence: Synthetic coding sequence
  source 1..3444: mol_type = other DNA
atggctgaccagatccccctgtaccctgtgcgctctgctgctgctgctgctgccaacaggaagagagctgcctactacagcgctgctggccccaggcctggagctgacagacacagccgctaccagctggaggatgaaagtgcccacctggatgagatgcccctgatgatgtctgaggagggctttgaaaatgaggagagtgactaccacaccctgccccgggcccgcatcatgcagaggaagaggggcctggagtggtttgtgtgtgatggctggaagttcctgtgcaccagctgctgcggctggctgatcaacatctgcaggaggaagaaggagctgaaggccaggacagtgtggctgggctgcccagagaagtgtgaggagaagcaccccaggaacagcatcaagaaccagaagtacaacgtgttcaccttcatccctggggtgctgtatgagcagttcaagttcttcctgaacctgtacttcctggtgatcagctgcagccagtttgtgcctgccctgaagattggctacctgtacacctactgggcccccctgggctttgtgctggccgtgaccatgacccgggaggccattgatgagttccgccgcttccagagggacaaggaggtgaacagccagctgtacagcaagctgactgtgcggggcaaggtgcaggtgaagagcagtgacatccaggtgggggacctgatcatcgtggagaagaaccagaggatccccagcgacatggtgttcctgcggaccagcgagaaggccggcagctgcttcatcagaacagaccagctggatggagaaacagactggaagctgaaggtggccgtgtcctgcacccagcagctgcctgccctgggggacctcttcagcatcagcgcctacgtgtatgcccagaagccccagatggacatccacagctttgagggcaccttcaccagagaagattctgacccccccatccacgagagcctgagcattgagaacaccctgtgggccagcaccatcgtggccagcggcaccgtgattggagtggtgatctacacaggcaaggagaccaggtctgtgatgaacaccagcaaccccaagaacaaggtgggcctgctggacctggagctgaaccggctgaccaaggccctcttcctggccctggtggccctgagcatcgtgatggtgaccctgcagggctttgtgggcccctggtacagaaacctcttccgcttcctgctgctcttctcctacatcatccccatcagcctgcgggtgaacctggacatgggcaaggctgtgtatggctggatgatgatgaaggatgagaacatccctggcaccgtggtgaggaccagcaccatccctgaggagctgggccgcctggtgtacctgctgacagacaagacaggcaccctgacccagaatgagatgatcttcaagaggctgcacctgggcaccgtgtcctatggagctgacaccatggatgagatccagagccacgtgcgggacagctacagccagatgcagagccaggccggcggcaacaacacaggcagcacccccctgaggaaggcccagagcagcgcccccaaggtgaggaagtctgtgagcagccgcatccacgaggccgtgaaggccatcgtgctgtgccacaacgtgacccctgtgtatgagagccgggccggcgtgacagaggagacagaatttgctgaggccgaccaggacttcagtgatgagaacagaacctaccaggccagcagcccagatgaggtggccctggtgcagtggacagagagcgtgggcctgaccctggtgtcccgggacctgacctccatgcagctgaagaccccatctggccaggtgctgtccttctgcatcctgcagctgttccccttcaccagcgagagcaagaggatgggcgtgattgtgagagatgagagcacagctgagatcaccttctacatgaagggagcagatgtggccatgagccccatcgtgcagtacaatgactggctggaggaggagtgtggcaacatggcccgggagggcctgcggaccctggtggtggccaagaaggccctgacagaggagcagtaccaggactttgagagccgctacacccaggccaagctgtccatgcatgacaggagcctgaaggtggccgctgtggtggagagcctggagcgggagatggagctgctgtgcctgactggagtggaggaccagctgcaggctgatgtgcggcccaccctggagatgctgagaaatgccggcatcaagatctggatgctgaccggggacaagctggagacagccacctgcatcgccaagagcagccacctggtgtccaggacccaggacatccacatcttccggcaggtgaccagcagaggagaggcccacctggagctgaatgccttccggaggaagcatgactgtgccctggtgatcagcggggacagcctggaggtgtgcctgaagtactatgagcacgagtttgtggagctggcctgccagtgcccagctgtggtgtgctgccgctgcagccccacccagaaggccagaattgtgaccctgctgcagcagcacactggaagaaggacctgtgccatcggagatggcggcaatgatgtgtccatgatccaggccgctgactgtggcattggaattgagggcaaggagggcaagcaggccagcctggccgctgacttcagcatcacccagttccgccacatcggccgcctgctgatggtgcacggcaggaacagctacaagaggtctgctgccctgggccagtttgtgatgcaccggggcctcatcatcagcaccatgcaggccgtgttcagctctgtgttctactttgcctctgtgcccctgtaccagggcttcctgatggtgggctacgccaccatctacaccatgtttcctgtgttcagcctggtgctggaccaggatgtgaagccagagatggccatgctgtacccagagctgtacaaggacctgaccaagggccgcagcctgtccttcaagaccttcctgatctgggtgctgatcagcatctaccagggcggcatcctgatgtatggagccctggtgctgtttgaaagtgaatttgtgcacgtggtggccatctccttcaccgccctgatcctgacagagctgctgatggtggccctgactgtgaggacctggcactggctgatggtggtggccgagttcctgagcctgggctgctacgtgagcagcctggccttcctgaatgagtactttggaattggccgggtgtcctttggagccttcctggatgtggccttcatcaccaccgtgaccttcctgtggaaggtgtctgccatcaccgtggtgtcctgcctgcccctgtatgtgctgaagtacctgcggaggaagctgagccccccatcctactgcaagctggccagctag

SEQ ID NO: 144423 - DNA, 408 bp, synthetic construct
  misc_feature 1..408: note = Description of Artificial Sequence: Synthetic coding sequence
  source 1..408: mol_type = other DNA
atgcaggccgtgttcagctctgtgttctactttgcctctgtgcccctgtaccagggcttcctgatggtgggctacgccaccatctacaccatgtttcctgtgttcagcctggtgctggaccaggatgtgaagccagagatggccatgctgtacccagagctgtacaaggacctgaccaagagccagcaggacggccgcagcaacagacggcagcacgagcggctgaccagcggcaccagcggccacgtgtgggaccccggcagcttcttccgcatccgggtgtctggaaaaggagccagaaatgctgggaagatcctggtgctgcagaacctgccccacctgggcttcaacaagtacctgccccggcggcacccccacgtgtggggccctggggccctgcgggtgtag

SEQ ID NO: 144424 - DNA, 3411 bp, synthetic construct
  misc_feature 1..3411: note = Description of Artificial Sequence: Synthetic coding sequence
  source 1..3411: mol_type = other DNA
atggctgaccagatccccctgtaccctgtgcgctctgctgctgctgctgctgccaacaggaagagagctgcctactacagcgctgctggccccaggcctggagctgacagacacagccgctaccagctggaggatgaaagtgcccacctggatgagatgcccctgatgatgtctgaggagggctttgaaaatgaggagagtgactaccacaccctgccccgggcccgcatcatgcagaggaagaggggcctggagtggtttgtgtgtgatggctggaagttcctgtgcaccagctgctgcggctggctgatcaacatctgcaggaggaagaaggagctgaaggccaggacagtgtggctgggctgcccagagaagtgtgaggagaagcaccccaggaacagcatcaagaaccagaagtacaacgtgttcaccttcatccctggggtgctgtatgagcagttcaagttcttcctgaacctgtacttcctggtgatcagctgcagccagtttgtgcctgccctgaagattggctacctgtacacctactgggcccccctgggctttgtgctggccgtgaccatgacccgggaggccattgatgagttccgccgcttccagagggacaaggaggtgaacagccagctgtacagcaagctgactgtgcggggcaaggtgcaggtgaagagcagtgacatccaggtgggggacctgatcatcgtggagaagaaccagaggatccccagcgacatggtgttcctgcggaccagcgagaaggccggcagctgcttcatcagaacagaccagctggatggagaaacagactggaagctgaaggtggccgtgtcctgcacccagcagctgcctgccctgggggacctcttcagcatcagcgcctacgtgtatgcccagaagccccagatggacatccacagctttgagggcaccttcaccagagaagattctgacccccccatccacgagagcctgagcattgagaacaccctgtgggccagcaccatcgtggccagcggcaccgtgattggagtggtgatctacacaggcaaggagaccaggtctgtgatgaacaccagcaaccccaagaacaaggtgggcctgctggacctggagctgaaccggctgaccaaggccctcttcctggccctggtggccctgagcatcgtgatggtgaccctgcagggctttgtgggcccctggtacagaaacctcttccgcttcctgctgctcttctcctacatcatccccatcagcctgcgggtgaacctggacatgggcaaggctgtgtatggctggatgatgatgaaggatgagaacatccctggcaccgtggtgaggaccagcaccatccctgaggagctgggccgcctggtgtacctgctgacagacaagacaggcaccctgacccagaatgagatgatcttcaagaggctgcacctgggcaccgtgtcctatggagctgacaccatggatgagatccagagccacgtgcgggacagctacagccagatgcagagccaggccggcggcaacaacacaggcagcacccccctgaggaaggcccagagcagcgcccccaaggtgaggaagtctgtgagcagccgcatccacgaggccgtgaaggccatcgtgctgtgccacaacgtgacccctgtgtatgagagccgggccggcgtgacagaggagacagaatttgctgaggccgaccaggacttcagtgatgagaacagaacctaccaggccagcagcccagatgaggtggccctggtgcagtggacagagagcgtgggcctgaccctggtgtcccgggacctgacctccatgcagctgaagaccccatctggccaggtgctgtccttctgcatcctgcagctgttccccttcaccagcgagagcaagaggatgggcgtgattgtgagagatgagagcacagctgagatcaccttctacatgaagggagcagatgtggccatgagccccatcgtgcagtacaatgactggctggaggaggagtgtggcaacatggcccgggagggcctgcggaccctggtggtggccaagaaggccctgacagaggagcagtaccaggactttgagagccgctacacccaggccaagctgtccatgcatgacaggagcctgaaggtggccgctgtggtggagagcctggagcgggagatggagctgctgtgcctgactggagtggaggaccagctgcaggctgatgtgcggcccaccctggagatgctgagaaatgccggcatcaagatctggatgctgaccggggacaagctggagacagccacctgcatcgccaagagcagccacctggtgtccaggacccaggacatccacatcttccggcaggtgaccagcagaggagaggcccacctggagctgaatgccttccggaggaagcatgactgtgccctggtgatcagcggggacagcctggaggtgtgcctgaagtactatgagcacgagtttgtggagctggcctgccagtgcccagctgtggtgtgctgccgctgcagccccacccagaaggccagaattgtgaccctgctgcagcagcacactggaagaaggacctgtgccatcggagatggcggcaatgatgtgtccatgatccaggccgctgactgtggcattggaattgagggcaaggagggcaagcaggccagcctggccgctgacttcagcatcacccagttccgccacatcggccgcctgctgatggtgcacggcaggaacagctacaagaggtctgctgccctgggccagtttgtgatgcaccggggcctcatcatcagcaccatgcaggccgtgttcagctctgtgttctactttgcctctgtgcccctgtaccagggcttcctgatggtgggctacgccaccatctacaccatgtttcctgtgttcagcctggtgctggaccaggatgtgaagccagagatggccatgctgtacccagagctgtacaaggacctgaccaagggccgcagcctgtccttcaagaccttcctgatctgggtgctgatcagcatctaccagggcggcatcctgatgtatggagccctggtgctgtttgaaagtgaatttgtgcacgtggtggccatctccttcaccgccctgatcctgacagagctgctgatggtggccctgactgtgaggacctggcactggctgatggtggtggccgagttcctgagcctgggctgctacgtgagcagcctggccttcctgaatgagtactttgatgtggccttcatcaccaccgtgaccttcctgtggaaggtgtctgccatcaccgtggtgtcctgcctgcccctgtatgtgctgaagtacctgcggaggaagctgagcccccccagctactgcaagctggccagctag

SEQ ID NO: 144425 - DNA, 411 bp, synthetic construct
  misc_feature 1..411: note = Description of Artificial Sequence: Synthetic coding sequence
  source 1..411: mol_type = other DNA
atgcccctgatgatgtctgaggagggctttgaaaatgaggagagtgactaccacaccctgccccgggcccgcatcatgcagaggaagaggggcctggagtggtttgtgtgtgatggctggaagttcctgtgcaccagctgctgcggctggctgatcaacatctgcaggaggaagaaggagctgaaggccaggacagtgtggctgggctgcccagagaagtgtgaggagaagcaccccaggaacagcatcaagaaccagaagtacaacgtgttcaccttcatccctggggtgctgtatgagcagttcaagttcttcctgaacctgtacttcctggtgatcagctgcagccagtttgtgcctgccctgaagattggctacctgtacacctactgggcccccctgatgacctag

SEQ ID NO: 144426 - DNA, 609 bp, synthetic construct
  misc_feature 1..609: note = Description of Artificial Sequence: Synthetic coding sequence
  source 1..609: mol_type = other DNA
atgcagaggaagaggggcctggagtggtttgtgtgtgatggctggaagttcctgtgcaccagctgctgcggctggctgatcaacatctgcaggaggaagaaggagctgaaggccaggacagtgtggctgggctgcccagagaagtgtgaggagaagcaccccagaaattccatcaagaaccagaagtacaacgtgttcaccttcatccctggggtgctgtatgagcagttcaagttcttcctgaacctgtacttcctggtgatcagctgcagccagtttgtgcctgccctgaagattggctacctgtacacctactgggcccccctgggctttgtgctggccgtgaccatgacccgggaggccattgatgagttccgccgcttccagagggacaaggaggtgaacagccagctgtacagcaagctgactgtgcggggcaaggtgcaggtgaagagcagtgacatccaggtgggggacctgatcatcgtggagaagaaccagaggatccccagcgacatggtgttcctgcggaccagcgagaaggctgtgagcaacaacctggactactgcagccacctggtgctcttcatcttctgcttcctgaactag

SEQ ID NO: 144427 - DNA, 1374 bp, synthetic construct
  misc_feature 1..1374: note = Description of Artificial Sequence: Synthetic coding sequence
  source 1..1374: mol_type = other DNA
atggcccgggagggcctgcggaccctggtggtggccaagaaggccctgacagaggagcagtaccaggactttgagagccgctacacccaggccaagctgtccatgcatgacaggagcctgaaggtggccgctgtggtggagagcctggagcgggagatggagctgctgtgcctgactggagtggaggaccagctgcaggctgatgtgcggcccaccctggagatgctgagaaatgccggcatcaagatctggatgctgactggagacaagctggagacagccacctgcatcgccaagagcagccacctggtgtccaggacccaggacatccacatcttccggcaggtgaccagcagaggagaggcccacctggagctgaatgccttccggaggaagcatgactgtgccctggtgatcagcggggacagcctggaggtgtgcctgaagtactatgaacatgaatttgtggagctggcctgccagtgcccagctgtggtgtgctgccgctgcagccccacccagaaggcccgcatcgtgaccctgctgcagcagcacacaggccgccgcacctgtgccatcggagatggcggcaatgatgtgtccatgatccaggccgctgactgtggcatcggcatcgagggcaaggagggcaagcaggccagcctggccgctgacttcagcatcacccagttccgccacatcggccgcctgctgatggtgcatggaagaaattcctacaagaggtctgctgccctgggccagtttgtgatgcaccggggcctcatcatcagcaccatgcaggccgtgttcagcagcgtcttctactttgcctctgtgcccctgtaccagggcttcctgatggtgggctacgccaccatctacaccatgtttcctgtgttcagcctggtgctggaccaggatgtgaagccagagatggccatgctgtacccagagctgtacaaggacctgaccaagggccgcagcctgtccttcaagaccttcctgatctgggtgctgatcagcatctaccagggcggcatcctgatgtacggggccctggtgctgtttgagagcgagtttgtgcacgtggtggccatctccttcaccgccctgatcctgacagagctgctgatggtggccctgactgtgaggacctggcactggctgatggtggtggccgagttcctgagcctgggctgctacgtgagcagcctggccttcctgaatgagtactttgatgtggccttcatcaccaccgtgaccttcctgtggaaggtgtctgccatcaccgtggtgtcctgcctgcccctgtatgtgctgaagtacctgcggaggaagctgagccccccatcctactgcaagctggccagctag

SEQ ID NO: 144428 - DNA, 4500 bp, synthetic construct
  misc_feature 1..4500: note = Description of Artificial Sequence: Synthetic coding sequence
  source 1..4500: mol_type = other DNA
atggagcgggagcccgccggcacagaggagcccggccccccaggaagaagaagaagaagagagggccgcaccaggacagtgcgcagcaacctgctgcccccacctggagctgaggaccctgctgctggggccgccaagggggagaggagaagaagaagaggctgtgcccagcacctggccgacaaccggctgaagaccaccaagtacaccctgctgtccttcctgcccaagaacctgtttgagcagttccacaggcctgccaacgtgtactttgtgttcatcgccctgctgaactttgtgcctgctgtgaatgccttccagcccggcctggccctggcccctgtgctcttcatcctggccatcacagccttccgggacctgtgggaggactacagccgccacagaagtgaccacaagatcaaccacctgggctgcctggtgttcagccgggaggagaagaagtatgtgaaccgcttctggaaggagatccacgtgggggactttgtgcggctgcgctgcaatgagatcttccctgctgacatcctgctgctgagcagcagtgaccctgatggcctgtgccacattgaaacagccaacctggatggagagaccaacctgaagaggcggcaggtggtgcggggcttcagcgagctggtgtctgagttcaaccccctgaccttcacctctgtgattgaatgtgagaagcccaacaatgacctgagccgcttccggggctgcatcatccatgacaatggcaagaaggccggcctgtacaaggagaacctgctgctgcggggctgcaccctgaggaacacagatgctgtggtgggcatcgtcatctatgccggccacgagaccaaggccctgctgaacaacagcggcccccgctacaagaggagcaagctggagcggcagatgaactgtgatgtgctgtggtgtgtgctgctgctggtgtgcatgagcctcttctctgctgtgggccacggcctgtggatctggagataccaggagaagaagagcctcttctacgtgcccaagagtgatggcagcagcctgagccctgtgacagctgctgtgtacagcttcctgaccatgatcatcgtgctgcaggtgctgatccccatcagcctgtatgtgtccattgaaattgtgaaggcctgccaggtgtacttcatcaaccaggacatgcagctgtatgatgaggagacagacagccagctgcagtgccgggccctgaacatcacagaggacctgggccagatccagtacatcttcagtgacaagacaggcaccctgacagagaacaagatggtgttccgccgctgcaccgtgtctggagtggagtacagccatgatgccaatgcccagaggctggcccgctaccaggaggccgacagcgaggaggaggaggtggtgccccggggcggctctgtgtcccagaggggcagcatcggcagccaccagagcgtgcgggtggtgcacaggacccagagcaccaagagccacagaagaacaggcagcagagctgaggccaagagggcctccatgctgagcaagcacacagccttcagcagccccatggagaaggacatcaccccagaccccaagctgctggagaaggtgtctgaatgtgacaagagcctggccgtggcccggcaccaggagcacctgctggcccacctgagccctgagctgagtgatgtgtttgacttcttcatcgccctgaccatctgcaacacagtggtggtgaccagcccagaccagcccaggaccaaggtgcgggtgcgctttgagctgaagagccctgtgaagaccatcgaggacttcctgcggcgcttcacccccagctgcctgaccagcggctgcagcagcatcggcagcctggccgccaacaagagcagccacaagctgggcagcagcttccccagcacccccagcagtgatggcatgctgctgcggctggaggagcggctgggccagcccaccagcgccatcgccagcaatggctacagcagccaggccgacaactgggccagcgagctggcccaggagcaggagagcgagcgggagctgcgctatgaagctgagagcccagatgaagctgccctggtgtatgctgcccgggcctacaactgtgtgctggtggagcggctgcatgaccaggtgtctgtggagctgccccacctgggccgcctgacctttgagctgctgcacaccctgggctttgacagcgtgaggaagaggatgtctgtggtgatccgccaccccctgacagatgagatcaacgtgtacaccaagggagctgacagcgtggtgatggacctgctgcagccctgcagctctgtggatgcccggggccgccaccagaagaagatccgcagcaagacccagaactacctgaatgtgtatgctgctgagggcctgcggaccctgtgcatcgccaagagggtgctgagcaaggaggagtatgcctgctggctgcagagccacctggaggccgagagcagcctggagaacagcgaggagctgctcttccagagcgccatccggctggagaccaacctgcacctgctgggcgccactggaattgaggaccggctgcaggatggagtgcctgagaccatcagcaagctgcggcaggccggcctgcagatctgggtgctgactggagacaagcaggagacagctgtgaacatcgcctatgcctgcaagctgctggaccatgatgaggaggtgatcaccctgaatgccaccagccaggaggcctgtgccgccctgctggaccagtgcctgtgctacgtgcagagccggggcctgcagagggcccctgagaagaccaagggcaaggtgtccatgaggttcagcagcctgtgcccccccagcaccagcacagccagcggccggcggcccagcctggtgattgatggccgcagcctggcctatgccctggagaagaacctggaggacaagttcctgttcctggccaagcagtgccgctctgtgctgtgctgccgcagcacccccctgcagaagtccatggtggtgaagctggtgcgcagcaagctgaaggccatgaccctggccatcggagatggagccaatgatgtgtccatgatccaggtggctgatgtgggcgtgggcatcagcggccaggagggcatgcaggccgtgatggccagtgactttgctgtgcccaagttccgctacctggagcggctgctgatcctgcacggccactggtgctacagccggctggccaacatggtgctgtacttcttctacaagaacaccatgtttgtgggcctgctcttctggttccagttcttctgtggcttcagcgccagcaccatgattgaccagtggtacctgatcttcttcaacctgctcttcagcagcctgccccccctggtgactggagtgctggacagagatgtgcctgccaacgtgctgctgaccaacccccagctgtacaagagcggccagaacatggaggagtaccggcccaggaccttctggttcaacatggctgatgctgccttccagagcctggtgtgcttcagcatcccctacctggcctactatgacagcaatgtggacctcttcacctggggcacccccatcgtgaccatcgccctgctgaccttcctgctgcacctgggcatcgagaccaagacctggacctggctgaactggatcacctgtggcttctctgtgctgctcttcttcaccgtggccctgatctacaatgccagctgtgccacctgctacccacccagcaacccctactggaccatgcaggccctgctgggggaccccgtcttctacctgacctgcctgatgacccctgtggccgccctgctgcccaggctcttcttccgcagcctgcagggccgggtcttccccacccagctgcagctggcccggcagctgaccaggaagagcccccggcgctgcagcgcccccaaggagacctttgcccagggccgcctgcccaaggacagcggcacagagcacagcagcggccgcacagtgaagacctctgtgcccctgagccagcccagctggcacacccagcagcctgtgtgcagcctggaggccagcggggagcccagcacagtggacatgtccatgcctgtgcgggagcacaccctgctggagggcctgagcgccccagcccccatgagcagcgcccctggagaggccgtgctgcggagccctgggggctgcccagaggagagcaaggtgcgggccgccagcacaggccgggtgacccccctgagcagcctcttcagcctgcccaccttcagcctgctgaactggatcagctcctggagcctggtgtcccggctgggctctgtgctgcagttcagcaggacagagcagctggctgatggccaggccggccggggcctgcctgtgcagccccacagcggccgcagcggcctgcagggccctgaccaccggctgctgattggagccagcagccgccgcagccagtag

SEQ ID NO: 144429 - DNA, 3405 bp, synthetic construct
  misc_feature 1..3405: note = Description of Artificial Sequence: Synthetic coding sequence
  source 1..3405: mol_type = other DNA
atggactgcagcctggtgaggaccctggtgcaccgctactgtgccggggaggagaactgggtggacagcaggaccatctacgtgggccaccgggagcccccacctggagctgaggcctacatcccccagcgctacccagacaaccgcatcgtgagcagcaagtacaccttctggaacttcatccccaagaacctgtttgagcagttccggcgggtggccaacttctacttcctgatcatcttcctggtgcagctgatcatcgacacccccaccagccctgtgaccagcggcctgcccctcttcttcgtcatcaccgtgacagccatcaagcagggctatgaggactggctgcggcacaaggctgacaatgccatgaaccagtgccctgtgcacttcatccagcacggcaagctggtgaggaagcagagcaggaagctgcgggtgggggacatcgtgatggtgaaggaggatgagaccttcccctgtgacctgatcttcctgagcagcaacagaggagatggcacctgccacgtgaccacagccagcctggatggagagagcagccacaagacccactatgctgtgcaggacaccaagggcttccacacagaagaagatattggaggcctgcacgccaccattgaatgtgagcagccccagcctgacctgtacaagtttgtgggccgcatcaacgtgtacagcgacctgaatgaccctgtggtgcggcccctgggcagcgagaacctgctgctgcggggggccaccctgaagaacacagagaagatctttggagtggccatctacacaggcatggagaccaagatggccctgaactaccagagcaagagccagaagaggtctgctgtggagaagtccatgaatgccttcctgattgtgtacctgtgcatcctgatcagcaaggccctgatcaacacagtgctgaagtacatgtggcagagcgagcccttcagagatgagccctggtacaaccagaagacagaaagtgagcggcagaggaacctcttcctgaaggccttcacagacttcctggccttcatggtgctcttcaactacatcatccctgtgtccatgtatgtgacagtggagatgcagaagttcctgggcagctacttcatcacctgggatgaggacatgtttgatgaggagaccggggagggccccctggtgaacaccagtgacctgaatgaggagctgggccaggtggagtacatcttcacagacaagacaggcaccctgacagagaacaacatggagttcaaggagtgctgcatcgagggccacgtgtatgtgccccacgtgatctgcaatggccaggtgctgcctgagagcagcggcatcgacatgattgacagcagccccagcgtgaatggccgggagcgggaggagctgttcttccgggccctgtgcctgtgccacacagtgcaggtgaaggatgatgacagcgtggatggccccaggaagagcccagatggcggcaagagctgtgtgtacatcagcagcagcccagatgaggtggccctggtggagggcgtgcagaggctgggcttcacctacctgcggctgaaggacaactacatggagatcctgaaccgggagaaccacatcgagagatttgagctgctggagatcctgagctttgattctgtgagaagaaggatgtctgtgattgtgaagagcgccaccggggagatctacctgttctgcaagggagctgacagcagcatcttcccccgggtgattgagggcaaggtggaccagatccgggcccgggtggagagaaatgctgtggagggcctgcggaccctgtgtgtggcctacaagaggctcatccaggaggagtatgagggcatctgcaagctgctgcaggccgccaaggtggccctgcaggaccgggagaagaagctggccgaggcctatgagcagatcgagaaggacctgaccctgctgggcgccacagctgtggaggaccggctgcaggagaaggctgctgacaccatcgaggccctgcagaaggccggcatcaaggtgtgggtgctgactggagacaagatggagacagctgctgccacctgctacgcctgcaagctgttcagaagaaacacccagctgctggagctgaccaccaagagaattgaggagcagagcctgcatgatgtgctgtttgagctgagcaagacagtgctgcggcacagcggcagcctgacccgggacaacctgagcggcctgtctgctgacatgcaggactatggcctcatcattgatggagctgccctgagcctcatcatgaagcccagagaagatggcagcagcggcaactaccgggagctgttcctggagatctgccgcagctgcagcgctgtgctgtgctgcaggatggcccccctgcagaaggcccagatcgtgaagctgatcaagttcagcaaggagcaccccatcaccctggccatcggagatggagccaatgatgtgtccatgatcctggaggcccacgtgggcatcggcgtgattggcaaggagggccggcaggccgccaggaacagcgactatgccatccccaagttcaagcacctgaagaagatgctgctggtgcacggccacttctactacatccgcatcagcgagctggtgcagtacttcttctacaagaatgtgtgcttcatcttcccccagttcctgtaccagttcttctgtggcttcagccagcagaccctgtatgacacagcctacctgaccctgtacaacatctccttcaccagcctgcccatcctgctgtacagcctgatggagcagcacgtgggcattgatgtgctgaagagggaccccaccctgtacagagatgtggccaagaatgccctgctgcgctggagggtcttcatctactggaccctgctgggcctgtttgatgccctggtgttcttctttggagcctactttgtgtttgagaacaccaccgtgaccagcaatggccagatctttggaaactggaccttcggcaccctggtgttcaccgtgatggtgttcaccgtgaccctgaagctggccctggacacccactactggacctggatcaaccactttgtgatctggggcagcctgctcttctacgtggtgttcagcctgctgtggggcggcgtcatctggcccttcctgaactaccagaggatgtactacgtgttcatccagatgctgagcagcggccctgcctggctggccatcgtgctgctggtgaccatcagcctgctgcctgatgtgctgaagaaggtgctgtgccggcagctgtggcccacagccacagagcgggtgcagaccaagagccagtgcctgtctgtggagcagagcaccatcttcatgctgagccagaccagcagcagcctgtccttctag

SEQ ID NO: 144430 - DNA, 3576 bp, synthetic construct
  misc_feature 1..3576: note = Description of Artificial Sequence: Synthetic coding sequence
  source 1..3576: mol_type = other DNA
atggactgcagcctggtgaggaccctggtgcaccgctactgtgccggggaggagaactgggtggacagcaggaccatctacgtgggccaccgggagcccccacctggagctgaggcctacatcccccagcgctacccagacaaccgcatcgtgagcagcaagtacaccttctggaacttcatccccaagaacctgtttgagcagttccggcgggtggccaacttctacttcctgatcatcttcctggtgcagctgatcatcgacacccccaccagccctgtgaccagcggcctgcccctcttcttcgtcatcaccgtgacagccatcaagcagggctatgaggactggctgcggcacaaggctgacaatgccatgaaccagtgccctgtgcacttcatccagcacggcaagctggtgaggaagcagagcaggaagctgcgggtgggggacatcgtgatggtgaaggaggatgagaccttcccctgtgacctgatcttcctgagcagcaacagaggagatggcacctgccacgtgaccacagccagcctggatggagagagcagccacaagacccactatgctgtgcaggacaccaagggcttccacacagaagaagatattggaggcctgcacgccaccattgaatgtgagcagccccagcctgacctgtacaagtttgtgggccgcatcaacgtgtacagcgacctgaatgaccctgtggtgcggcccctgggcagcgagaacctgctgctgcggggggccaccctgaagaacacagagaagatctttggagtggccatctacacaggcatggagaccaagatggccctgaactaccagagcaagagccagaagaggtctgctgtggagaagtccatgaatgccttcctgattgtgtacctgtgcatcctgatcagcaaggccctgatcaacacagtgctgaagtacatgtggcagagcgagcccttcagagatgagccctggtacaaccagaagacagaaagtgagcggcagaggaacctcttcctgaaggccttcacagacttcctggccttcatggtgctcttcaactacatcatccctgtgtccatgtatgtgacagtggagatgcagaagttcctgggcagctacttcatcacctgggatgaggacatgtttgatgaggagaccggggagggccccctggtgaacaccagtgacctgaatgaggagctgggccaggtggagtacatcttcacagacaagacaggcaccctgacagagaacaacatggagttcaaggagtgctgcatcgagggccacgtgtatgtgccccacgtgatctgcaatggccaggtgctgcctgagagcagcggcatcgacatgattgacagcagccccagcgtgaatggccgggagcgggaggagctgttcttccgggccctgtgcctgtgccacacagtgcaggtgaaggatgatgacagcgtggatggccccaggaagagcccagatggcggcaagagctgtgtgtacatcagcagcagcccagatgaggtggccctggtggagggcgtgcagaggctgggcttcacctacctgcggctgaaggacaactacatggagatcctgaaccgggagaaccacatcgagagatttgagctgctggagatcctgagctttgattctgtgagaagaaggatgtctgtgattgtgaagagcgccaccggggagatctacctgttctgcaagggagctgacagcagcatcttcccccgggtgattgagggcaaggtggaccagatccgggcccgggtggagagaaatgctgtggagggcctgcggaccctgtgtgtggcctacaagaggctcatccaggaggagtatgagggcatctgcaagctgctgcaggccgccaaggtggccctgcaggaccgggagaagaagctggccgaggcctatgagcagatcgagaaggacctgaccctgctgggcgccacagctgtggaggaccggctgcaggagaaggctgctgacaccatcgaggccctgcagaaggccggcatcaaggtgtgggtgctgactggagacaagatggagacagctgctgccacctgctacgcctgcaagctgttcagaagaaacacccagctgctggagctgaccaccaagagaattgaggagcagagcctgcatgatgtgctgtttgagctgagcaagacagtgctgcggcacagcggcagcctgacccgggacaacctgagcggcctgtctgctgacatgcaggactatggcctcatcattgatggagctgccctgagcctcatcatgaagcccagagaagatggcagcagcggcaactaccgggagctgttcctggagatctgccgcagctgcagcgctgtgctgtgctgcaggatggcccccctgcagaaggcccagatcgtgaagctgatcaagttcagcaaggagcaccccatcaccctggccatcggagatggagccaatgatgtgtccatgatcctggaggcccacgtgggcatcggcgtgattggcaaggagggccggcaggccgccaggaacagcgactatgccatccccaagttcaagcacctgaagaagatgctgctggtgcacggccacttctactacatccgcatcagcgagctggtgcagtacttcttctacaagaatgtgtgcttcatcttcccccagttcctgtaccagttcttctgtggcttcagccagcagaccctgtatgacacagcctacctgaccctgtacaacatctccttcaccagcctgcccatcctgctgtacagcctgatggagcagcacgtgggcattgatgtgctgaagagggaccccaccctgtacagagatgtggccaagaatgccctgctgcgctggagggtcttcatctactggaccctgctgggcctgtttgatgccctggtgttcttctttggagcctactttgtgtttgagaacaccaccgtgaccagcaatggccagatctttggaaactggaccttcggcaccctggtgttcaccgtgatggtgttcaccgtgaccctgaagctggccctggacacccactactggacctggatcaaccactttgtgatctggggcagcctgctcttctacgtggtgttcagcctgctgtggggcggcgtcatctggcccttcctgaactaccagaggatgtactacgtgttcatccagatgctgagcagcggccctgcctggctggccatcgtgctgctggtgaccatcagcctgctgcctgatgtgctgaagaaggtgctgtgccggcagctgtggcccacagccacagagcgggtgcagaatggctgtgcccagccccgggaccgggacagcgagttcacccccctggccagcctgcagagccctggctaccagagcacctgccccagcgctgcctggtacagcagccacagccagcaggtgaccctggccgcctggaaggagaaggtgtccacagagcccccacccatcctgggcggcagccaccaccactgcagcagcatccccagccacagctgccccaggagccgggtgggcatgctggtgtag

SEQ ID NO: 144431 - DNA, 3405 bp, synthetic construct; identical to SEQ ID NO: 144429
  misc_feature 1..3405: note = Description of Artificial Sequence: Synthetic coding sequence
  source 1..3405: mol_type = other DNA

SEQ ID NO: 144432 - DNA, 2808 bp, synthetic construct
  misc_feature 1..2808: note = Description of Artificial Sequence: Synthetic coding sequence
  source 1..2808: mol_type = other DNA
tgatatgtgggccaccgggagcccccacctggagctgaggcctacatcccccagcgctacccagacaacagaattgtgagcagcaagtacaccttctggaacttcatccccaagaacctgtttgagcagttcagaagagtggccaacttctacttcctgatcatcttcctggtgcagctgatcatcgacacccccaccagccctgtgaccagcggcctgcccctcttctttgtgatcaccgtgacagccatcaagcagggctatgaggactggctgcggcacaaggctgacaatgccatgaaccagtgccctgtgcacttcatccagcacggcaagctggtgaggaagcagagcaggaagctgcgggtgggggacatcgtgatggtgaaggaggatgagaccttcccctgtgacctgatcttcctgagcagcaacagaggagatggcacctgccacgtgaccacagccagcctggatggagagagcagccacaagacccactatgctgtgcaggacaccaagggcttccacacagaggaggacatcggcggcctgcacgccaccattgaatgtgagcagccccagcctgacctgtacaagtttgtgggccgcatcaacgtgtacagcgacctgaatgaccctgtggtgcggcccctgggcagcgagaacctgctgctgcggggggccaccctgaagaacacagagaagatcttcggcgtggccatctacacaggcatggagaccaagatggccctgaactaccagagcaagagccagaagaggtctgctgtggagaagtccatgaatgccttcctgattgtgtacctgtgcatcctgatcagcaaggccctgatcaacacagtgctgaagtacatgtggcagagcgagcccttcagagatgagccctggtacaaccagaagacagagagcgagcggcagaggaacctcttcctgaaggccttcacagacttcctggccttcatggtgctcttcaactacatcatccctgtgtccatgtatgtgacagtggagatgcagaagttcctgggcagctacttcatcacctgggatgaggacatgtttgatgaggagactggagagggccccctggtgaacaccagtgacctgaatgaggagctgggccaggtggagtacatcttcacagacaagacaggcaccctgacagagaacaacatggagttcaaggagtgctgcatcgagggccacgtgtatgtgccccacgtgatctgcaatggccaggtgctgcctgagagcagcggcatcgacatgattgacagcagccccagcgtgaatggccgggagcgggaggagctgttcttccgggccctgtgcctgtgccacacagtgcaggtgaaggatgatgattctgtggatggccccaggaagagcccagatggcggcaagagctgtgtgtacatcagcagcagcccagatgaggtggccctggtggagggcgtgcagaggctgggcttcacctacctgcggctgaaggacaactacatggagatcctgaaccgggagaaccacatcgagagatttgagctgctggagatcctgagctttgacagcgtgagaagaaggatgtctgtcatcgtgaagagcgccactggagagatctacctgttctgcaagggagctgacagcagcatcttccccagggtcatcgagggcaaggtggaccagatccgggcccgggtggagagaaatgctgtggagggcctgcggaccctgtgtgtggcctacaagaggctcatccaggaggagtatgagggcatctgcaagctgctgcaggccgccaaggtggccctgcaggaccgggagaagaagctggccgaggcctatgagcagatcgagaaggacctgaccctgctgggcgccacagctgtggaggaccggctgcaggagaaggctgctgacaccatcgaggccctgcagaaggccggcatcaaggtgtgggtgctgaccggggacaagatggagacagctgctgccacctgctacgcctgcaagctgttcagaagaaacacccagctgctggagctgaccaccaagagaattgaggagcagagcctgcatgatgtgctgtttgagctgagcaagacagtgctgcggcacagcggcagcctgacccgggacaacctgagcggcctgtctgctgacatgcaggactatggcctcatcattgatggagctgccctgagcctcatcatgaagccccgggaggatggcagcagcggcaactaccgggagctgttcctggagatctgccgcagctgcagcgctgtgctgtgctgcaggatggcccccctgcagaaggcccagatcgtgaagctgatcaagttcagcaaggagcaccccatcaccctggccatcggagatggagccaatgatgtgtccatgatcctggaggcccacgtgggcattggagtcatcggcaaggagggccggcaggccgccaggaacagcgactatgccatccccaagttcaagcacctgaagaagatgctgctggtgcacggccacttctactacatccgcatcagcgagctggtgcagtacttcttctacaagaatgtgtgcttcatcttcccccagttcctgtaccagttcttctgtggcttcagccagcagaccctgtatgacacagcctacctgaccctgtacaacatctccttcaccagcctgcccatcctgctgtacagcctgatggagcagcacgtgggcattgatgtgctgaagagggaccccaccctgtaccgctaccacccccccaacagcctgtcctag

SEQ ID NO: 144433 - DNA, 1119 bp, synthetic construct
  misc_feature 1..1119: note = Description of Artificial Sequence: Synthetic coding sequence
  source 1..1119: mol_type = other DNA
atgtctgtcatcgtgaagagcgccactggagagatctacctgttctgcaagggagctgacagcagcatcttccccagggtcatcgagggcaaggtggaccagatccgggcccgggtggagagaaatgctgtggagggcctgcggaccctgtgtgtggcctacaagaggctcatccaggaggagtatgagggcatctgcaagctgctgcaggccgccaaggtggccctgcaggaccgggagaagaagctggccgaggcctatgagcagatcgagaaggacctgaccctgctgggcgccacagctgtggaggaccggctgcaggagaaggctgctgacaccatcgaggccctgcagaaggccggcatcaaggtgtgggtgctgaccggggacaagatggagacagctgctgccacctgctacgcctgcaagctgttcagaagaaacacccagctgctggagctgaccaccaagagaattgaggagcagagcctgcatgatgtgctgtttgagctgagcaagacagtgctgcggcacagcggcagcctgacccgggacaacctgagcggcctgtctgctgacatgcaggactatggcctcatcattgatggagctgccctgagcctcatcatgaagccccgggaggatggcagcagcggcaactaccgggagctgttcctggagatctgccgcagctgcagcgctgtgctgtgctgcaggatggcccccctgcagaaggcccagatcgtgaagctgatcaagttcagcaaggagcaccccatcaccctggccatcggagatggagccaatgatgtgtccatgatcctggaggcccacgtgggcattggagtcatcggcaaggagggccggcaggccgccaggaacagcgactatgccatccccaagttcaagcacctgaagaagatgctgctggtgcacggccacttctactacatccgcatcagcgagctggtgcagtacttcttctacaagaatgtgtgcttcatcttcccccagttcctgtaccagttcttctgtggcttcagccagcagggccggcggcaggagtgcccagctgccctggcccgggtgcacctgctggatgcccctggcaccgtgtag

SEQ ID NO: 144434 - DNA, 1059 bp, synthetic construct
  misc_feature 1..1059: note = Description of Artificial Sequence: Synthetic coding sequence
  source 1..1059: mol_type = other DNA
tgaagcatcttccccagggtcatcgagggcaaggtggaccagatccgggcccgggtggagagaaatgctgtggagggcctgcggaccctgtgtgtggcctacaagaggctcatccaggaggagtatgagggcatctgcaagctgctgcaggccgccaaggtggccctgcaggaccgggagaagaagctggccgaggcctatgagcagatcgagaaggacctgaccctgctgggcgccacagctgtggaggaccggctgcaggagaaggctgctgacaccatcgaggccctgcagaaggccggcatcaaggtgtgggtgctgaccggggacaagatggagacagctgctgccacctgctacgcctgcaagctgttcagaagaaacacccagctgctggagctgaccaccaagagaattgaggagcagagcctgcatgatgtgctgtttgagctgagcaagacagtgctgcggcacagcggcagcctgacccgggacaacctgagcggcctgtctgctgacatgcaggactatggcctcatcattgatggagctgccctgagcctcatcatgaagccccgggaggatggcagcagcggcaactaccgggagctgttcctggagatctgccgcagctgcagcgctgtgctgtgctgcaggatggcccccctgcagaaggcccagatcgtgaagctgatcaagttcagcaaggagcaccccatcaccctggccatcggagatggagccaatgatgtgtccatgatcctggaggcccacgtgggcattggagtcatcggcaaggagggccggcaggccgccaggaacagcgactatgccatccccaagttcaagcacctgaagaagatgctgctggtgcacggccacttctactacatccgcatcagcgagctggtgcagtacttcttctacaagaatgtgtgcttcatcttcccccagttcctgtaccagttcttctgtggcttcagccagcagggccggcggcaggagtgcccagctgccctggcccgggtgcacctgctggatgcccctggcaccgtgtag

SEQ ID NO: 144435 - DNA, 3405 bp, synthetic construct; identical to SEQ ID NO: 144429
  misc_feature 1..3405: note = Description of Artificial Sequence: Synthetic coding sequence
  source 1..3405: mol_type = other DNA

SEQ ID NO: 144436 - DNA, 3534 bp, synthetic construct
  misc_feature 1..3534: note = Description of Artificial Sequence: Synthetic coding sequence
  source 1..3534: mol_type = other DNA
atgtggcgctggatccggcagcagctgggctttgatcctccccaccagagcgacaccaggaccatctacgtggccaaccgcttcccccagaatggcctgtacaccccccagaagttcatcgacaaccgcatcatcagcagcaagtacacagtgtggaactttgtgcccaagaacctgtttgagcagttccggcgggtggccaacttctacttcctgatcatcttcctggtgcagctgatgattgacacccccaccagccctgtgaccagcggcctgcccctcttcttcgtcatcaccgtgacagccatcaagcagggctatgaggactggctgcggcacaacagcgacaatgaggtgaatggagcccctgtgtatgtggtgcgcagcggcggcctggtgaagaccaggagcaagaacatccgggtgggggacatcgtgcgcatcgccaaggatgagatcttccctgctgacctggtgctgctgagcagtgaccggctggatggcagctgccacgtgaccacagccagcctggatggagagaccaacctgaagacccacgtggccgtgcctgagacagccctgctgcagacagtggccaacctggacaccctggtggccgtgattgagtgccagcagcctgaggccgacctgtaccgcttcatgggccgcatgatcatcacccagcagatggaggagatcgtgcggcccctgggccctgagagcctgctgctgcggggggcccggctgaagaacaccaaggagatcttcggcgtggccgtgtacacaggcatggagaccaagatggccctgaactacaagagcaagagccagaagaggtctgctgtggagaagtccatgaacaccttcctgatcatctacctggtgatcctgatcagcgaggccgtcatcagcaccatcctgaagtacacctggcaggccgaggagaagtgggatgagccctggtacaaccagaagacagagcaccagaggaacagcagcaagatcctgcgcttcatcagtgacttcctggccttcctggtgctgtacaacttcatcatccccatcagcctgtatgtgacagtggagatgcagaagttcctgggcagcttcttcatcggctgggacctggacctgtaccacgaggagagtgaccagaaggcccaggtgaacaccagtgacctgaatgaggagctgggccaggtggagtatgtgttcacagacaagacaggcaccctgacagaaaatgagatgcagttcagagaatgttccatcaatggcatgaagtaccaggagatcaatggccgcctggtgcctgagggccccaccccagacagcagcgagggcaacctgagctacctgagcagcctgagccacctgaacaacctgagccacctgaccaccagcagcagcttccgcaccagcccagaaaatgaaacagagctgatcaaggagcatgacctcttcttcaaggctgtgtccctgtgccacacagtgcagatcagcaatgtgcagacagactgcacaggagatggcccctggcagagcaacctggcccccagccagctggagtactatgccagcagcccagatgagaaggccctggtggaggccgccgccagaattggaattgtgttcatcggcaacagcgaggagaccatggaggtgaagaccctgggcaagctggagcgctacaagctgctgcacatcctggagtttgacagcgacagaagaaggatgtctgtcatcgtgcaggcccccagcggggagaagctgctgtttgccaagggagctgagagcagcatcctgcccaagtgcatcggcggggagattgagaagacccgcatccacgtggatgaatttgccctgaagggcctgcggaccctgtgcatcgcctacaggaagttcaccagcaaggagtatgaggagattgacaagaggatctttgaggccaggacagccctgcagcagcgggaggagaagctggccgctgtgttccagttcatcgagaaggacctgatcctgctgggcgccacagctgtggaggaccggctgcaggacaaggtgcgggagaccatcgaggccctgaggatggccggcatcaaggtgtgggtgctgaccggggacaagcatgaaacagctgtgtctgtgtccctgagctgtggccacttccacaggaccatgaacatcctggagctgatcaaccagaagagtgacagtgaatgtgccgagcagctgcggcagctggcccggcgcatcacagaggaccacgtgatccagcacggcctggtggtggatggcaccagcctgagcctggccctgcgggagcacgagaagctgttcatggaggtgtgcaggaactgcagcgctgtgctgtgctgcaggatggcccccctgcagaaggccaaggtgatccgcctcatcaagatcagccctgagaagcccatcaccctggccgtgggagatggagccaatgatgtgtccatgatccaggaggcccacgtgggcatcggcatcatgggcaaggagggccggcaggccgccaggaacagcgactatgccatcgcccgcttcaagttcctgagcaagctgctgtttgtgcacggccacttctactacatcagaattgccaccctggtgcagtacttcttctacaagaatgtgtgcttcatcaccccccagttcctgtaccagttctactgcctcttcagccagcagaccctgtatgacagcgtgtacctgaccctgtacaacatctgcttcaccagcctgcccatcctgatctacagcctgctggagcagcacgtggacccccacgtgctgcagaacaagcccaccctgtacagagacatcagcaagaaccggctgctgagcatcaagaccttcctgtactggaccatcctgggcttcagccacgccttcatcttcttcttcggcagctacctgctgattggcaaggacaccagcctgctgggcaatggccagatgtttggaaactggaccttcggcaccctggtgttcaccgtgatggtgatcaccgtgacagtgaagatggccctggagacccacttctggacctggatcaaccacctggtgacctggggcagcatcatcttctactttgtgttcagcctcttctacggcggcatcctgtggcccttcctgggcagccagaacatgtactttgtgttcatccagctgctgagcagcggcagcgcctggtttgccatcatcctgatggtggtgacctgcctcttcctggacatcatcaagaaggtgtttgacagacacctgcaccccaccagcacagagaaggcccagctgacagagaccaatgccggcatcaagtgcctggacagcatgtgctgcttccctgagggggaggccgcctgtgcctctgtgggccgcatgctggagcgggtgattggccgctgcagccccacccacatcagccgctcctggagcgccagtgaccccttctacaccaatgacaggagcatcctgaccctgagcaccatggacagcagcacctgctag

SEQ ID NO: 144437 - DNA, 315 bp, synthetic construct
  misc_feature 1..315: note = Description of Artificial Sequence: Synthetic coding sequence
  source 1..315: mol_type = other DNA
atgtactttgtgttcatccagctgctgagcagcggcagcgcctggtttgccatcatcctgatggtggtgacctgcctcttcctggacatcatcaagaaggtgtttgacagacacctgcaccccaccagcacagagaaggcccagatgtacagcaacacagtggccctgagtgatgagttcatcgccctgcagcccctgagccgggccaggaaccagctgagcaagctgcgctggaagaagatccgggtgcagagcgcccagcacatgaacctgctgaaggccagcacagagggccgcacagtgggcacctgctag

SEQ ID NO: 144438 - DNA, 4503 bp, synthetic construct
  misc_feature 1..4503: note = Description of Artificial Sequence: Synthetic coding sequence
  source 1..4503: mol_type = other DNA
atggaccccagcatgggcgtgaacagcgtgaccatctctgtggagggcatgacctgcaacagctgtgtgtggaccatcgagcagcagatcggcaaggtgaatggagtgcaccacatcaaggtgtccctggaggagaagaatgccaccatcatctatgaccccaagctgcagacccccaagaccctgcaggaggccattgatgacatgggctttgatgctgtgatccacaacccagaccccctgcctgtgctgacagacaccctcttcctgactgtgacagccagcctgaccctgccctgggaccacatccagagcaccctgctgaagaccaagggcgtgacagacatcaagatctacccccagaagaggacagtggccgtgaccatcatccccagcatcgtgaatgccaaccagatcaaggagctggtgcctgagctgagcctggacaccggcaccctggagaagaagagcggggcctgtgaggaccacagcatggcccaggccggggaggtggtgctgaagatgaaggtggagggcatgacctgccacagctgcaccagcaccatcgagggcaagattggcaagctgcagggcgtgcagaggatcaaggtgtccctggacaaccaggaggccaccatcgtgtaccagccccacctgatctctgtggaggagatgaagaagcagatcgaggccatgggcttccctgcctttgtgaagaagcagcccaagtacctgaagctgggcgccattgatgtggagcggctgaagaacacccctgtgaagagcagcgagggcagccagcagaggagccccagctacaccaatgacagcacagccaccttcatcattgatggcatgcactgcaagagctgtgtgagcaacatcgagagcaccctgagcgccctgcagtatgtgagcagcatcgtggtgtccctggagaacagaagtgccatcgtgaagtacaatgccagctctgtgaccccagagagcctgaggaaggccattgaagctgtgtccccaggcctgtacagagtgtccatcaccagcgaggtggagagcaccagcaacagccccagcagcagcagcctgcagaagatccccctgaatgtggtgtcccagcccctgacccaggagaccgtcatcaacattgatggcatgacctgcaacagctgtgtgcagagcattgaaggagtcatcagcaagaagccaggagtgaagagcatccgggtgtccctggccaacagcaatggcaccgtggagtatgaccccctgctgaccagccctgagaccctgcggggggccatcgaggacatgggctttgatgccaccctgagtgacaccaatgagcccctggtggtgattgcccagcccagcagcgagatgcccctgctgaccagcaccaatgagttctacaccaagggcatgacccctgtgcaggacaaggaggagggcaagaacagcagcaagtgctacatccaggtgacaggcatgacctgtgccagctgtgtggccaacatcgagaggaacctgcggcgggaggagggcatctacagcatcctggtggccctgatggccggcaaggccgaggtgcgctacaacccagctgtgatccagccccccatgattgctgagttcatccgggagctgggctttggagccaccgtgattgaaaatgctgatgaaggagatggagtgctggagctggtggtgcggggcatgacctgtgccagctgtgtgcacaagattgagagcagcctgaccaagcaccggggcatcctgtactgcagcgtggccctggccaccaacaaggcccacatcaagtatgaccctgagatcatcggcccccgggacatcatccacaccatcgagagcctgggctttgaggccagcctggtgaagaaggacagaagtgccagccacctggaccacaagcgggagatccggcagtggaggaggagcttcctggtgtccctcttcttctgcatccctgtgatgggcctgatgatctacatgatggtgatggaccaccactttgccaccctgcaccacaaccagaacatgagcaaggaggagatgatcaacctgcacagctccatgttcctggagcggcagatcctgcccggcctgtctgtgatgaacctgctgtccttcctgctgtgtgtgcctgtgcagttcttcggcggctggtacttctacatccaggcctacaaggccctgaagcacaagacagccaacatggatgtgctgattgtgctggccaccaccatcgcctttgcctacagcctcatcatcctgctggtggccatgtatgaaagagccaaggtgaaccccatcaccttctttgacaccccacccatgctgtttgtgttcatcgccctgggccgctggctggagcacatcgccaagggcaagaccagcgaggccctggccaagctgatcagcctgcaggccacagaggccaccatcgtgaccctggacagcgacaacatcctgctgtctgaggagcaggtggatgtggagctggtgcagagaggagacatcatcaaggtggtgcctgggggcaagtttcctgtggatggccgggtgattgagggccacagcatggtggatgagagcctcatcactggagaggccatgcctgtggccaagaagccaggcagcacagtgattgctggcagcatcaaccagaatggcagcctgctgatctgtgccacccacgtgggcgctgacaccaccctgagccagatcgtgaagctggtggaggaggcccagaccagcaaggcccccatccagcagtttgctgacaagctgagcggctactttgtgcccttcatcgtgtttgtgtccatcgccaccctgctggtgtggatcgtgattggcttcctgaactttgagatcgtggagacctacttccctggctacaacagaagcatcagcaggacagagaccatcatccgctttgccttccaggccagcatcaccgtgctgtgcatcgcctgcccctgcagcctgggcctggccacccccacagctgtgatggtgggcaccggggtgggcgcccagaatggcatcctgatcaagggcggggagcccctggagatggcccacaaggtgaaggtggtggtgtttgacaagacaggcaccatcacccacggcacccctgtggtgaaccaggtgaaggtgctgacagagagcaaccgcatcagccaccacaagatcctggccatcgtgggcacagctgagagcaacagcgagcaccccctgggcacagccatcaccaagtactgcaagcaggagctggacacagagaccctgggcacctgcatcgacttccaggtggtgcccggctgcggcatcagctgcaaggtgaccaacatcgagggcctgctgcacaagaacaactggaacatcgaggacaacaacatcaagaatgccagcctggtgcagattgatgccagcaatgagcagagcagcaccagcagctccatgatcattgatgcccagatcagcaatgccctgaatgcccagcagtacaaggtgctgattggcaaccgggagtggatgatcagaaatggcctggtgatcaacaatgatgtgaatgacttcatgacagagcacgagaggaaaggaagaacagctgtgctggtggccgtggatgatgagctgtgtggcctcatcgccatcgctgacacagtgaagccagaggccgagctggccatccacatcctgaagtccatgggcctggaggtggtgctgatgaccggggacaacagcaagacagcccggagcatcgccagccaggtgggcatcaccaaggtgtttgctgaggtgctgcccagccacaaggtggccaaggtgaagcagctgcaggaggagggcaagagggtggccatggtgggagatggcatcaatgacagccctgccctggccatggccaacgtgggcatcgccatcggcaccggcacagatgtggccatcgaggccgcagatgtggtgctgatcagaaatgacctgctggatgtggtggccagcattgacctgagccgggagaccgtgaagaggatccgcatcaactttgtgtttgccctgatctacaacctggtgggcatccccatcgccgccggggtcttcatgcccatcggcctggtgctgcagccctggatgggcagcgctgccatggccgccagctctgtgtctgtggtgctgagcagcctcttcctgaagctgtacaggaagcccacctatgagagctatgagctgcctgcccggagccagatcggccagaagagccccagcgagatctctgtgcacgtgggcattgatgacaccagcaggaacagccccaagctgggcctgctggaccgcatcgtgaactacagccgggccagcatcaacagcctgctgagtgacaagaggagcctgaacagcgtggtgaccagcgagccagacaagcacagcctgctggtgggggacttccgggaggatgatgacacagccctgtag

SEQ ID NO: 144439 - DNA, 4269 bp, synthetic construct
  misc_feature 1..4269: note = Description of Artificial Sequence: Synthetic coding sequence
  source 1..4269: mol_type = other DNA
atggaccccagcatgggcgtgaacagcgtgaccatctctgtggagggcatgacctgcaacagctgtgtgtggaccatcgagcagcagatcggcaaggtgaatggagtgcaccacatcaaggtgtccctggaggagaagaatgccaccatcatctatgaccccaagctgcagacccccaagaccctgcaggaggccattgatgacatgggctttgatgctgtgatccacaacccagaccccctgcctgtgctgacagacaccctcttcctgactgtgacagccagcctgaccctgccctgggaccacatccagagcaccctgctgaagaccaagggcgtgacagacatcaagatctacccccagaagaggacagtggccgtgaccatcatccccagcatcgtgaatgccaaccagatcaaggagctggtgcctgagctgagcctggacaccggcaccctggagaagaagagcggggcctgtgaggaccacagcatggcccaggccggggaggtggtgctgaagatgaaggtggagggcatgacctgccacagctgcaccagcaccatcgagggcaagattggcaagctgcagggcgtgcagaggatcaaggtgtccctggacaaccaggaggccaccatcgtgtaccagccccacctgatctctgtggaggagatgaagaagcagatcgaggccatgggcttccctgcctttgtgaagaagcagcccaagtacctgaagctgggcgccattgatgtggagcggctgaagaacacccctgtgaagagcagcgagggcagccagcagaggagccccagctacaccaatgacagcacagccaccttcatcattgatggcatgcactgcaagagctgtgtgagcaacatcgagagcaccctgagcgccctgcagtatgtgagcagcatcgtggtgtccctggagaacagaagtgccatcgtgaagtacaatgccagctctgtgaccccagagagcctgaggaaggccattgaagctgtgtccccaggcctgtacagagtgtccatcaccagcgaggtggagagcaccagcaacagccccagcagcagcagcctgcagaagatccccctgaatgtggtgtcccagcccctgacccaggagaccgtcatcaacattgatggcatgacctgcaacagctgtgtgcagagcattgaaggagtcatcagcaagaagccaggagtgaagagcatccgggtgtccctggccaacagcaatggcaccgtggagtatgaccccctgctgaccagccctgagaccctgcggggggccatcgaggacatgggctttgatgccaccctgagtgacaccaatgagcccctggtggtgattgcccagcccagcagcgagatgcccctgctgaccagcaccaatgagttctacaccaagggcatgacccctgtgcaggacaaggaggagggcaagaacagcagcaagtgctacatccaggtgacaggcatgacctgtgccagctgtgtggccaacatcgagaggaacctgcggcgggaggagggcatctacagcatcctggtggccctgatggccggcaaggccgaggtgcgctacaacccagctgtgatccagccccccatgattgctgagttcatccgggagctgggctttggagccaccgtgattgaaaatgctgatgaaggagatggagtgctggagctggtggtgcggggcatgacctgtgccagctgtgtgcacaagattgagagcagcctgaccaagcaccggggcatcctgtactgcagcgtggccctggccaccaacaaggcccacatcaagtatgaccctgagatcatcggcccccgggacatcatccacaccatcgagagcctgggctttgaggccagcctggtgaagaaggacagaagtgccagccacctggaccacaagcgggagatccggcagtggaggaggagcttcctggtgtccctcttcttctgcatccctgtgatgggcctgatgatctacatgatggtgatggaccaccactttgccaccctgcaccacaaccagaacatgagcaaggaggagatgatcaacctgcacagctccatgttcctggagcggcagatcctgcccggcctgtctgtgatgaacctgctgtccttcctgctgtgtgtgcctgtgcagggcaagaccagcgaggccctggccaagctgatcagcctgcaggccacagaggccaccatcgtgaccctggacagcgacaacatcctgctgtctgaggagcaggtggatgtggagctggtgcagagaggagacatcatcaaggtggtgcctgggggcaagtttcctgtggatggccgggtgattgagggccacagcatggtggatgagagcctcatcactggagaggccatgcctgtggccaagaagccaggcagcacagtgattgctggcagcatcaaccagaatggcagcctgctgatctgtgccacccacgtgggcgctgacaccaccctgagccagatcgtgaagctggtggaggaggcccagaccagcaaggcccccatccagcagtttgctgacaagctgagcggctactttgtgcccttcatcgtgtttgtgtccatcgccaccctgctggtgtggatcgtgattggcttcctgaactttgagatcgtggagacctacttccctggctacaacagaagcatcagcaggacagagaccatcatccgctttgccttccaggccagcatcaccgtgctgtgcatcgcctgcccctgcagcctgggcctggccacccccacagctgtgatggtgggcaccggggtgggcgcccagaatggcatcctgatcaagggcggggagcccctggagatggcccacaaggtgaaggtggtggtgtttgacaagacaggcaccatcacccacggcacccctgtggtgaaccaggtgaaggtgctgacagagagcaaccgcatcagccaccacaagatcctggccatcgtgggcacagctgagagcaacagcgagcaccccctgggcacagccatcaccaagtactgcaagcaggagctggacacagagaccctgggcacctgcatcgacttccaggtggtgcccggctgcggcatcagctgcaaggtgaccaacatcgagggcctgctgcacaagaacaactggaacatcgaggacaacaacatcaagaatgccagcctggtgcagattgatgccagcaatgagcagagcagcaccagcagctccatgatcattgatgcccagatcagcaatgccctgaatgcccagcagtacaaggtgctgattggcaaccgggagtggatgatcagaaatggcctggtgatcaacaatgatgtgaatgacttcatgacagagcacgagaggaaaggaagaacagctgtgctggtggccgtggatgatgagctgtgtggcctcatcgccatcgctgacacagtgaagccagaggccgagctggccatccacatcctgaagtccatgggcctggaggtggtgctgatgaccggggacaacagcaagacagcccggagcatcgccagccaggtgggcatcaccaaggtgtttgctgaggtgctgcccagccacaaggtggccaaggtgaagcagctgcaggaggagggcaagagggtggccatggtgggagatggcatcaatgacagccctgccctggccatggccaacgtgggcatcgccatcggcaccggcacagatgtggccatcgaggccgcagatgtggtgctgatcagaaatgacctgctggatgtggtggccagcattgacctgagccgggagaccgtgaagaggatccgcatcaactttgtgtttgccctgatctacaacctggtgggcatccccatcgccgccggggtcttcatgcccatcggcctggtgctgcagccctggatgggcagcgctgccatggccgccagctctgtgtctgtggtgctgagcagcctcttcctgaagctgtacaggaagcccacctatgagagctatgagctgcctgcccggagccagatcggccagaagagccccagcgagatctctgtgcacgtgggcattgatgacaccagcaggaacagccccaagctgggcctgctggaccgcatcgtgaactacagccgggccagcatcaacagcctgctgagtgacaagaggagcctgaacagcgtggtgaccagcgagccagacaagcacagcctgctggtgggggacttccgggaggatgatgacacagccctgtag

SEQ ID NO: 144440 - DNA, 264 bp, synthetic construct
  misc_feature 1..264: note = Description of Artificial Sequence: Synthetic coding sequence
  source 1..264: mol_type = other DNA
gaatgtaatgaggagatcaagatggaccccagcatgggcgtgaacagcgtgaccatctctgtggagggcatgacctgcaacagctgtgtgtggaccatcgagcagcagatcggcaaggtgaatggagtgcaccacatcaaggtgtccctggaggagaagaatgccaccatcatcttctacgcccactggtttggatttgctgccctggatggcatctgcagcaatggctgcttcatctgcttctgcagcaccttcttctcctag

SEQ ID NO: 144441 - DNA, 1512 bp, synthetic construct
  misc_feature 1..1512: note = Description of Artificial Sequence: Synthetic coding sequence
  source 1..1512: mol_type = other DNA
atggaccccagcatgggcgtgaacagcgtgaccatctctgtggagggcatgacctgcaacagctgtgtgtggaccatcgagcagcagatcggcaaggtgaatggagtgcaccacatcaaggtgaaggtggtggtgtttgacaagacaggcaccatcacccacggcacccctgtggtgaaccaggtgaaggtgctgacagagagcaaccgcatcagccaccacaagatcctggccatcgtgggcacagctgagagcaacagcgagcaccccctgggcacagccatcaccaagtactgcaagcaggagctggacacagagaccctgggcacctgcatcgacttccaggtggtgcccggctgcggcatcagctgcaaggtgaccaacatcgagggcctgctgcacaagaacaactggaacatcgaggacaacaacatcaagaatgccagcctggtgcagattgatgccagcaatgagcagagcagcaccagcagctccatgatcattgatgcccagatcagcaatgccctgaatgcccagcagtacaaggtgctgattggcaaccgggagtggatgatcagaaatggcctggtgatcaacaatgatgtgaatgacttcatgacagaacatgagaggaagggccgcacagctgtgctggtggccgtggatgatgagctgtgtggcctgattgccatcgctgacacagtgaagccagaggccgagctggccatccacatcctgaagtccatgggcctggaggtggtgctgatgactggagacaacagcaagacagcccggagcatcgccagccaggtgggcatcaccaaggtgtttgctgaggtgctgcccagccacaaggtggccaaggtgaagcagctgcaggaggagggcaagagggtggccatggtgggagatggcatcaatgacagccctgccctggccatggccaacgtgggcatcgccatcggcactggaacagatgtggccattgaagctgctgatgtggtgctgatcagaaatgacctgctggatgtggtggccagcattgacctgagccgggagaccgtgaagaggatccgcatcaactttgtgtttgccctgatctacaacctggtgggcatccccatcgctgctggggtcttcatgcccatcggcctggtgctgcagccctggatgggcagcgctgccatggccgccagctctgtgtctgtggtgctgagcagcctcttcctgaagctgtacaggaagcccacctatgagagctatgagctgcctgcccggagccagatcggccagaagagccccagcgagatctctgtgcacgtgggcattgatgacaccagcaggaacagccccaagctgggcctgctggacagaattgtgaactacagccgggccagcatcaacagcctgctgagtgacaagaggagcctgaacagcgtggtgaccagcgagccagacaagcacagcctgctggtgggggacttcagagaagatgatgacacagccctgtag

SEQ ID NO: 144442 - DNA, 2049 bp, synthetic construct
  misc_feature 1..2049: note = Description of Artificial Sequence: Synthetic coding sequence
  source 1..2049: mol_type = other DNA
agaaaccaggagtgcaatgaggagatcaagatggaccccagcatgggcgtgaacagcgtgaccatctctgtggagggcatgacctgcaacagctgtgtgtggaccatcgagcagcagatcggcaaggtgaatggagtgcaccacatcaaggtgtccctggaggagaagaatgccaccatcatctatgaccccaagctgcagacccccaagaccctgcaggaggccattgatgacatgggctttgatgctgtgatccacaacccagaccccctgcctgtgctgacagacaccctcttcctgactgtgacagccagcctgaccctgccctgggaccacatccagagcaccctgctgaagaccaagggcgtgacagacatcaagatctacccccagaagaggacagtggccgtgaccatcatccccagcatcgtgaatgccaaccagatcaaggagctggtgcctgagctgagcctggacaccggcaccctggagaagaagagcggggcctgtgaggaccacagcatggcccaggccggggaggtggtgctgaagatgaaggtggagggcatgacctgccacagctgcaccagcaccatcgagggcaagattggcaagctgcagggcgtgcagaggatcaaggtgtccctggacaaccaggaggccaccatcgtgtaccagccccacctgatctctgtggaggagatgaagaagcagatcgaggccatgggcttccctgcctttgtgaagaagcagcccaagtacctgaagctgggcgccattgatgtggagcggctgaagaacacccctgtgaagagcagcgagggcagccagcagaggagccccagctacaccaatgacagcacagccaccttcatcattgatggcatgcactgcaagagctgtgtgagcaacatcgagagcaccctgagcgccctgcagtatgtgagcagcatcgtggtgtccctggagaacagaagtgccatcgtgaagtacaatgccagctctgtgaccccagagagcctgaggaaggccattgaagctgtgtccccaggcctgtacagagtgtccatcaccagcgaggtggagagcaccagcaacagccccagcagcagcagcctgcagaagatccccctgaatgtggtgtcccagcccctgacccaggagaccgtcatcaacattgatggcatgacctgcaacagctgtgtgcagagcattgaaggagtcatcagcaagaagccaggagtgaagagcatccgggtgtccctggccaacagcaatggcaccgtggagtatgaccccctgctgaccagccctgagaccctgcggggggccatcgaggacatgggctttgatgccaccctgagtgacaccaatgagcccctggtggtgattgcccagcccagcagcgagatgcccctgctgaccagcaccaatgagttctacaccaagggcatgacccctgtgcaggacaaggaggagggcaagaacagcagcaagtgctacatccaggtgacaggcatgacctgtgccagctgtgtggccaacatcgagaggaacctgcggcgggaggagggcatctacagcatcctggtggccctgatggccggcaaggccgaggtgcgctacaacccagctgtgatccagccccccatgattgctgagttcatccgggagctgggctttggagccaccgtgattgaaaatgctgatgaaggagatggagtgctggagctggtggtgcggggcatgacctgtgccagctgtgtgcacaagattgagagcagcctgaccaagcaccggggcatcctgtactgcagcgtggccctggccaccaacaaggcccacatcaagtatgaccctgagatcatcggcccccgggacatcatccacaccatcgaggtgtctgccaagaacctgtgcttctgtgtgctgacctacctgatcagcacccctgtgaaccacttctggtttgccagtgacagaggaaatgagaagaagagcaacagctttgagcacttcaagcaggacctgagccagaacctgatgtag

SEQ ID NO: 144443 - DNA, 825 bp, synthetic construct
  misc_feature 1..825: note = Description of Artificial Sequence: Synthetic coding sequence
  source 1..825: mol_type = other DNA
atggaccccagcatgggcgtgaacagcgtgaccatctctgtggagggcatgacctgcaacagctgtgtgtggaccatcgagcagcagatcggcaaggtgaatggagtgcaccacatcaaggtgtccctggaggagaagaatgccaccatcatctatgaccccaagctgcagacccccaagaccctgcaggaggccattgatgacatgggctttgatgctgtgatccacaacccagaccccctgcctgtgctgacagacaccctcttcctgactgtgacagccagcctgaccctgccctgggaccacatccagagcaccctgctgaagaccaagggcgtgacagacatcaagatctacccccagaagaggacagtggccgtgaccatcatccccagcatcgtgaatgccaaccagatcaaggagctggtgcctgagctgagcctggacaccggcaccctggagaagaagagcggggcctgtgaggaccacagcatggcccaggccggggaggtggtgctgaagatgaaggtggagggcatgacctgccacagctgcaccagcaccatcgagggcaagattggcaagctgcagggcgtgcagaggatcaaggtgtccctggacaaccaggaggccaccatcgtgtaccagccccacctgatctctgtggaggagatgaagaagcagatcgaggccatgggcttccctgcctttgtgaagaagcagcccaagtacctgaagctgggcgccattgatgtggagcggctgaagaacacccctgtgaagagcagcgagggcagccagcagaggagccccagctaccagtag

SEQ ID NO: 144444 - DNA, 546 bp, synthetic construct
  misc_feature 1..546: note = Description of Artificial Sequence: Synthetic coding sequence
  source 1..546: mol_type = other DNA
atgaggcccagcggcacctgtgccagctgtggcagtgaccccccaccacccacccaggtgcccagcagcagaaatgactgtggcagcacagtgcctgacaacccctttgtgaggaccctgccccacaccaccatgagcggccaccagctgcccccagctggcacccagaggcctggccctgctgcctgcctggtgcccggcagcctgcccagcctgcccagccagcccggcccctggggcgccctgggcacagctgctgctgagggcatgagctgcagcaacaccaggacagccctggagtttgccctcttccccaaggagatgctgctgggctcctggtacggctggggcctgagcctgtaccgccggggccgctgccaggacagcgcccaccctgaggaggacacctgcccccatggagagggcgccccagcccaggccggggagagcgtgcccagccagcagctgtgccaccaccctgctggcaactggggcggcctgtactgggtgattggcaaggccttcagcctggcctggaactgctag

SEQ ID NO: 144445 - DNA, 642 bp, synthetic construct
  misc_feature 1..642: note = Description of Artificial Sequence: Synthetic coding sequence
  source 1..642: mol_type = other DNA
atgagggtgcggggccctgcccggctcatcgccagcggggcccggctgctgctgaggatgctgagcgccctgcccggctggggccctgcccacctgcagaggcccctgctgggccctgccagctgcctgggcatcctgcggcctgccatgacagcccacagctttgccctgcccgtcatcatcttcaccaccttctggggcctggtgggcattgctggcccctggtttgtgcccaagggccccaacagaggagtcatcatcaccatgctggtggccacagctgtgtgctgctacctgctgtgcccagccctgggcatgacagtggcccccctgagcctgaccacccccagcagcggccccagccccacccagctgtgcctggtgaccagcagcctgctgctggccccccgggaccctgacccccagggcctgcccggctcctggaagagcagccagagcagccagcctgcccgggccctgggcagccctggccacagcagcggcagaggagatgtgctgctgcagtacccccactgcagcggcgtgtgccccctgagccagggagatgctgctggggagctggtgtgggtgggcagcttccccctgcagacaggccagatgcctggcctgagccccagctag

SEQ ID NO: 144446 - DNA, 495 bp, synthetic construct
  misc_feature 1..495: note = Description of Artificial Sequence: Synthetic coding sequence
  source 1..495: mol_type = other DNA
atgacagcccacagctttgccctgcctgtgatcatcttcaccaccttctggggcctggtgggcattgctggcccctggtttgtgcccaagggccccaacagaggagtcatcatcaccatgctggtggccacagctgtgtgctgctacctgctgtgcccagccctgggcatgacagtggcccccctgagcctgaccacccccagcagcggccccagccccacccagctgtgcctggtgaccagcagcctgctgctggccccccgggaccctgacccccagggcctgcccggctcctggaagagcagccagagcagccagcctgcccgggccctgggcagccctggccacagcagcggcagaggagatgtgctgctgcagtacccccactgcagcggcgtgtgccccctgagccagggagatgctgctggggagctggtgtgggtgggcagcttccccctgcagacaggccagatgcctggcctgagccccagctag

SEQ ID NO: 144447 - DNA, 393 bp, synthetic construct
  misc_feature 1..393: note = Description of Artificial Sequence: Synthetic coding sequence
  source 1..393: mol_type = other DNA
atgagggtgcggggccctgcccggctcatcgccagcggggcccggctgctgctgaggatgctgagcgccctgcccggctggggccctgcccacctgcagaggcccctgctgggccctgccagctgcctgggcatcctgcggcctgccatgacagcccacagctttgccctgcccgtcatcatcttcaccaccttctggggcctggtgggcattgctggcccctggtttgtgcccaagggccccaacagaggagtcatcatcaccatgctggtggccacagctgtgtgctgctacctgttctggctgattgccatcctggcccagctgaaccccctgtttggcccccagctgaagaatgagaccatctggtacgtgcgcttcctgtgggagtag

SEQ ID NO: 144448 - DNA, 246 bp, synthetic construct
  misc_feature 1..246: note = Description of Artificial Sequence: Synthetic coding sequence
  source 1..246: mol_type = other DNA
atgacagcccacagctttgccctgcctgtgatcatcttcaccaccttctggggcctggtgggcattgctggcccctggtttgtgcccaagggccccaacagaggagtcatcatcaccatgctggtggccacagctgtgtgctgctacctgttctggctgattgccatcctggcccagctgaaccccctgtttggcccccagctgaagaatgagaccatctggtacgtgcgcttcctgtgggagtag

SEQ ID NO: 144449 - DNA, 564 bp, synthetic construct
  misc_feature 1..564: note = Description of Artificial Sequence: Synthetic coding sequence
  source 1..564: mol_type = other DNA
atgacagcccacagctttgccctgcctgtgatcatcttcaccaccttctggggcctggtgggcattgctggcccctggtttgtgcccaagggccccaacagaggagtcatcatcaccatgctggtggccacagctgtgtgctgctacctgttctggctgattgccatcctggcccagctgaaccccctgtttggcccccagctgaagaatgagaccatctggtgcccagccctgggcatgacagtggcccccctgagcctgaccacccccagcagcggccccagccccacccagctgtgcctggtgaccagcagcctgctgctggccccccgggaccctgacccccagggcctgcccggctcctggaagagcagccagagcagccagcctgcccgggccctgggcagccctggccacagcagcggcagaggagatgtgctgctgcagtacccccactgcagcggcgtgtgccccctgagccagggagatgctgctggggagctggtgtgggtgggcagcttccccctgcagacaggccagatgcctggcctgagccccagctag

SEQ ID NO: 144450 - DNA, 357 bp, synthetic construct
  misc_feature 1..357: note = Description of Artificial Sequence: Synthetic coding sequence
  source 1..357: mol_type = other DNA
atggccagccagagccagggcatccagcagctgctgcaggccgagaagagagctgctgagaaggtgtctgaggccaggaagaggaagaacagaaggctgaagcaggccaaggaggaggcccaggccgagattgagcagtaccgcctgcagcgggagaaggagttcaaggccaaggaggccgccgccctgggcagccggggcagctgcagcacagaggtggagaaggagacccaggagaagatgaccatcctgcagacctacttccggcagaacagagatgaggtgctggacaacctgctggcctttgtgtgtgacatccggcctgagatccacgagaactaccgcatcaatggatag

SEQ ID NO: 144451 - DNA, 357 bp, synthetic construct
  misc_feature 1..357: note = Description of Artificial Sequence: Synthetic coding sequence
  source 1..357: mol_type = other DNA
atggccagccagagccagggcatccagcagctgctgcaggccgagaagagagctgctgagaaggtggctgatgccaggaagaggaaggcccggcggctgaagcaggccaaggaggaggcccagatggaggtggagcagtaccgccgggagcgggagcacgagttccagagcaagcagcaggccgccatgggcagccagggcaacctgtctgctgaggtggagcaggccacccggcggcaggtgcagggcatgcagagcagccagcagaggaaccgggagcgggtgctggcccagctgctgggcatggtgtgtgatgtgcggccccaggtgcaccccaactaccgcatcagcgcctag

SEQ ID NO: 144452 - DNA, 237 bp, synthetic construct
  misc_feature 1..237: note = Description of Artificial Sequence: Synthetic coding sequence
  source 1..237: mol_type = other DNA
atggccagccagagccagggcatccagcagctgctgcaggccgagaagagagctgctgagaaggtggctgatgccaggaagaggaaggcccggcggctgaagcaggccacccggcggcaggtgcagggcatgcagagcagccagcagaggaaccgggagcgggtgctggcccagctgctgggcatggtgtgtgatgtgcggccccaggtgcaccccaactaccgcatcagcgcctag

SEQ ID NO: 144453 - DNA, 357 bp, synthetic construct; identical to SEQ ID NO: 144451
  misc_feature 1..357: note = Description of Artificial Sequence: Synthetic coding sequence
  source 1..357: mol_type = other DNA

SEQ ID NO: 144454 - DNA, 477 bp, synthetic construct
  misc_feature 1..477: note = Description of Artificial Sequence: Synthetic coding sequence
  source 1..477: mol_type = other DNA
gggggccagcagcacgctgtgccctgcccccatggaggccctgggggccagggccagcccagggctgaggccgccggcaccggccagggccacagaggaggccacaggcctggagctgtggtgggcgccgcccagcacctgcaccggggcctgggcgtggccggcggcggccctggccctggccctgctgtgctgcagaccaggaaggcccggcggctgaagcaggccaaggaggaggcccagatggaggtggagcagtaccgccgggagcgggagcacgagttccagagcaagcagcaggccgccatgggcagccagggcaacctgtctgctgaggtggagcaggccacccggcggcaggtgcagggcatgcagagcagccagcagaggaaccgggagcgggtgctggcccagctgctgggcatggtgtgtgatgtgcggccccaggtgcaccccaactaccgcatcagcgcctag

SEQ ID NO: 144455 - DNA, 237 bp, synthetic construct; identical to SEQ ID NO: 144452
  misc_feature 1..237: note = Description of Artificial Sequence: Synthetic coding sequence
  source 1..237: mol_type = other DNA

SEQ ID NO: 144456 - DNA, 237 bp, synthetic construct; identical to SEQ ID NO: 144452
  misc_feature 1..237: note = Description of Artificial Sequence: Synthetic coding sequence
  source 1..237: mol_type = other DNA

SEQ ID NO: 144457 - DNA, 357 bp, synthetic construct; identical to SEQ ID NO: 144451
  misc_feature 1..357: note = Description of Artificial Sequence: Synthetic coding sequence
  source 1..357: mol_type = other DNA

SEQ ID NO: 144458 - DNA, 237 bp, synthetic construct; identical to SEQ ID NO: 144452
  misc_feature 1..237: note = Description of Artificial Sequence: Synthetic coding sequence
  source 1..237: mol_type = other DNA

SEQ ID NO: 144459 - DNA, 357 bp, synthetic construct; identical to SEQ ID NO: 144451
  misc_feature 1..357: note = Description of Artificial Sequence: Synthetic coding sequence
  source 1..357: mol_type = other DNA

SEQ ID NO: 144460 - DNA, 237 bp, synthetic construct; identical to SEQ ID NO: 144452
  misc_feature 1..237: note = Description of Artificial Sequence: Synthetic coding sequence
  source 1..237: mol_type = other DNA

SEQ ID NO: 144461 - DNA, 237 bp, synthetic construct; identical to SEQ ID NO: 144452
  misc_feature 1..237: note = Description of Artificial Sequence: Synthetic coding sequence
  source 1..237: mol_type = other DNA

SEQ ID NO: 144462 - DNA, 357 bp, synthetic construct; identical to SEQ ID NO: 144451
  misc_feature 1..357: note = Description of Artificial Sequence: Synthetic coding sequence
  source 1..357: mol_type = other DNA

SEQ ID NO: 144463 - DNA, 237 bp, synthetic construct; identical to SEQ ID NO: 144452
  misc_feature 1..237: note = Description of Artificial Sequence: Synthetic coding sequence
  source 1..237: mol_type = other DNA

SEQ ID NO: 144464 - DNA, 357 bp, synthetic construct; identical to SEQ ID NO: 144451
  misc_feature 1..357: note = Description of Artificial Sequence: Synthetic coding sequence
  source 1..357: mol_type = other DNA

SEQ ID NO: 144465 - DNA, 357 bp, synthetic construct; identical to SEQ ID NO: 144451
  misc_feature 1..357: note = Description of Artificial Sequence: Synthetic coding sequence
  source 1..357: mol_type = other DNA

SEQ ID NO: 144466 - DNA, 234 bp, synthetic construct
  misc_feature 1..234: note = Description of Artificial Sequence: Synthetic coding sequence
  source 1..234: mol_type = other DNA
atggaggtggagcagtacagaagagagcgggagcacgagttccagagcaagcagcaggccgccatgggcagccagggcaacctgtctgctgaggtggagcaggccacccggcggcaggtgcagggcatgcagagcagccagcagaggaaccgggagcgggtgctggcccagctgctgggcatggtgtgtgatgtgcggccccaggtgcaccccaactaccgcatcagcgcctag

SEQ ID NO: 144467 - DNA, 348 bp, synthetic construct
  misc_feature 1..348: note = Description of Artificial Sequence: Synthetic coding sequence
  source 1..348: mol_type = other DNA
gtggagcccggcatccagcagctgctgcaggccgagaagagagctgctgagaaggtggctgatgccaggaagaggaaggcccggcggctgaagcaggccaaggaggaggcccagatggaggtggagcagtacagaagagagcgggagcacgagttccagagcaagcagcaggccgccatgggcagccagggcaacctgtctgctgaggtggagcaggccacccggcggcaggtgcagggcatgcagagcagccagcagaggaaccgggagcgggtgctggcccagctgctgggcatggtgtgtgatgtgcggccccaggtgcaccccaactaccgcatcagcgcctag

SEQ ID NO: 144468 - DNA, 468 bp, synthetic construct
  misc_feature 1..468: note = Description of Artificial Sequence: Synthetic coding sequence
  source 1..468: mol_type = other DNA
atgtctgagagcaagagcggcccagaatatgccagcttctttgctgtgatgggcgccagcgctgccatggtgttcagcgccctgggcgccgcctacggcacagccaagtctggaactggaattgctgccatgtctgtgatgaggcctgagcagatcatgaagagcatcatccctgtggtgatggccggcatcatcgccatctacggcctggtggtggccgtgctgattgccaacagcctgaatgatgacatcagcctgtacaagagcttcctgcagctgggcgccggcctgtctgtgggcctgagcggcctggccgccggctttgccatcggcatcgtgggagatgctggggtgcggggcacagcccagcagccccggctgtttgtgggcatgatcctgatcctgatctttgctgaggtgctgggcctgtatggcctgattgtggccctgatcctgagcaccaagtag

SEQ ID NO: 144469 - DNA, 477 bp, synthetic construct
  misc_feature 1..477: note = Description of Artificial Sequence: Synthetic coding sequence
  source 1..477: mol_type = other DNA
atgtggagcaacctgggcatcggcctggccatcagcctgtctgtggtgggcgccgcctggggcatctacatcaccggcagcagcatcatcggcggcggcgtgaaggccccccgcatcaagaccaagaacctggtgtccatcatcttctgtgaggccgtggccatctacggcatcatcatggccatcgtcatcagcaacatggccgagcccttcagcgccacagaccccaaggccatcggccacaggaactaccacgccggctacagcatgtttggagctggcctgactgtgggcctgagcaacctcttctgtggggtgtgtgtgggcatcgtgggcagcggggccgccctggctgatgcccagaaccccagcctgtttgtgaagatcctgattgtggagatctttggaagtgccatcggcctgtttggagtgattgtggccatcctgcagaccagccgggtgaagatgggagactag

SEQ ID NO: 144470 - DNA, 129 bp, synthetic construct
  misc_feature 1..129: note = Description of Artificial Sequence: Synthetic coding sequence
  source 1..129: mol_type = other DNA
gtgggcagcggggccgccctggctgatgcccagaaccccagcctgtttgtgaagatcctgattgtggagatcttcggcagcctggccagcctgggcagcagcagccagttcttccggcccccagagtag

SEQ ID NO: 144471 - DNA, 759 bp, synthetic construct
  misc_feature 1..759: note = Description of Artificial Sequence: Synthetic coding sequence
  source 1..759: mol_type = other DNA
atgacaggcctggccctgctgtacagcggcgtgtttgtggccttctgggcctgtgccctggccgtgggggaggccggctcctggagggctggggccgccagccggcccagctggccaggaagaaattctgctgggaagtggccagctggcaacacaggccccccccgggccctgcacccccggctgtggggcctggccccagcccgggccagtgacagcgacaagggggaccctgacttccagctgctggaggagggcttcctgacagagaccagccccttcatgtggagcaacctgggcatcggcctggccatcagcctgtctgtggtgggcgccgcctggggcatctacatcaccggcagcagcatcatcggcggcggcgtgaaggccccccgcatcaagaccaagaacctggtgtccatcatcttctgtgaggccgtggccatctacggcatcatcatggccatcgtcatcagcaacatggccgagcccttcagcgccacagaccccaaggccatcggccacaggaactaccacgccggctacagcatgtttggagctggcctgactgtgggcctgagcaacctcttctgtggggtgtgtgtgggcatcgtgggcagcggggccgccctggctgatgcccagaaccccagcctgtttgtgaagatcctgattgtggagatctttggaagtgccatcggcctgtttggagtgattgtggccatcctgcagaccagccgggtgaagatgggagactag

SEQ ID NO: 144472 - DNA, 618 bp, synthetic construct
  misc_feature 1..618: note = Description of Artificial Sequence: Synthetic coding sequence
  source 1..618: mol_type = other DNA
atgacaggcctggccctgctgtacagcggcgtgtttgtggccttctgggcctgtgccctggccgtgggcgtgtgctacaccatctttgacctgggcttccgctttgatgtggcctggttcctgacagagaccagccccttcatgtggagcaacctgggcatcggcctggccatcagcctgtctgtggtgggcgccgcctggggcatctacatcaccggcagcagcatcattggaggcggcgtgaaggccccccgcatcaagaccaagaacctggtgtccatcatcttctgtgaggccgtggccatctacggcatcatcatggccatcgtcatcagcaacatggccgagcccttcagcgccacagaccccaaggccatcggccacaggaactaccacgccggctacagcatgtttggagctggcctgactgtgggcctgagcaacctcttctgtggggtgtgtgtgggcatcgtgggcagcggggccgccctggctgatgcccagaaccccagcctgtttgtgaagatcctgattgtggagatcttcggcagcgccatcggcctgtttggagtcatcgtggccatcctgcagaccagccgggtgaagatgggagactag

SEQ ID NO: 144473 - DNA, 261 bp, synthetic construct
  misc_feature 1..261: note = Description of Artificial Sequence: Synthetic coding sequence
  source 1..261: mol_type = other DNA
atgtggagcaacctgggcatcggcctggccatcagcctgtctgtggtgggcgccgcctggggcatctacatcaccggcagcagcatcatcggcggcggcgtgaaggccccccgcatcaagaccaagaacctggtgtccatcatcttctgtgaggccgtggccatctacggcatcatcatggccatcgtcatcagcaacatggccgagcccttcagcgccacagaccccaaggccatcggccacaggaactaccacgcctag

SEQ ID NO: 144474 - DNA, 477 bp, synthetic construct; identical to SEQ ID NO: 144469
  misc_feature 1..477: note = Description of Artificial Sequence: Synthetic coding sequence
  source 1..477: mol_type = other DNA

SEQ ID NO: 144475 - DNA, 786 bp, synthetic construct
  misc_feature 1..786: note = Description of Artificial Sequence: Synthetic coding sequence
  source 1..786: mol_type = other DNA
atgacaggcctggccctgctgtacagcggcgtgtttgtggccttctgggcctgtgccctggccgtgggcgtgtgctacaccatctttgacctgggcttccgctttgatgtggcctggttcctgacagagaccagccccttcatgtggagcaacctgggcatcggcctggccatcagcctgtctgtggtgggcgccgcctggggcatctacatcaccggcagcagcatcattggaggcggcgtgaaggccccccgcatcaagaccaagaacctggtgtccatcatcttctgtgaggccgtggccatctacggcatcatcatggccatcgtcatcagcaacatggccgagcccttcagcgccacagaccccaaggccatcggccacaggaactaccacgccggctacagcatgtttggagctggcctgactgtgggcctgagcaacctcttctgtggggtgtgtgtgggcatcgtgggcagcggggccgccctggctgatgcccagaaccccagcctgtttgtgaagatcctgattgtggagatcttcggcagcgccatcggcctgtttggagtcatcgtggccatcctgcaggtgatgaaccccctgggcaagcccctgtgcccctgcccccagcccagcctgaccctgctgctggagaagctgaagtgcagccccagcctgcccatcaccatcgacagccccaagcagctgcccccaccccacttccacctgctggtgttctcctaccggggcagcctcttcctgagcctcatctggtgccactag

SEQ ID NO: 144476 - DNA, 681 bp, synthetic construct
  misc_feature 1..681: note = Description of Artificial Sequence: Synthetic coding sequence
  source 1..681: mol_type = other DNA
atggccctgagtgatgctgatgtgcagaagcagatcaagcacatgatggccttcatcgagcaggaggccaatgagaaggccgaggagattgatgccaaggccgaggaggagttcaacatcgagaagggccgcctggtgcagacccagaggctgaagatcatggagtactatgagaagaaggagaagcagatcgagcagcagaagaagatccagatgagcaacctgatgaaccaggcccggctgaaggtgctgcgggccagagatgacctgatcacagacctgctgaatgaggccaagcagaggctgagcaaggtggtgaaggacaccacccgctaccaggtgctgctggatggcctggtgctgcagggcctgtaccagctgctggagcccaggatgattgtgcgctgcaggaagcaggacttccccctggtgaaggctgctgtgcagaaggccatccccatgtacaagatcgccaccaagaatgatgtggatgtgcagattgaccaggagagctacctgcctgaagatattgctgggggcgtggagatctacaatggagacaggaagatcaaggtgagcaacaccctggagagccggctggacctgattgcccagcagatgatgcctgaggtgcggggggccctgtttggagccaatgccaacaggaagttcctggactag

SEQ ID NO: 144477 - DNA, 591 bp, synthetic construct
  misc_feature 1..591: note = Description of Artificial Sequence: Synthetic coding sequence
  source 1..591: mol_type = other DNA
atggccctgagtgatgctgatgtgcagaagcagatcaagcacatgatggccttcatcgagcaggaggccaatgagaaggccgaggagattgatgccaaggccgaggaggagttcaacatcgagaagggccgcctggtgcagacccagaggctgaagatcatggagtactatgagaagaaggagaagcagatcgagcagcagaagaagatccagatgagcaacctgatgaaccaggcccggctgaaggtgctgcgggccagagatgacctgatcaccggcctgtaccagctgctggagcccaggatgattgtgcgctgcaggaagcaggacttccccctggtgaaggctgctgtgcagaaggccatccccatgtacaagatcgccaccaagaatgatgtggatgtgcagattgaccaggagagctacctgcctgaagatattgctgggggcgtggagatctacaatggagacaggaagatcaaggtgagcaacaccctggagagccggctggacctgattgcccagcagatgatgcctgaggtgcggggggccctgtttggagccaatgccaacaggaagttcctggactag

SEQ ID NO: 144478 - DNA, 615 bp, synthetic construct
  misc_feature 1..615: note = Description of Artificial Sequence: Synthetic coding sequence
  source 1..615: mol_type = other DNA
atggccctgagtgatgctgatgtgcagaagcaggccgaggaggagttcaacatcgagaagggccgcctggtgcagacccagaggctgaagatcatggagtactatgagaagaaggagaagcagatcgagcagcagaagaagatccagatgagcaacctgatgaaccaggcccggctgaaggtgctgcgggccagagatgacctgatcacagacctgctgaatgaggccaagcagaggctgagcaaggtggtgaaggacaccacccgctaccaggtgctgctggatggcctggtgctgcagggcctgtaccagctgctggagcccaggatgattgtgcgctgcaggaagcaggacttccccctggtgaaggctgctgtgcagaaggccatccccatgtacaagatcgccaccaagaatgatgtggatgtgcagattgaccaggagagctacctgcctgaagatattgctgggggcgtggagatctacaatggagacaggaagatcaaggtgagcaacaccctggagagccggctggacctgattgcccagcagatgatgcctgaggtgcggggggccctgtttggagccaatgccaacaggaagttcctggactag

SEQ ID NO: 144479 - DNA, 1056 bp, synthetic construct
  misc_feature 1..1056: note = Description of Artificial Sequence: Synthetic coding sequence
  source 1..1056: mol_type = other DNA
atgtccttcttccctgagctgtacttcaacgtggacaatggctacctggagggcctggtgcggggcctgaaggccggcgtgctgagccaggccgactacctgaacctggtgcagtgtgagaccctggaggacctgaagctgcacctgcagagcacagattatggcaacttcctggccaatgaggccagccccctgactgtgtctgtgattgatgaccggctgaaggagaagatggtggtggagttccgccacatgaggaaccacgcctatgagcccctggccagcttcctggacttcatcacctacagctacatgattgacaacgtcatcctgctgatcaccggcaccctgcaccagaggagcattgctgagctggtgcccaagtgccaccccctgggcagctttgagcagatggaggccgtgaacatcgcccagaccccagctgagctgtacaatgccatcctggtggacacccccctggccgccttcttccaggactgcatcagcgagcaggacctggatgagatgaacatcgagatcatccggaacaccctgtacaaggcctacctggagagcttctacaagttctgcaccctgctgggcggcaccacagcagatgccatgtgccccatcctggagtttgaggccgaccggcgggccttcatcatcaccatcaacagctttggaacagagctgagcaaagaagatcgggccaagctgttcccccactgcggccgcctgtacccagagggcctggcccagctggcccgggcagatgattatgagcaggtgaagaatgtggccgactactacccagagtacaagctgctgtttgagggcgccggcagcaaccctggggacaagaccctggaggaccgcttctttgaacatgaggtgaagctgaacaagctggccttcctgaaccagttccactttggagtcttctacgcctttgtgaagctgaaggagcaggagtgcagaaatattgtgtggattgctgagtgcatcgcccagaggcaccgggccaagattgacaactacatccccatcttctag

SEQ ID NO: 144480 - DNA, 825 bp, synthetic construct
  misc_feature 1..825: note = Description of Artificial Sequence: Synthetic coding sequence
  source 1..825: mol_type = other DNA
atggtggtggagttccgccacatgagaaatcatgcctatgagcccctggccagcttcctggacttcatcacctacagctacatgattgacaacgtcatcctgctgatcaccggcaccctgcaccagaggagcattgctgagctggtgcccaagtgccaccccctgggcagctttgagcagatggaggccgtgaacatcgcccagaccccagctgagctgtacaatgccatcctggtggacacccccctggccgccttcttccaggactgcatcagcgagcaggacctggatgagatgaacatcgagatcatccggaacaccctgtacaaggcctacctggagagcttctacaagttctgcaccctgctgggcggcaccacagcagatgccatgtgccccatcctggagtttgaagctgacagaagagccttcatcatcaccatcaacagctttggaacagagctgagcaaggaggaccgggccaagctgttcccccactgcggccgcctgtacccagagggcctggcccagctggcccgggcagatgattatgagcaggtgaagaatgtggccgactactacccagagtacaagctgctgtttgaaggagctggcagcaaccctggggacaagaccctggaggaccgcttctttgagcacgaggtgaagctgaacaagctggccttcctgaaccagttccactttggagtcttctacgcctttgtgaagctgaaggagcaggagtgcaggaacatcgtgtggattgctgaatgtattgcccagaggcaccgggccaagattgacaactacatccccatcttctag

SEQ ID NO: 144481 - DNA, 1179 bp, synthetic construct
  misc_feature 1..1179: note = Description of Artificial Sequence: Synthetic coding sequence
  source 1..1179: mol_type = other DNA
atgtccttcttccctgagctgtacttcaacgtggacaatggctacctggagggcctggtgcggggcctgaaggccggcgtgctgagccaggccgactacctgaacctggtgcagtgtgagaccctggaggacctgaagctgcacctgcagagcacagattatggcaacttcctggccaatgaggccagccccctgactgtgtctgtgattgatgaccggctgaaggagaagatggtggtggagttccgccacatgaggaaccacgcctatgagcccctggccagcttcctggacttcatcacccaggagagcgaggccggcaccccagagggccctggcaacatgcccaagctgggcagccggcccagccctggccaccggccccccttcctgcgggtgtccctgctgccctggccacccagcagctacagctacatgattgacaacgtcatcctgctgatcaccggcaccctgcaccagaggagcattgctgagctggtgcccaagtgccaccccctgggcagctttgagcagatggaggccgtgaacatcgcccagaccccagctgagctgtacaatgccatcctggtggacacccccctggccgccttcttccaggactgcatcagcgagcaggacctggatgagatgaacatcgagatcatccggaacaccctgtacaaggcctacctggagagcttctacaagttctgcaccctgctgggcggcaccacagcagatgccatgtgccccatcctggagtttgaagctgacagaagagccttcatcatcaccatcaacagctttggaacagagctgagcaaggaggaccgggccaagctgttcccccactgcggccgcctgtacccagagggcctggcccagctggcccgggcagatgattatgagcaggtgaagaatgtggccgactactacccagagtacaagctgctgtttgaaggagctggcagcaaccctggggacaagaccctggaggaccgcttctttgagcacgaggtgaagctgaacaagctggccttcctgaaccagttccactttggagtcttctacgcctttgtgaagctgaaggagcaggagtgcaggaacatcgtgtggattgctgaatgtattgcccagaggcaccgggccaagattgacaactacatccccatcttctag

SEQ ID NO: 144482 - DNA, 1149 bp, synthetic construct
  misc_feature 1..1149: note = Description of Artificial Sequence: Synthetic coding sequence
  source 1..1149: mol_type = other DNA
atgacagagttctggctgatcagcgcccctggagagaagacctgccagcagacctgggagaagctgcacgccgccaccagcaagaacaacaacctggccgtgaccagcaagttcaacatcccagacctgaaggtgggcaccctggatgtgctggtgggcctgagtgatgagctggccaagctggatgcctttgtggagggcgtggtgaagaaggtggcccagtacatggctgatgtgctggaggacagcaaggacaaggtgcaggagaacctgctggccaacggggtggacctggtgacctacatcacccgcttccagtgggacatggccaagtaccccatcaagcagagcctgaagaacatcagcgagatcatcgccaagggcgtgacccagattgacaatgacctgaagagccgggccagcgcctacaacaacctgaagggcaacctgcagaacctggagaggaagaatgccggcagcctgctgaccaggagcctggccgagatcgtgaagaaggatgactttgtgctggacagcgagtacctggtgaccctgctggtggtggtgcccaagctgaaccacaatgactggatcaagcagtatgagaccctggccgagatggtggtgcccaggagcagcaatgtgctgtctgaggaccaggacagctacctgtgcaatgtgaccctcttcaggaaggctgtggatgacttccgccacaaggcccgggagaacaagttcatcgtgcgggacttccagtacaatgaggaggagatgaaggctgacaaggaggagatgaaccggctgagcacagacaagaagaagcagtttggccccctggtgcgctggctgaaggtgaacttcagcgaggccttcatcgcctggatccacgtgaaggccctgcgggtgtttgtggagagcgtgctgcgctatggcctgcctgtgaacttccaggccatgctgctgcagcccaacaagaagaccctgaagaagctgcgggaggtgctgcacgagctgtacaagcacctggacagcagcgctgctgccatcattgatgcccccatggacatccctggcctgaacctgagccagcaggagtactacccctacgtgtactacaagattgactgcaacctgctggagttcaagtag

SEQ ID NO: 144483 - DNA, 1149 bp, synthetic construct; identical to SEQ ID NO: 144482
  misc_feature 1..1149: note = Description of Artificial Sequence: Synthetic coding sequence
  source 1..1149: mol_type = other DNA

SEQ ID NO: 144484 - DNA, 1053 bp, synthetic construct
  misc_feature 1..1053: note = Description of Artificial Sequence: Synthetic coding sequence
  source 1..1053: mol_type = other DNA
atggctgtgtttgtggtgctgctggccctggtggccggcgtgctgggcaatgagttcagcatcctgaagagccctggctctgtggtgttcagaaatggaaactggcccatccctggagagcgcatcccagatgtggccgccctgtccatgggcttctctgtgaaggaggacctgtcctggccaggcctggccgtgggcaacctcttccaccggccccgggccaccgtgatggtgatggtgaagggcgtgaacaagctggccctgcccccaggcagcgtcatctcctaccccctggagaatgctgtgcccttcagcctggacagcgtggccaacagcatccacagcctcttcagcgaggagacccctgtggtgctgcagctggcccccagcgaggagcgggtgtacatggtgggcaaggccaacagcgtgtttgaggacctgtctgtgaccctgcggcagctgaggaacagactcttccaggagaacagcgtgctgagcagcctgcccctgaacagcctgagcagaaataatgaggtggacctgctcttcctgtctgagctgcaggtgctgcatgacatcagcagcctgctgagccgccacaagcacctggccaaggaccacagcccagacctgtacagcctggagctggccggcctggatgagatcggcaagcgctacggggaggacagcgagcagttcagagatgccagcaagatcctggtggatgccctgcagaagtttgctgatgacatgtacagcctgtatggaggaaatgctgtggtggagctggtgacagtgaagagctttgacaccagcctcatcaggaagaccaggaccatcctggaggccaagcaggccaagaacccagccagcccctacaacctggcctacaagtacaactttgagtacagcgtggtgttcaacatggtgctgtggatcatgattgccctggccctggccgtcatcatcaccagctacaacatctggaacatggaccccggctatgacagcatcatctacaggatgaccaaccagaagatccgcatggactag

SEQ ID NO: 144485 - DNA, 732 bp, synthetic construct
  misc_feature 1..732: note = Description of Artificial Sequence: Synthetic coding sequence
  source 1..732: mol_type = other DNA
tgatgcccagctggccccttccgggtggccccccagtgctgcggccggcggggcaccatggctgtgtttgtggtgctgctggccctggtggccggcgtgctgggcaatgagttcagcatcctgaagagccctggctctgtggtgttcagaaatggaaactggcccatccctggagagcgcatcccagatgtggccgccctgtccatgggcttctctgtgaaggaggacctgtcctggccaggcctggccgtgggcaacctcttccaccggccccgggccaccgtgatggtgatggtgaagggcgtgaacaagctggccctgcccccaggcagcgtcatctcctaccccctggagaatgtggacctgctcttcctgtctgagctgcaggtgctgcatgacatcagcagcctgctgagccgccacaagcacctggccaaggaccacagcccagacctgtacagcctggagctggccggcctggatgaaattggcaagagatatggagaagattctgagcagttcagagatgccagcaagatcctggtggatgccctgcagaagtttgctgatgacatgtacagcctgtatggaggaaatgctgtggtggagctggtgacagtgaagagctttgacaccagcctcatcaggaagaccaggaccatcctggaggccaagcaggccaagaacccagccagcccctacaacctggcctacaagtacaactttgaatag

SEQ ID NO: 144486 - DNA, 612 bp, synthetic construct
  misc_feature 1..612: note = Description of Artificial Sequence: Synthetic coding sequence
  source 1..612: mol_type = other DNA
gagagcgagcgggtgaccagcagccgctgtggctgccggccctgcccagctggccccttccgggtggccccccagtgctgcggcagaagaggcaccatggctgtgtttgtggtgctgctggccctggtggccggcgtgctgggcaatgagttcagcatcctgaagagccctggctctgtggtgttcagaaatggaaactggcccatccctggagagcgcatcccagatgtggccgccctgtccatgggcttctctgtgaaggaggacctgtcctggccaggcctggccgtgggcaacctcttccaccggccccgggccaccgtgatggtgatggtgaagggcgtgaacaagctggccctgcccccaggcagcgtcatctcctaccccctggagaacagagtgtacatggtgggcaaggccaacagcgtgtttgaggacctgtctgtgaccctgcggcagctgaggaacagactcttccaggagaacagcgtgctgagcagcctgcccctgaacagcctgagcagaaataatgaggtggacctgctcttcctgtctgagctgcaggtgctgcatgacatcagcagcctgctgagccgccacaagcacctgtag

SEQ ID NO: 144487 - DNA, 780 bp, synthetic construct
  misc_feature 1..780: note = Description of Artificial Sequence: Synthetic coding sequence
  source 1..780: mol_type = other DNA
tgagtgcccccagcccggtctgtgagccccaggtctgctgctgctgctgctgccccctggctgtgcctgagctgctcctggcgctggtggagggacctgtcctggccaggcctggccgtgggcaacctcttccaccggccccgggccaccgtgatggtgatggtgaagggcgtgaacaagctggccctgcccccaggcagcgtcatctcctaccccctggagaatgctgtgcccttcagcctggacagcgtggccaacagcatccacagcctcttcagcgaggagacccctgtggtgctgcagctggcccccagcgaggagcgggtgtacatggtgggcaaggccaacagcgtgtttgaggacctgtctgtgaccctgcggcagctgaggaacagactcttccaggagaacagcgtgctgagcagcctgcccctgaacagcctgagcaggaacaatgaggtggacctgctcttcctgtctgagctgcaggtgctgcatgacatcagcagcctgctgagccgccacaagcacctggccaaggaccacagcccagacctgtacagcctggagctggccggcctggatgaaattggcaagagatatggagaagattctgagcagttcagagatgccagcaagatcctggtggatgccctgcagaagtttgctgatgacatgtacagcctgtatggaggaaatgctgtggtggagctggtgacagtgaagagctttgacaccagcctcatcaggaagaccaggaccatcctggaggccaagtag

SEQ ID NO: 144488 - DNA, 957 bp, synthetic construct
  misc_feature 1..957: note = Description of Artificial Sequence: Synthetic coding sequence
  source 1..957: mol_type = other DNA
atggctgtgtttgtggtgctgctggccctggtggccggcgtgctgggcaatgagttcagcatcctgaagagccctggctctgtggtgttcagaaatggaaactggcccatccctggagagcgcatcccagatgtggccgccctgtccatgggcttctctgtgaaggaggacctgtcctggccaggcctggccgtgggcaacctcttccaccggccccgggccaccgtgatggtgatggtgaagggcgtgaacaagctggccctgcccccaggcagcgtcatctcctaccccctggagaacagagtgtacatggtgggcaaggccaacagcgtgtttgaggacctgtctgtgaccctgcggcagctgaggaacagactcttccaggagaacagcgtgctgagcagcctgcccctgaacagcctgagcagaaataatgaggtggacctgctcttcctgtctgagctgcaggtgctgcatgacatcagcagcctgctgagccgccacaagcacctggccaaggaccacagcccagacctgtacagcctggagctggccggcctggatgagatcggcaagcgctacggggaggacagcgagcagttcagagatgccagcaagatcctggtggatgccctgcagaagtttgctgatgacatgtacagcctgtatggaggaaatgctgtggtggagctggtgacagtgaagagctttgacaccagcctcatcaggaagaccaggaccatcctggaggccaagcaggccaagaacccagccagcccctacaacctggcctacaagtacaactttgagtacagcgtggtgttcaacatggtgctgtggatcatgattgccctggccctggccgtcatcatcaccagctacaacatctggaacatggaccccggctatgacagcatcatctacaggatgaccaaccagaagatccgcatggactag

SEQ ID NO: 144489 - DNA, 819 bp, synthetic construct
  misc_feature 1..819: note = Description of Artificial Sequence: Synthetic coding sequence
  source 1..819: mol_type = other DNA
atggctgtgtttgtggtgctgctggccctggtggccggcgtgctgggcaatgagttcagcatcctgaagagccctggctctgtggtgttcagaaatggaaactggcccatccctggagagcgcatcccagatgtggccgccctgtccatgggcttctctgtgaaggaggacctgtcctggccaggcctggccgtgggcaacctcttccaccggccccgggccaccgtgatggtgatggtgaagggcgtgaacaagctggccctgcccccaggcagcgtcatctcctaccccctggagaatgtggacctgctcttcctgtctgagctgcaggtgctgcatgacatcagcagcctgctgagccgccacaagcacctggccaaggaccacagcccagacctgtacagcctggagctggccggcctggatgagatcggcaagcgctacggggaggacagcgagcagttcagagatgccagcaagatcctggtggatgccctgcagaagtttgctgatgacatgtacagcctgtatggaggaaatgctgtggtggagctggtgacagtgaagagctttgacaccagcctcatcaggaagaccaggaccatcctggaggccaagcaggccaagaacccagccagcccctacaacctggcctacaagtacaactttgagtacagcgtggtgttcaacatggtgctgtggatcatgattgccctggccctggccgtcatcatcaccagctacaacatctggaacatggaccccggctatgacagcatcatctacaggatgaccaaccagaagatccgcatggactag

SEQ ID NO: 144490 - DNA, 498 bp, synthetic construct
  misc_feature 1..498: note = Description of Artificial Sequence: Synthetic coding sequence
  source 1..498: mol_type = other DNA
atggctgtgtttgtggtgctgctggccctggtggccggcgtgctgggcaatgagttcagcatcctgaagagccctggctctgtggtgttcagaaatggaaactggcccatccctggagagcgcatcccagatgtggccgccctgtccatgggcttctctgtgaaggaggacctgtcctggccaggcctggccgtgggcaacctcttccaccggccccgggccaccgtgatggtgatggtgaagggcgtgaacaagctggccctgcccccaggcagcgtcatctcctaccccctggagaatgctgtgcccttcagcctggacagcgtggccaacagcatccacagcctcttcagcgaggagacccctgtggtgctgcagctggcccccagcgaggagcgggtgtacatggtgggcaccatgaagctgacctgcagcttcttcctgaactgcaagtgctacatgatcttccaggcctgctgcctggtgatcagcatctag

SEQ ID NO: 144491 - DNA, 825 bp, synthetic construct
  misc_feature 1..825: note = Description of Artificial Sequence: Synthetic coding sequence
  source 1..825: mol_type = other DNA
atggtgatggtgaagggcgtgaacaagctggccctgcccccaggcagcgtcatctcctaccccctggagaatgctgtgcccttcagcctggacagcgtggccaacagcatccacagcctcttcagcgaggagacccctgtggtgctgcagctggcccccagcgaggagcgggtgtacatggtgggcaaggccaacagcgtgtttgaggacctgtctgtgaccctgcggcagctgaggaacagactcttccaggagaacagcgtgctgagcagcctgcccctgaacagcctgagcagaaataatgaggtggacctgctcttcctgtctgagctgcaggtgctgcatgacatcagcagcctgctgagccgccacaagcacctggccaaggaccacagcccagacctgtacagcctggagctggccggcctggatgagatcggcaagcgctacggggaggacagcgagcagttcagagatgccagcaagatcctggtggatgccctgcagaagtttgctgatgacatgtacagcctgtatggaggaaatgctgtggtggagctggtgacagtgaagagctttgacaccagcctcatcaggaagaccaggaccatcctggaggccaagcaggccaagaacccagccagcccctacaacctggcctacaagtacaactttgagtacagcgtggtgttcaacatggtgctgtggatcatgattgccctggccctggccgtcatcatcaccagctacaacatctggaacatggaccccggctatgacagcatcatctacaggatgaccaaccagaagatccgcatggactag

SEQ ID NO: 144492 - DNA, 2517 bp, synthetic construct
  misc_feature 1..2517: note = Description of Artificial Sequence: Synthetic coding sequence
  source 1..2517: mol_type = other DNA
atgggagagctgttccgctctgaggagatgaccctggcccagctgttcctgcagagcgaggccgcctactgctgcgtgtctgagctgggggagctgggcaaggtgcagttccgggacctgaacccagatgtgaatgtgttccagaggaagtttgtgaatgaggtgcggcgctgtgaggagatggacaggaagctgcgctttgtggagaaggagatcaggaaggccaacatccccatcatggacaccggggagaaccctgaggtgcccttcccccgggacatgattgacctggaggccaactttgagaagattgaaaatgagctgaaggagatcaacaccaaccaggaggccctgaagaggaacttcctggagctgacagagctgaagttcatcctgaggaagacccagcagttctttgatgaggccgagctgcaccaccagcagatggctgaccctgacctgctggaggagagcagcagcctgctggagcccagcgagatgggccggggcacccccctgcggctgggctttgtggccggggtcatcaaccgggagcgcatccccacctttgagaggatgctgtggagggtgtgcagaggaaatgtgttcctgcggcaggccgagattgagaaccccctggaggaccctgtgactggagactatgtgcacaagtctgtgttcatcatcttcttccagggcgaccagctgaagaacagagtgaagaagatctgtgagggcttccgggccagcctgtacccctgcccagagaccccccaggagaggaaggagatggccagcggcgtgaacaccagaattgatgacctgcagatggtgctgaaccagacagaggaccaccggcagagggtgctgcaggccgccgccaagaacatccgggtgtggttcatcaaggtgaggaagatgaaggccatctaccacaccctgaacctgtgcaacattgatgtgacccagaagtgcctgattgctgaggtgtggtgccctgtgacagacctggacagcatccagtttgccctgcggcggggcacagagcacagcggcagcacagtgcccagcatcctgaacaggatgcagaccaaccagaccccacccacctacaacaagaccaacaagttcacctacggcttccagaacatcgtggatgcctacggcatcggcacctaccgggagatcaacccagccccctacaccatcatcaccttccccttcctgtttgctgtgatgtttggagactttggacatggcatcctgatgaccctgtttgctgtgtggatggtgctgcgggagagccgcatcctgagccagaagaatgaaaatgagatgttcagcacagtgttcagcggccgctacatcatcctgctgatgggcgtcttctccatgtacacaggcctcatctacaatgactgcttcagcaagagcctgaacatcttcggcagctcctggagcgtgcggcccatgttcacctacaactggacagaggagaccctgcggggcaaccctgtgctgcagctgaacccagccctgcccggggtgtttggaggcccctacccctttggaattgaccccatctggaacatcgccaccaacaagctgaccttcctgaacagcttcaagatgaagatgtctgtcatcctgggcatcatccacatgctgtttggagtgtccctgagcctcttcaaccacatctacttcaagaagcccctgaacatctacttcggcttcatccctgagatcatcttcatgaccagcctgtttggctacctggtgatcctgatcttctacaagtggacagcctatgatgcccacaccagtgaaaatgcccccagcctgctgatccacttcatcaacatgttcctgttctcctacccagagagcggctacagcatgctgtacagcggccagaagggcatccagtgcttcctggtggtggtggccctgctgtgtgtgccctggatgctgctcttcaagcccctggtgctgcggcggcagtacctgcggaggaagcacctgggcaccctgaactttggaggcatccgggtgggcaatggccccacagaggaggatgctgagatcatccagcacgaccagctgagcacccacagtgaagatgctgatgaatttgattttggagacaccatggtgcaccaggccatccacaccatcgagtactgcctgggctgcatcagcaacacagccagctacctgcggctgtgggccctgagcctggcccacgcccagctgtctgaggtgctgtggaccatggtgatccacatcggcctgtctgtgaagagcctggccggcggcctggtgctcttcttcttcttcaccgcctttgccaccctgactgtggccatcctgctgatcatggagggcctgagcgccttcctgcacgccctgcggctgcactgggtggagttccagaacaagttctacagcggcaccggcttcaagttcctgcccttctcctttgagcacatccgggagggcaagtttgaggagtag

SEQ ID NO: 144493 - DNA, 2514 bp, synthetic construct
  misc_feature 1..2514: note = Description of Artificial Sequence: Synthetic coding sequence
  source 1..2514: mol_type = other DNA
atgggagagctgttccgctctgaggagatgaccctggcccagctgttcctgcagagcgaggccgcctactgctgcgtgtctgagctgggggagctgggcaaggtgcagttccgggacctgaacccagatgtgaatgtgttccagaggaagtttgtgaatgaggtgcggcgctgtgaggagatggacaggaagctgcgctttgtggagaaggagatcaggaaggccaacatccccatcatggacaccggggagaaccctgaggtgcccttcccccgggacatgattgacctggaggccaactttgagaagattgaaaatgagctgaaggagatcaacaccaaccaggaggccctgaagaggaacttcctggagctgacagagctgaagttcatcctgaggaagacccagcagttctttgatgagatggctgaccctgacctgctggaggagagcagcagcctgctggagcccagcgagatgggccggggcacccccctgcggctgggctttgtggccggggtcatcaaccgggagcgcatccccacctttgagaggatgctgtggagggtgtgcagaggaaatgtgttcctgcggcaggccgagattgagaaccccctggaggaccctgtgactggagactatgtgcacaagagcgtcttcatcatcttcttccagggcgaccagctgaagaacagagtgaagaagatctgtgagggcttccgggccagcctgtacccctgcccagagaccccccaggagaggaaggagatggccagcggcgtgaacaccagaattgatgacctgcagatggtgctgaaccagacagaggaccaccggcagagggtgctgcaggccgccgccaagaacatccgggtgtggttcatcaaggtgaggaagatgaaggccatctaccacaccctgaacctgtgcaacattgatgtgacccagaagtgcctgattgctgaggtgtggtgccctgtgacagacctggacagcatccagtttgccctgcggcggggcacagagcacagcggcagcacagtgcccagcatcctgaacaggatgcagaccaaccagaccccacccacctacaacaagaccaacaagttcacctacggcttccagaacatcgtggatgcctatggaattggcacctaccgggagatcaacccagccccctacaccatcatcaccttccccttcctgtttgctgtgatgtttggagactttggccacggcatcctgatgaccctgtttgctgtgtggatggtgctgcgggagagccgcatcctgagccagaagaatgaaaatgagatgttcagcaccgtcttcagcggccgctacatcatcctgctgatgggcgtcttctccatgtacacaggcctcatctacaatgactgcttcagcaagagcctgaacatcttcggcagctcctggagcgtgcggcccatgttcacctacaactggacagaggagaccctgcggggcaaccctgtgctgcagctgaacccagccctgcccggggtgtttggaggcccctaccccttcggcatcgaccccatctggaacatcgccaccaacaagctgaccttcctgaacagcttcaagatgaagatgtctgtcatcctgggcatcatccacatgctgtttggagtgtccctgagcctcttcaaccacatctacttcaagaagcccctgaacatctacttcggcttcatccctgagatcatcttcatgaccagcctgtttggctacctggtgatcctgatcttctacaagtggacagcctatgatgcccacaccagtgaaaatgcccccagcctgctgatccacttcatcaacatgttcctgttctcctacccagagagcggctacagcatgctgtacagcggccagaagggcatccagtgcttcctggtggtggtggccctgctgtgtgtgccctggatgctgctcttcaagcccctggtgctgcggcggcagtacctgcggaggaagcacctgggcaccctgaactttggaggcatccgggtgggcaatggccccacagaagaagatgctgagatcatccagcacgaccagctgagcacccacagtgaagatgctgatgagcccagtgaagatgaggtgtttgattttggagacaccatggtgcaccaggccatccacaccatcgagtactgcctgggctgcatcagcaacacagccagctacctgcggctgtgggccctgagcctggcccacgcccagctgtctgaggtgctgtggaccatggtgatccacatcggcctgtctgtgaagagcctggccggcggcctggtgctcttcttcttcttcaccgcctttgccaccctgactgtggccatcctgctgatcatggagggcctgagcgccttcctgcacgccctgcggctgcactgggtggagttccagaacaagttctacagcggcaccggcttcaagttcctgcccttctcctttgagcacatccgggagggcaagtttgaggagtag

SEQ ID NO: 144494 - DNA, 2496 bp, synthetic construct
  misc_feature 1..2496: note = Description of Artificial Sequence: Synthetic coding sequence
  source 1..2496: mol_type = other DNA
atgggagagctgttccgctctgaggagatgaccctggcccagctgttcctgcagagcgaggccgcctactgctgcgtgtctgagctgggggagctgggcaaggtgcagttccgggacctgaacccagatgtgaatgtgttccagaggaagtttgtgaatgaggtgcggcgctgtgaggagatggacaggaagctgcgctttgtggagaaggagatcaggaaggccaacatccccatcatggacaccggggagaaccctgaggtgcccttcccccgggacatgattgacctggaggccaactttgagaagattgaaaatgagctgaaggagatcaacaccaaccaggaggccctgaagaggaacttcctggagctgacagagctgaagttcatcctgaggaagacccagcagttctttgatgagatggctgaccctgacctgctggaggagagcagcagcctgctggagcccagcgagatgggccggggcacccccctgcggctgggctttgtggccggggtcatcaaccgggagcgcatccccacctttgagaggatgctgtggagggtgtgcagaggaaatgtgttcctgcggcaggccgagattgagaaccccctggaggaccctgtgactggagactatgtgcacaagagcgtcttcatcatcttcttccagggcgaccagctgaagaacagagtgaagaagatctgtgagggcttccgggccagcctgtacccctgcccagagaccccccaggagaggaaggagatggccagcggcgtgaacaccagaattgatgacctgcagatggtgctgaaccagacagaggaccaccggcagagggtgctgcaggccgccgccaagaacatccgggtgtggttcatcaaggtgaggaagatgaaggccatctaccacaccctgaacctgtgcaacattgatgtgacccagaagtgcctgattgctgaggtgtggtgccctgtgacagacctggacagcatccagtttgccctgcggcggggcacagagcacagcggcagcacagtgcccagcatcctgaacaggatgcagaccaaccagaccccacccacctacaacaagaccaacaagttcacctacggcttccagaacatcgtggatgcctatggaattggcacctaccgggagatcaacccagccccctacaccatcatcaccttccccttcctgtttgctgtgatgtttggagactttggccacggcatcctgatgaccctgtttgctgtgtggatggtgctgcgggagagccgcatcctgagccagaagaatgaaaatgagatgttcagcaccgtcttcagcggccgctacatcatcctgctgatgggcgtcttctccatgtacacaggcctcatctacaatgactgcttcagcaagagcctgaacatcttcggcagctcctggagcgtgcggcccatgttcacctacaactggacagaggagaccctgcggggcaaccctgtgctgcagctgaacccagccctgcccggggtgtttggaggcccctaccccttcggcatcgaccccatctggaacatcgccaccaacaagctgaccttcctgaacagcttcaagatgaagatgtctgtcatcctgggcatcatccacatgctgtttggagtgtccctgagcctcttcaaccacatctacttcaagaagcccctgaacatctacttcggcttcatccctgagatcatcttcatgaccagcctgtttggctacctggtgatcctgatcttctacaagtggacagcctatgatgcccacaccagtgaaaatgcccccagcctgctgatccacttcatcaacatgttcctgttctcctacccagagagcggctacagcatgctgtacagcggccagaagggcatccagtgcttcctggtggtggtggccctgctgtgtgtgccctggatgctgctcttcaagcccctggtgctgcggcggcagtacctgcggaggaagcacctgggcaccctgaactttggaggcatccgggtgggcaatggccccacagaagaagatgctgagatcatccagcacgaccagctgagcacccacagtgaagatgctgatgaatttgattttggagacaccatggtgcaccaggccatccacaccatcgagtactgcctgggctgcatcagcaacacagccagctacctgcggctgtgggccctgagcctggcccacgcccagctgtctgaggtgctgtggaccatggtgatccacatcggcctgtctgtgaagagcctggccggcggcctggtgctcttcttcttcttcaccgcctttgccaccctgactgtggccatcctgctgatcatggagggcctgagcgccttcctgcacgccctgcggctgcactgggtggagttccagaacaagttctacagcggcaccggcttcaagttcctgcccttctcctttgagcacatccgggagggcaagtttgaggagtag

SEQ ID NO: 144495 - DNA, 2367 bp, synthetic construct
  misc_feature 1..2367: note = Description of Artificial Sequence: Synthetic coding sequence
  source 1..2367: mol_type = other DNA
atgggagagctgttccgctctgaggagatgaccctggcccagctgttcctgcagagcgaggccgcctactgctgcgtgtctgagctgggggagctgggcaaggtgcagttccgggacctgaacccagatgtgaatgtgttccagaggaagtttgtgaatgaggtgcggcgctgtgaggagatggacaggaagctgcgctttgtggagaaggagatcaggaaggccaacatccccatcatggacaccggggagaaccctgaggtgcccttcccccgggacatgattgacctggagatggctgaccctgacctgctggaggagagcagcagcctgctggagcccagcgagatgggccggggcacccccctgcggctgggctttgtggccggggtcatcaaccgggagcgcatccccacctttgagaggatgctgtggagggtgtgcagaggaaatgtgttcctgcggcaggccgagattgagaaccccctggaggaccctgtgactggagactatgtgcacaagtctgtgttcatcatcttcttccagggcgaccagctgaagaacagagtgaagaagatctgtgagggcttccgggccagcctgtacccctgcccagagaccccccaggagaggaaggagatggccagcggcgtgaacaccagaattgatgacctgcagatggtgctgaaccagacagaggaccaccggcagagggtgctgcaggccgccgccaagaacatccgggtgtggttcatcaaggtgaggaagatgaaggccatctaccacaccctgaacctgtgcaacattgatgtgacccagaagtgcctgattgctgaggtgtggtgccctgtgacagacctggacagcatccagtttgccctgcggcggggcacagagcacagcggcagcacagtgcccagcatcctgaacaggatgcagaccaaccagaccccacccacctacaacaagaccaacaagttcacctacggcttccagaacatcgtggatgcctacggcatcggcacctaccgggagatcaacccagccccctacaccatcatcaccttccccttcctgtttgctgtgatgtttggagactttggacatggcatcctgatgaccctgtttgctgtgtggatggtgctgcgggagagccgcatcctgagccagaagaatgaaaatgagatgttcagcacagtgttcagcggccgctacatcatcctgctgatgggcgtcttctccatgtacacaggcctcatctacaatgactgcttcagcaagagcctgaacatcttcggcagctcctggagcgtgcggcccatgttcacctacaactggacagaggagaccctgcggggcaaccctgtgctgcagctgaacccagccctgcccggggtgtttggaggcccctacccctttggaattgaccccatctggaacatcgccaccaacaagctgaccttcctgaacagcttcaagatgaagatgtctgtcatcctgggcatcatccacatgctgtttggagtgtccctgagcctcttcaaccacatctacttcaagaagcccctgaacatctacttcggcttcatccctgagatcatcttcatgaccagcctgtttggctacctggtgatcctgatcttctacaagtggacagcctatgatgcccacaccagtgaaaatgcccccagcctgctgatccacttcatcaacatgttcctgttctcctacccagagagcggctacagcatgctgtacagcggccagaagggcatccagtgcttcctggtggtggtggccctgctgtgtgtgccctggatgctgctcttcaagcccctggtgctgcggcggcagtacctgcggaggaagcacctgggcaccctgaactttggaggcatccgggtgggcaatggccccacagaggaggatgctgagatcatccagcacgaccagctgagcacccacagtgaagatgctgatgaatttgattttggagacaccatggtgcaccaggccatccacaccatcgagtactgcctgggctgcatcagcaacacagccagctacctgcggctgtgggccctgagcctggcccacgcccagctgtctgaggtgctgtggaccatggtgatccacatcggcctgtctgtgaagagcctggccggcggcctggtgctcttcttcttcttcaccgcctttgccaccctgactgtggccatcctgctgatcatggagggcctgagcgccttcctgcacgccctgcggctgcactgggtggagttccagaacaagttctacagcggcaccggcttcaagttcctgcccttctcctttgagcacatccgggagggcaagtttgaggagtag

SEQ ID NO: 144496 - DNA, 1452 bp, synthetic construct
  misc_feature 1..1452: note = Description of Artificial Sequence: Synthetic coding sequence
  source 1..1452: mol_type = other DNA
atgcagaccaaccagaccccacccacctacaacaagaccaacaagttcacctacggcttccagaacatcgtggatgcctatggaattggcacctaccgggagatcaacccagccccctacaccatcatcaccttccccttcctgtttgctgtgatgtttggagactttggccacggcatcctgatgaccctgtttgctgtgtggatggtgctgcgggagagccgcatcctgagccagaagaatgaaaatgagatgttcagcaccgtcttcagcggccgctacatcatcctgctgatgggcgtcttctccatgtacacaggcctcatctacaatgactgcttcagcaagagcctgaacatcttcggcagctcctggagcgtgcggcccatgttcacctacaactggacagaggagaccctgcggggcaaccctgtgctgcagctgaacccagccctgcccggggtgtttggaggcccctaccccttcggcatcgaccccatctggaacatcgccaccaacaagctgaccttcctgaacagcttcaagatgaagatgtctgtcatcctgggcatcatccacatgctgtttggagtgtccctgagcctcttcaaccacatctacttcaagaagcccctgaacatctacttcggcttcatccctgagatcatcttcatgaccagcctgtttggctacctggtgatcctgatcttctacaagtggacagcctatgatgcccacaccagtgaaaatgcccccagcctgctgatccacttcatcaacatgttcctgttctcctacccagagagcggctacagcatgctgtacagcggccagaagggcatccagtgcttcctggtggtggtggccctgctgtgtgtgccctggatgctgctcttcaagcccctggtgctgcggcggcagtacctgcggaggaagcacctgggcaccctgaactttggaggcatccgggtgggcaatggccccacagaagaagatgctgagatcatccagcacgaccagctgagcacccacagtgaagatgctgatgagcccagtgaagatgaggtgtttgattttggagacaccatggtgcaccaggccatccacaccatcgagtactgcctgggctgcatcagcaacacagccagctacctgcggctgtgggccctgagcctggcccacgcccagctgtctgaggtgctgtggaccatggtgatccacatcggcctgtctgtgaagagcctggccggcggcctggtgctcttcttcttcttcaccgcctttgccaccctgactgtggccatcctgctgatcatggagggcctgagcgccttcctgcacgccctgcggctgcactgggtggagttccagaacaagttctacagcggcaccggcttcaagttcctgcccttctcctttgagcacatccgggagggcaagtttgaggagtag

SEQ ID NO: 144497 - DNA, 2514 bp, synthetic construct
  misc_feature 1..2514: note = Description of Artificial Sequence: Synthetic coding sequence
  source 1..2514: mol_type = other DNA
atgggagagctgttccgctctgaggagatgaccctggcccagctgttcctgcagagcgaggccgcctactgctgcgtgtctgagctgggggagctgggcaaggtgcagttccgggacctgaacccagatgtgaatgtgttccagaggaagtttgtgaatgaggtgcggcgctgtgaggagatggacaggaagctgcgctttgtggagaaggagatcaggaaggccaacatccccatcatggacaccggggagaaccctgaggtgcccttcccccgggacatgattgacctggaggccaactttgagaagattgaaaatgagctgaaggagatcaacaccaaccaggaggccctgaagaggaacttcctggagctgacagagctgaagttcatcctgaggaagacccagcagttctttgatgagatggctgaccctgacctgctggaggagagcagcagcctgctggagcccagcgagatgggccggggcacccccctgcggctgggctttgtggccggggtcatcaaccgggagcgcatccccacctttgagaggatgctgtggagggtgtgcagaggaaatgtgttcctgcggcaggccgagattgagaaccccctggaggaccctgtgactggagactatgtgcacaagagcgtcttcatcatcttcttccagggcgaccagctgaagaacagagtgaagaagatctgtgagggcttccgggccagcctgtacccctgcccagagaccccccaggagaggaaggagatggccagcggcgtgaacaccagaattgatgacctgcagatggtgctgaaccagacagaggaccaccggcagagggtgctgcaggccgccgccaagaacatccgggtgtggttcatcaaggtgaggaagatgaaggccatctaccacaccctgaacctgtgcaacattgatgtgacccagaagtgcctgattgctgaggtgtggtgccctgtgacagacctggacagcatccagtttgccctgcggcggggcacagagcacagcggcagcacagtgcccagcatcctgaacaggatgcagaccaaccagaccccacccacctacaacaagaccaacaagttcacctacggcttccagaacatcgtggatgcctatggaattggcacctaccgggagatcaacccagccccctacaccatcatcaccttccccttcctgtttgctgtgatgtttggagactttggccacggcatcctgatgaccctgtttgctgtgtggatggtgctgcgggagagccgcatcctgagccagaagaatgaaaatgagatgttcagcaccgtcttcagcggccgctacatcatcctgctgatgggcgtcttctccatgtacacaggcctcatctacaatgactgcttcagcaagagcctgaacatcttcggcagctcctggagcgtgcggcccatgttcacctacaactggacagaggagaccctgcggggcaaccctgtgctgcagctgaacccagccctgcccggggtgtttggaggcccctaccccttcggcatcgaccccatctggaacatcgccaccaacaagctgaccttcctgaacagcttcaagatgaagatgtctgtcatcctgggcatcatccacatgctgtttggagtgtccctgagcctcttcaaccacatctacttcaagaagcccctgaacatctacttcggcttcatccctgagatcatcttcatgaccagcctgtttggctacctggtgatcctgatcttctacaagtggacagcctatgatgcccacaccagtgaaaatgcccccagcctgctgatccacttcatcaacatgttcctgttctcctacccagagagcggctacagcatgctgtacagcggccagaagggcatccagtgcttcctggtggtggtggccctgctgtgtgtgccctggatgctgctcttcaagcccctggtgctgcggcggcagtacctgcggaggaagcacctgggcaccctgaactttggaggcatccgggtgggcaatggccccacagaagaagatgctgagatcatccagcacgaccagctgagcacccacagtgaagatgctgatgagcccagcaccagcggccagtttgattttggagacaccatggtgcaccaggccatccacaccatcgagtactgcctgggctgcatcagcaacacagccagctacctgcggctgtgggccctgagcctggcccacgcccagctgtctgaggtgctgtggaccatggtgatccacatcggcctgtctgtgaagagcctggccggcggcctggtgctcttcttcttcttcaccgcctttgccaccctgactgtggccatcctgctgatcatggagggcctgagcgccttcctgcacgccctgcggctgcactgggtggagttccagaacaagttctacagcggcaccggcttcaagttcctgcccttctcctttgagcacatccgggagggcaagtttgaggagtag

SEQ ID NO: 144498 - DNA, 2571 bp, synthetic construct
  misc_feature 1..2571: note = Description of Artificial Sequence: Synthetic coding sequence
  source 1..2571: mol_type = other DNA
atgggcagcctcttccgctctgagaccatgtgcctggcccagctgttcctgcagagcggcacagcctatgagtgcctgagcgccctgggggagaagggcctggtgcagttccgggacctgaaccagaatgtgagcagcttccagaggaagtttgtgggggaggtgaagagatgtgaggagctggagcgcatcctggtgtacctggtgcaggagatcaacagagctgacatccccctgcctgagggggaggccagccccccagccccacccctgaagcaggtgctggagatgcaggagcagctgcagaagctggaggtggagctgcgggaggtgaccaagaacaaggagaagctgaggaagaacctgctggagctgattgagtacacccacatgctgcgggtgaccaagacctttgtgaagagaaatgtggagtttgagcccacctatgaggagttccccagcctggagagtgacagcctgctggactacagctgcatgcagaggctgggcgccaagctgggctttgtgtctggcctcatcaaccagggcaaggtggaggcctttgagaagatgctgtggagggtgtgcaagggctacaccatcgtgtcctatgcagagctggatgagagcctggaggaccctgagaccggggaggtgatcaagtggtacgtgttcctgatctccttctggggcgagcagatcggccacaaggtgaagaagatctgtgactgctaccactgccacgtgtacccctaccccaacacagctgaggagcggcgggagatccaggagggcctgaacacccgcatccaggacctgtacacagtgctgcacaagacagaggactacctgcggcaggtgctgtgcaaggctgctgagagcgtgtacagcagggtcatccaggtgaagaagatgaaggccatctaccacatgctgaacatgtgcagctttgatgtgaccaacaagtgcctgattgctgaggtgtggtgcccagaggccgacctgcaggacctgcggcgggccctggaggagggcagccgggagagcggggccaccatccccagcttcatgaacatcatccccaccaaggagaccccacccacccgcatccgcaccaacaagttcacagagggcttccagaacatcgtggatgcctacggcgtgggcagctaccgggaggtgaacccagccctcttcaccatcatcaccttccccttcctgtttgctgtgatgtttggagactttggacatggctttgtgatgttcctgtttgccctgctgctggtgctgaatgaaaaccacccccggctgaaccagagccaggagatcatgaggatgttcttcaacggccgctacatcctgctgctgatgggcctcttctctgtgtacacaggcctcatctacaatgactgcttcagcaagtctgtgaacctgtttggaagtggctggaatgtgtctgccatgtacagcagcagccaccccccagctgagcacaagaagatggtgctgtggaatgattctgtggtgcgccacaacagcatcctgcagctggaccccagcatccctggggtcttccggggcccctaccccctgggcatcgaccccatctggaacctggccaccaaccggctgaccttcctgaacagcttcaagatgaagatgtctgtcatcctgggcatcatccacatgacctttggagtcatcctgggcatcttcaaccacctgcacttcaggaagaagttcaacatctacctggtgtccatccctgagctgctcttcatgctgtgcatcttcggctacctgatcttcatgatcttctacaagtggctggtgttttctgctgagaccagccgggtggcccccagcatcctgattgagttcatcaacatgttcctgtttcctgccagcaagaccagcggcctgtacacaggccaggagtatgtgcagagggtgctgctggtggtgacagccctgtctgtgcctgtgctcttcctgggcaagcccctcttcctgctgtggctgcacaacggccgcagctgctttggagtgaacagaagtggctacaccctcatcaggaaggacagcgaggaggaggtgtccctgctgggcagccaggacatcgaggagggcaaccaccaggtggaggatggctgccgggagatggcctgtgaggagttcaactttggagagatcctgatgacccaggtgatccacagcattgagtactgcctgggctgcatcagcaacacagccagctacctgcggctgtgggccctgagcctggcccacgcccagctgagtgatgtgctgtgggccatgctgatgagggtgggcctgcgggtggacaccacctatggagtgctgctgctgctgcccgtcatcgccctgtttgctgtgctgaccatcttcatcctgctgatcatggagggcctgagcgccttcctgcacgccatccggctgcactgggtggagttccagaacaagttctacgtgggcgccggcaccaagtttgtgcccttctccttcagcctgctgagcagcaagttcaacaatgatgacagcgtggcctag

SEQ ID NO: 144499 - DNA, 1119 bp, synthetic construct
  misc_feature 1..1119: note = Description of Artificial Sequence: Synthetic coding sequence
  source 1..1119: mol_type = other DNA
atgggcagcctcttccgctctgagaccatgtgcctggcccagctgttcctgcagagcggcacagcctatgagtgcctgagcgccctgggggagaagggcctggtgcagttccgggacctgaaccagaatgtgagcagcttccagaggaagtttgtgggggaggtgaagagatgtgaggagctggagcgcatcctggtgtacctggtgcaggagatcaacagagctgacatccccctgcctgagggggaggccagccccccagccccacccctgaagcaggtgctggagatgcaggagcagctgcagaagctggaggtggagctgcgggaggtgaccaagaacaaggagaagctgaggaagaacctgctggagctgattgagtacacccacatgctgcgggtgaccaagacctttgtgaagagaaatgtggagtttgagcccacctatgaggagttccccagcctggagagtgacagcctgctggactacagctgcatgcagaggctgggcgccaagctgggctttgtgtctggcctcatcaaccagggcaaggtggaggcctttgagaagatgctgtggagggtgtgcaagggctacaccatcgtgtcctatgcagagctggatgagagcctggaggaccctgagaccggggaggtgatcaagtggtacgtgttcctgatctccttctggggcgagcagatcggccacaaggtgaagaagatctgtgactgctaccactgccacgtgtacccctaccccaacacagctgaggagcggcgggagatccaggagggcctgaacacccgcatccaggacctgtacacagtgctgcacaagacagaggactacctgcggcaggtgctgtgcaaggctgctgagagcgtgtacagcagggtcatccaggtgaagaagatgaaggccatctaccacatgctgaacatgtgcagctttgatgtgaccaacaagtgcctgattgctgaggtgtggtgcccagaggccgacctgcaggacctgcggcgggccctggaggagggctctgtgcggctgcccagcagccccctgcctggaacagaggagcggctgatggagctgatcaacagcgagaagaagaggaagtag

SEQ ID NO: 144500 - DNA, 2523 bp, synthetic construct
  misc_feature 1..2523: note = Description of Artificial Sequence: Synthetic coding sequence
  source 1..2523: mol_type = other DNA
atggtgtctgtgttccgctctgaggagatgtgcctgagccagctgttcctgcaggtggaggccgcctactgctgcgtggccgagctgggggagctgggcctggtgcagttcaaggacctgaacatgaatgtgaacagcttccagaggaagtttgtgaatgaggtgcggcgctgtgagagcctggagcgcatcctgcgcttcctggaggatgagatgcagaatgagatcgtggtgcagctgctggagaagagccccctgacccccctgccccgggagatgatcaccctggagaccgtgctggagaagctggagggggagctgcaggaggccaaccagaaccagcaggccctgaagcagagcttcctggagctgacagagctgaagtacctgctgaagaagacccaggacttctttgaaacagagaccaacctggctgatgacttcttcacagaggacaccagcggcctgctggagctgaaggctgtgcctgcctacatgaccgggaagctgggcttcatcgccggggtcatcaaccgggagaggatggccagctttgagcggctgctgtggaggatctgcagaggaaatgtgtacctgaagttcagcgagatggatgcccccctggaggaccctgtgaccaaggaggagatccagaagaacatcttcatcatcttctaccagggcgagcagctgcggcagaagatcaagaagatctgtgatggcttccgggccaccgtgtacccctgcccagagcctgctgtggagcggcgggagatgctggagagcgtgaatgtgcggctggaggacctgatcaccgtcatcacccagacagagagccaccggcagaggctgctgcaggaggccgccgccaactggcacagctggctgatcaaggtgcagaagatgaaggctgtgtaccacatcctgaacatgtgcaacattgatgtgacccagcagtgtgtgattgctgagatctggttccctgtggctgatgccacccgcatcaagagggccctggagcagggcatggagctgagcggcagctccatggcccccatcatgaccaccgtgcagagcaagacagccccacccaccttcaacagaaccaacaagttcaccgctggcttccagaacatcgtggatgcctatggagtgggcagctaccgggagatcaacccagccccctacaccatcatcaccttccccttcctgtttgctgtgatgtttggagactgtggccacggcaccgtgatgctgctggccgccctgtggatgatcctgaatgaaagaaggctgctgagccagaagacagacaatgagatctggaacaccttcttccacggccgctacctgatcctgctgatgggcatcttcagcatctacacaggcctcatctacaatgactgcttcagcaagagcctgaacatcttcggcagctcctggagcgtgcagcccatgttcagaaatggcacctggaacacccacgtgatggaggagagcctgtacctgcagctggaccctgccatccctggggtgtacttcggcaacccctaccccttcggcatcgaccccatctggaacctggccagcaacaagctgaccttcctgaacagctacaagatgaagatgtctgtcatcctgggcatcgtgcagatggtgtttggagtcatcctgagcctcttcaaccacatctacttccggaggaccctgaacatcatcctgcagttcatccctgagatgatcttcatcctgtgcctgtttggctacctggtgttcatgatcatcttcaagtggtgctgctttgatgtgcacgtgtcccagcacgcccccagcatcctgatccacttcatcaacatgttcctgttcaactacagcgacagcagcaatgcccccctgtacaagcaccagcaggaggtgcagagcttctttgtggtgatggccctgatctctgtgccctggatgctgctgatcaagcccttcatcctgcgggccagccacaggaagagccagctgcaggccagccgcatccaggaggatgccacagagaacatcgagggggacagcagcagccccagcagccgcagcggccagaggaccagcgctgacacccacggggccctggatgaccacggggaggagttcaactttggagatgtgtttgtgcaccaggccatccacaccatcgagtactgcctgggctgcatcagcaacacagccagctacctgcggctgtgggccctgagcctggcccacgcccagctgtctgaggtgctgtggaccatggtgatgaacagcggcctgcagacccggggctggggcggcatcgtgggcgtcttcatcatctttgctgtgtttgctgtgctgactgtggccatcctgctgatcatggagggcctgagcgccttcctgcacgccctgcggctgcactgggtggagttccagaacaagttctacgtgggagatggctacaagttcagccccttctccttcaagcacatcctggatggaacagctgaggagtag

SEQ ID NO: 144501 - DNA, 2523 bp, synthetic construct; identical to SEQ ID NO: 144500
  misc_feature 1..2523: note = Description of Artificial Sequence: Synthetic coding sequence
  source 1..2523: mol_type = other DNA

SEQ ID NO: 144502 - DNA, 2523 bp, synthetic construct; identical to SEQ ID NO: 144500
  misc_feature 1..2523: note = Description of Artificial Sequence: Synthetic coding sequence
  source 1..2523: mol_type = other DNA

SEQ ID NO: 144503 - DNA, 3108 bp, synthetic construct
  misc_feature 1..3108: note = Description of Artificial Sequence: Synthetic coding sequence
  source 1..3108: mol_type = other DNA
atgggcaaggcagaaaattatgagctgtacagcgtggagctgggccctggccctggaggagacatggccgccaagatgagcaagaagaagaaggccggcggcggcggcggcaagaggaaggagaagctggagaacatgaagaaggagatggagatcaatgaccaccagctgtctgtggccgagctggagcagaagtaccagaccagcgccaccaagggcctgagcgccagcctggccgctgagctgctgctgagagatggccccaatgccctgcggcccccccggggcaccccagaatatgtgaagtttgcccggcagctggccggcggcctgcagtgcctgatgtgggtggccgccgccatctgcctgattgcctttgccatccaggccagcgagggggacctgaccacagatgacaacctgtacctggccatcgccctgattgctgtggtggtggtgacaggctgcttcggctactaccaggagttcaagagcaccaacatcatcgccagcttcaagaacctggtgccccagcaggccaccgtcatcagagatggagacaagttccagatcaatgctgaccagctggtggtgggggacctggtggagatgaagggcggggacagagtgcctgctgacatccgcatcctggccgcccagggctgcaaggtggacaacagcagcctgaccggggagagcgagccccagaccaggagcccagaatgtacccatgagagccccctggagaccagaaatattgccttcttcagcaccatgtgcctggagggcaccgtgcagggcctggtggtgaacacaggagacaggaccatcatcggcagaattgccagcctggccagcggcgtggagaatgagaagacccccatcgccattgaaattgagcactttgtggacatcatcgccggcctggccatcctgtttggagccaccttcttcatcgtggccatgtgcatcggctacaccttcctgcgggccatggtgttcttcatggccatcgtggtggcctacgtgcctgagggcctgctggccaccgtgacagtgtgcctgagcctgacagccaagaggctggccagcaagaactgtgtggtgaagaacctggaggccgtggagaccctgggcagcaccagcgtcatctgcagcgacaagacaggcaccctgacccagaacaggatgacagtgagccacctgtggtttgacaaccacatccacacagctgacaccacagaggaccagagcggccagacctttgaccagagcagcgagacctggagggccctgtgccgggtgctgaccctgtgcaacagagctgccttcaagagcggccaggatgctgtgcctgtgcccaagagaattgtgattggagatgccagcgagacagccctgctgaagttcagcgagctgaccctgggcaatgccatgggctacagagaccgcttccccaaggtgtgtgagatccccttcaacagcaccaacaagttccagctgagcatccacaccctggaggacccccgggaccccaggcacctgctggtgatgaagggggcccctgagcgggtgctggagcgctgcagcagcatcctgatcaagggccaggagctgcccctggatgagcagtggagggaggccttccagacagcctacctgagcctgggcggcctgggggagcgggtgctgggcttctgccagctgtacctgaatgagaaggactacccacctggctacgcctttgatgtggaggccatgaacttccccagcagcggcctgtgctttgctggcctggtgtccatgattgatcctccccgggccaccgtgcctgatgctgtgctgaagtgcaggacagctggcatccgggtcatcatggtgactggagaccaccccatcacagccaaggccatcgccgcctctgtgggcatcatcagcgagggcagcgagaccgtggaggacattgctgcccggctgcgggtgcctgtggaccaggtgaacaggaaggatgcccgggcctgcgtcatcaatggcatgcagctgaaggacatggaccccagcgagctggtggaggccctgcggacccaccctgagatggtgtttgcccggaccagcccccagcagaagctggtgattgtggagagctgccagaggctgggcgccatcgtggccgtgactggagatggagtgaatgacagccctgccctgaagaaggctgacattggagtggccatgggcattgctggcagtgatgctgccaagaatgctgctgacatgatcctgctggatgacaactttgccagcatcgtgactggagtggagcagggccgcctcatctttgacaacctgaagaagagcatcgcctacaccctgaccaagaacatccctgagctgaccccctacctgatctacatcaccgtgtctgtgcccctgcccctgggctgcatcaccatcctcttcatcgagctgtgcacagacatcttccccagcgtgtccctggcctatgagaaggccgagagtgacatcatgcacctgcggcccaggaaccccaagagggaccggctggtgaatgagcccctggccgcctacagctacttccagatcggggccatccagagctttgctggcttcacagactacttcaccgccatggcccaggagggctggttccccctgctgtgtgtgggcctgcgggcccagtgggaggaccaccacctgcaggacctgcaggacagctatggccaggagtggaccttcggccagaggctgtaccagcagtacacctgctacacagtgttcttcatcagcattgaggtgtgccagattgctgatgtgctgatcaggaagacccggcggctgagcgccttccagcagggcttcttcaggaacaagatcctggtgattgccatcgtgttccaggtgtgcatcggctgcttcctgtgctactgccccggcatgcccaacatcttcaacttcatgcccatccgcttccagtggtggctggtgcccctgccctacggcatcctgatctttgtgtatgatgagatcaggaagctgggcgtgcgctgctgccccggctcctggtgggaccaggagctgtactactag

SEQ ID NO: 144504 - DNA, 876 bp, synthetic construct
  misc_feature 1..876: note = Description of Artificial Sequence: Synthetic coding sequence
  source 1..876: mol_type = other DNA
atggccgccctgcaggagaagaagacctgtggccagaggatggaggagttccagcgctactgctggaacccagacaccggccagatgctgggccgcaccctgagccgctgggtgtggatcagcctgtactacgtggccttctacgtggtgatgacaggcctgtttgccctgtgcctgtatgtgctgatgcagacagtggacccctacaccccagactaccaggaccagctgcggagccctggggtgaccctgcggccagatgtgtatggagagaagggcctggagatcgtgtacaacgtgtctgacaacagaacctgggccgacctgacccagaccctgcacgccttcctggccggctacagccctgctgcccaggaggacagcatcaactgcaccagcgagcagtacttcttccaggagagcttccgggcccccaaccacaccaagttcagctgcaagttcaccgctgacatgctgcagaactgcagcggcctggccgaccccaactttggatttgaggagggcaagccctgcttcatcatcaagatgaaccgcatcgtgaagttcctgcccagcaatggaagtgccccccgggtggactgtgccttcctggaccagccccgggagctgggccagcccctgcaggtgaagtactacccacccaacggcaccttcagcctgcactacttcccctactacggcaagaaggcccagccccactacagcaaccccctggtggccgccaagctgctgaacatccccagaaatgctgaggtggccatcgtgtgcaaggtgatggccgagcacgtgaccttcaacaacccccatgacccctatgagggcaaggtggagttcaagctgaagattgagaagtag

SEQ ID NO: 144505 - DNA, 1290 bp, synthetic construct
  misc_feature 1..1290: note = Description of Artificial Sequence: Synthetic coding sequence
  source 1..1290: mol_type = other DNA
atgcagctgaggaaccctgagctgcacctgggctgtgccctggccctgcgcttcctggccctggtgtcctgggacatccctggggcccgggccctggacaatggcctggcccggacccccaccatgggctggctgcactgggagcgcttcatgtgcaacctggactgccaggaggagccagacagctgcatcagcgagaagctgttcatggagatggccgagctgatggtgtctgagggctggaaggatgctggctatgagtacctgtgcattgatgactgctggatggccccccagagggacagcgagggccgcctgcaggccgacccccagcgcttcccccacggcatccggcagctggccaactacgtgcacagcaagggcctgaagctgggcatctatgcagatgtgggcaacaagacctgtgccggcttccctggcagctttggctactatgacattgatgcccagacctttgctgactggggcgtggacctgctgaagtttgatggctgctactgtgacagcctggagaacctggctgatggctacaagcacatgagcctggccctgaacagaacaggccgcagcatcgtgtacagctgtgagtggcccctgtacatgtggcccttccagaagcccaactacacagagatccggcagtactgcaaccactggaggaactttgctgacattgatgacagctggaagagcatcaagagcatcctggactggaccagcttcaaccaggagagaattgtggatgtggccggccctgggggctggaatgaccctgacatgctggtgattggcaactttggcctgtcctggaaccagcaggtgacccagatggccctgtgggccatcatggccgcccccctcttcatgagcaatgacctgcggcacatcagcccccaggccaaggccctgctgcaggacaaggatgtgattgccatcaaccaggaccccctgggcaagcagggctaccagctgcggcagggcgacaactttgaggtgtgggagcggcccctgagcggcctggcctgggccgtggccatgatcaaccggcaggagattggaggccccaggagctacaccatcgctgtggccagcctgggcaagggcgtggcctgcaacccagcctgcttcatcacccagctgctgcctgtgaagaggaagctgggcttctatgagtggaccagccggctgcggagccacatcaaccccaccggcaccgtgctgctgcagctggagaacaccatgcagatgagcctgaaggacctgctgtag

SEQ ID NO: 144506 - DNA, 3120 bp, synthetic construct
  misc_feature 1..3120: note = Description of Artificial Sequence: Synthetic coding sequence
  source 1..3120: mol_type = other DNA
atgcaccagaagaccccagagatctacagcgtggagctgagcggcaccaaggacatcgtgaagacagacaagggagatggcaaggagaagtaccggggcctgaagaacaactgcctggagctgaagaagaagaaccacaaggaggagttccagaaggagctgcacctggatgaccacaagctgagcaaccgggagctggaggagaagtatggaacagacatcatcatgggcctgagcagcaccagggctgctgagctgctggccagagatggccccaacagcctgaccccacccaagcagaccccagagatcgtgaagttcctgaagcagatggtgggcggcttcagcatcctgctgtgggtgggcgccttcctgtgctggatcgcctacggcatccagtacagcagtgacaagagcgccagcctgaacaacgtgtacctgggctgtgtgctgggcctggtggtgatcctgaccggcatctttgcctactaccaggaggccaagagcaccaacatcatgagcagcttcaacaagatgatcccccagcaggccctggtgatccgggacagcgagaagaagaccatccccagcgagcagctggtggtgggggacatcgtggaggtgaagggcggggaccagatcccagctgacatccgggtgctgagcagccagggctgccgggtggacaacagcagcctgaccggggagagcgagccccagcccaggagcagcgagttcacccatgagaaccccctggagaccaagaacatctgcttctacagcaccacctgcctggagggcaccgtgacaggcatggtgatcaacacaggagacaggaccatcatcggccacatcgccagcctggccagcggcgtgggcaatgagaagacccccatcgccattgaaattgagcactttgtgcacatcgtggccggcgtggccgtgtccatcggcatcctcttcttcatcatcgctgtgtccctgaagtaccaggtgctggacagcatcatcttcctgattggcatcatcgtggccaacgtgcctgagggcctgctggccaccgtgacagtgaccctgagcctgacagccaagaggatggccaagaagaactgcctggtgaagaacctggaggccgtggagaccctgggcagcaccagcatcatctgcagcgacaagacaggcaccctgacccagaacaggatgacagtggcccacctgtggtttgacaaccagatctttgtggccgacaccagcgaggaccacagcaaccaggtgtttgaccagagcagcaggacctgggccagcctgagcaagatcatcaccctgtgcaacagagctgagttcaagccaggccaggagaatgtgcccatcatgaagaaggctgtgattggagatgccagcgagacagccctgctgaagttcagcgaggtgatcctgggagatgtgatggagatcaggaagaggaacaggaaggtggccgagatccccttcaacagcaccaacaagttccagctgagcatccacgagatggatgacccccacggcaagcgcttcctgatggtgatgaagggggcccctgagcgcatcctggagaagtgcagcaccatcatgatcaatggagaggagcaccccctggacaagagcacagccaagaccttccacacagcctacatggagctgggcggcctgggggagcgggtgctgggcttctgccacctgtacctgcctgcagatgagttccctgagacctacagctttgatattgatgccatgaacttccccaccagcaacctgtgctttgtgggcctgctgtccatgattgatcctcccaggagcacagtgcctgatgctgtgaccaagtgccgctctgctggcatcaaggtgatcatggtgactggagaccaccccatcacagccaaggccatcgccaagtctgtgggcatcatcagcgccaacagcgagaccgtggaggacatcgcccaccggctgaacattgctgtggagcaggtgaacaagagagatgccaaggctgctgtggtgacaggcatggagctgaaggacatgagcagcgagcagctggatgagatcctggccaactaccaggagatcgtgtttgcccggaccagcccccagcagaagctgatcatcgtggagggctgccagaggcaggatgctgtggtggccgtgactggagatggagtgaatgacagccctgccctgaagaaggctgacattggaattgccatgggcattgctggcagtgatgctgccaagaatgctgctgacatggtgctgctggatgacaactttgccagcatcgtgactggagtggaggagggccgcctcatctttgacaacctgaagaagaccatcgcctacagcctgaccaagaacattgctgagctgtgccccttcctgatctacatcatcgtgggcctgcccctgcccatcggcaccatcaccatcctcttcatcgacctgggcacagacatcatccccagcatcgccctggcctatgagaaggccgagagtgacatcatgaacaggaagcccaggcacaagaacaaggaccggctggtgaaccagcccctggccgtgtacagctacctgcacatcggcctgatgcaggccctgggcgccttcctggtgtacttcaccgtgtatgcccaggagggcttcctgcccaggaccctcatcaacctgcgggtggagtgggagaaggactatgtgaatgacctgaaggacagctatggccaggagtggacccgctaccagcgggagtacctggagtggacaggctacacagccttctttgtgggcatcctggtgcagcagattgctgacctgatcatcaggaagaccaggaggaacagcatcttccagcagggcctcttcaggaacaaggtgatctgggtgggcatcaccagccagatcatcatcggcctcatcctgtcctatggcctgggctctgtgacagccctgtccttcaccatgctgcgggcccagtactggtttgtggccgtgccccacgccatcctgatctgggtgtatgatgaggtgaggaagctgttcatccggctgtacccaggctcctggtgggacaagaacatgtactactag

SEQ ID NO: 144507 - DNA, 3072 bp, synthetic construct
  misc_feature 1..3072: note = Description of Artificial Sequence: Synthetic coding sequence
  source 1..3072: mol_type = other DNA
atgggcaaaggagtgggccgggacaagtatgagcctgctgctgtgtctgagcagggcgacaagaagggcaagaagggcaagaaggaccgggacatggatgagctgaagaaggaggtgtccatggatgaccacaagctgagcctggatgagctgcacaggaaatatggaacagacctgagccggggcctgaccagcgcccgggctgctgagatcctggccagagatggccccaatgccctgaccccaccacccaccaccccagagtggatcaagttctgccggcagctgtttggaggcttctccatgctgctgtggattggagccatcctgtgcttcctggcctacagcatccaggccgccacagaggaggagccccagaatgacaacctgtacctgggcgtggtgctgtctgctgtggtgatcatcaccggctgcttctcctactaccaggaggccaagagcagcaagatcatggagagcttcaagaacatggtgccccagcaggccctggtgatcagaaatggagagaagatgagcatcaatgctgaggaggtggtggtgggggacctggtggaggtgaagggcggggaccgcatcccagctgacctgcgcatcatcagcgccaacggctgcaaggtggacaacagcagcctgactggagagagcgagccccagaccaggagcccagacttcaccaatgaaaaccccctggagaccaggaacatcgccttcttcagcaccaactgtgtggagggcacagcccggggcatcgtggtgtacacaggagacagaacagtgatgggccgcatcgccaccctggccagcggcctggagggcggccagacccccatcgctgctgagattgagcacttcatccacatcatcaccggggtggccgtgttcctgggcgtgtccttcttcatcctgagcctcatcctggagtacacctggctggaggccgtcatcttcctgattggcatcatcgtggccaacgtgcctgagggcctgctggccaccgtgacagtgtgcctgaccctgacagccaagaggatggccaggaagaactgcctggtgaagaacctggaggccgtggagaccctgggcagcaccagcaccatctgcagcgacaagacaggcaccctgacccagaacaggatgacagtggcccacatgtggtttgacaaccagatccacgaggccgacaccacagagaaccagagcggcgtgtcctttgacaagaccagcgccacctggctggccctgagcagaattgctggcctgtgcaacagagctgtgttccaggccaaccaggagaacctgcccatcctgaagagagctgtggccggagatgccagcgagagcgccctgctgaagtgcatcgagctgtgctgcggctctgtgaaggagatgagggagagatatgccaagatcgtggagatccccttcaacagcaccaacaagtaccagctgagcatccacaagaaccccaacaccagcgagccccagcacctgctggtgatgaagggggcccctgagcgcatcctggaccgctgcagcagcatcctgctgcacggcaaggagcagcccctggatgaggagctgaaggatgccttccagaatgcctacctggagctgggcggcctgggggagcgggtgctgggcttctgccacctgttcctgcctgatgagcagtttcctgagggcttccagtttgacacagatgatgtgaacttccccatcgacaacctgtgctttgtgggcctcatctccatgattgacccccccagggctgctgtgcctgatgctgtgggcaaatgtagatctgctggcatcaaggtgatcatggtgactggagaccaccccatcacagccaaggccatcgccaagggcgtgggcatcatcagcgagggcaatgagaccgtggaggacattgctgcccggctgaacatccctgtgtcccaggtgaaccccagagatgccaaggcctgtgtggtgcacggcagtgacctgaaggacatgaccagcgagcagctggatgacatcctgaagtaccacacagagatcgtgtttgcccggaccagcccccagcagaagctgatcatcgtggagggctgccagaggcagggcgccatcgtggccgtgactggagatggagtgaatgacagccctgccctgaagaaggctgacatcggcgtggccatgggcattgctggcagtgatgtgtccaagcaggccgctgacatgatcctgctggatgacaactttgccagcatcgtgactggagtggaggagggccgcctcatctttgacaacctgaagaagagcatcgcctacaccctgaccagcaacatccctgagatcacccccttcctgatcttcatcatcgccaacatccccctgcccctgggcaccgtgaccatcctgtgcatcgacctgggcacagacatggtgcctgccatcagcctggcctatgagcaggccgagagtgacatcatgaagaggcagcccaggaaccccaagacagacaagctggtgaatgaaagactcatctccatggcctacggccagatcggcatgatccaggccctgggcggcttcttcacctacttcgtcatcctggctgaaaatggcttcctgcccatccacctgctgggcctgcgggtggactgggatgaccgctggatcaatgatgtggaggacagctatggccagcagtggacctatgagcagaggaagatcgtggagttcacctgccacacagccttctttgtgtccatcgtggtggtgcagtgggccgacctggtgatctgcaagaccaggagaaattctgtgttccagcagggcatgaagaacaagatcctgatcttcggcctgtttgaggagacagccctggccgccttcctgagctactgccccggcatgggcgtggccctgaggatgtaccccctgaagcccacctggtggttctgtgccttcccctacagcctgctgatctttgtgtatgatgaggtgaggaagctgatcatcagaagaagacctgggggctgggtggagaaggagacctactactag

SEQ ID NO: 144508 - DNA, 2043 bp, synthetic construct
  misc_feature 1..2043: note = Description of Artificial Sequence: Synthetic coding sequence
  source 1..2043: mol_type = other DNA
gggaaggaggtgggccgggacaagtatgagcctgctgctgtgtctgagcagggcgacaagaagggcaagaagggcaagaaggaccgggacatggatgagctgaagaaggaggtgtccatggatgaccacaagctgagcctggatgagctgcacaggaaatatggaacagacctgagccggggcctgaccagcgcccgggctgctgagatcctggccagagatggccccaatgccctgaccccaccacccaccaccccagagtggatcaagttctgccggcagctgtttggaggcttctccatgctgctgtggattggagccatcctgtgcttcctggcctacagcatccaggccgccacagaggaggagccccagaatgacaacctgtacctgggcgtggtgctgtctgctgtggtgatcatcaccggctgcttctcctactaccaggaggccaagagcagcaagatcatggagagcttcaagaacatggtgccccagcaggccctggtgatcagaaatggagagaagatgagcatcaatgctgaggaggtggtggtgggggacctggtggaggtgaagggcggggaccgcatcccagctgacctgcgcatcatcagcgccaacggctgcaaggtggacaacagcagcctgaccggggagagcgagccccagaccaggagcccagacttcaccaatgaaaaccccctggagaccagaaatattgccttcttcagcaccaactgtgtggagggcacagcccggggcatcgtggtgtacaccggggacagaacagtgatgggcagaattgccaccctggccagcggcctggagggcggccagacccccatcgctgctgagattgagcacttcatccacatcatcactggagtggccgtgttcctgggcgtgtccttcttcatcctgagcctcatcctggagtacacctggctggaggccgtcatcttcctgattggcatcatcgtggccaacgtgcctgagggcctgctggccaccgtgacagtgtgcctgaccctgacagccaagaggatggccaggaagaactgcctggtgaagaacctggaggccgtggagaccctgggcagcaccagcaccatctgcagcgacaagacaggcaccctgacccagaacaggatgacagtggcccacatgtggtttgacaaccagatccatgaagctgacaccacagagaaccagagcggcgtgtcctttgacaagaccagcgccacctggctggccctgagcagaattgctggcctgtgcaacagagctgtgttccaggccaaccaggagaacctgcccatcctgaagagagctgtggccggagatgccagcgagagcgccctgctgaagtgcatcgagctgtgctgcggctctgtgaaggagatgagggagagatatgccaagatcgtggagatccccttcaacagcaccaacaagtaccagctgagcatccacaagaaccccaacaccagcgagccccagcacctgctggtgatgaagggggcccctgagcgcatcctggaccgctgcagcagcatcctgctgcacggcaaggagcagcccctggatgaggagctgaaggatgccttccagaatgcctacctggagctgggcggcctgggggagcgggtgctgggcttctgccacctgttcctgcctgatgagcagtttcctgagggcttccagtttgacacagatgatgtgaacttccccatcgacaacctgtgctttgtgggcctcatctccatgattgatcctcccagggctgctgtgcctgatgctgtgggcaagtgccgctctgctggcatcaaggtgatcatggtgactggagaccaccccatcacagccaaggccatcgccaagggcgtgggcatcatcagcgagggcaatgagcccatgagccggggcaagtcctggagcagccctgccacccagcccagcagctctgtgtcctggtggtgcagcggccccacctggagctctgtgcggcctgggggcatccgcagcagcagccggggctag

SEQ ID NO: 144509 - DNA, 435 bp, synthetic construct
  misc_feature 1..435: note = Description of Artificial Sequence: Synthetic coding sequence
  source 1..435: mol_type = other DNA
atggatgagctgaagaaggaggtgtccatggatgaccacaagctgagcctggatgagctgcacaggaaatatggaacagacctgagccggggcctgaccagcgcccgggctgctgagatcctggccagagatggccccaatgccctgaccccaccacccaccaccccagagtggatcaagttctgccggcagctgtttggaggcttctccatgctgctgtggattggagccatcctgtgcttcctggcctacagcatccaggccgccacagaggaggagccccagaatgacaacctgtacctgggcgtggtgctgtctgctgtggtgatcatcaccggctgcttctcctactaccaggaggccaagagcagcaagatcatggagagcttcaagaacatggtgccccagcaggccctggtgatcagaaatggatag

SEQ ID NO: 144510 - DNA, 2979 bp, synthetic construct
  misc_feature 1..2979: note = Description of Artificial Sequence: Synthetic coding sequence
  source 1..2979: mol_type = other DNA
atggatgagctgaagaaggaggtgtccatggatgaccacaagctgagcctggatgagctgcacaggaaatatggaacagacctgagccggggcctgaccagcgcccgggctgctgagatcctggccagagatggccccaatgccctgaccccaccacccaccaccccagagtggatcaagttctgccggcagctgtttggaggcttctccatgctgctgtggattggagccatcctgtgcttcctggcctacagcatccaggccgccacagaggaggagccccagaatgacaacctgtacctgggcgtggtgctgtctgctgtggtgatcatcaccggctgcttctcctactaccaggaggccaagagcagcaagatcatggagagcttcaagaacatggtgccccagcaggccctggtgatcagaaatggagagaagatgagcatcaatgctgaggaggtggtggtgggggacctggtggaggtgaagggcggggaccgcatcccagctgacctgcgcatcatcagcgccaacggctgcaaggtggacaacagcagcctgaccggggagagcgagccccagaccaggagcccagacttcaccaatgaaaaccccctggagaccagaaatattgccttcttcagcaccaactgtgtggagggcacagcccggggcatcgtggtgtacaccggggacagaacagtgatgggcagaattgccaccctggccagcggcctggagggcggccagacccccatcgctgctgagattgagcacttcatccacatcatcactggagtggccgtgttcctgggcgtgtccttcttcatcctgagcctcatcctggagtacacctggctggaggccgtcatcttcctgattggcatcatcgtggccaacgtgcctgagggcctgctggccaccgtgacagtgtgcctgaccctgacagccaagaggatggccaggaagaactgcctggtgaagaacctggaggccgtggagaccctgggcagcaccagcaccatctgcagcgacaagacaggcaccctgacccagaacaggatgacagtggcccacatgtggtttgacaaccagatccatgaagctgacaccacagagaaccagagcggcgtgtcctttgacaagaccagcgccacctggctggccctgagcagaattgctggcctgtgcaacagagctgtgttccaggccaaccaggagaacctgcccatcctgaagagagctgtggccggagatgccagcgagagcgccctgctgaagtgcatcgagctgtgctgcggctctgtgaaggagatgagggagagatatgccaagatcgtggagatccccttcaacagcaccaacaagtaccagctgagcatccacaagaaccccaacaccagcgagccccagcacctgctggtgatgaagggggcccctgagcgcatcctggaccgctgcagcagcatcctgctgcacggcaaggagcagcccctggatgaggagctgaaggatgccttccagaatgcctacctggagctgggcggcctgggggagcgggtgctgggcttctgccacctgttcctgcctgatgagcagtttcctgagggcttccagtttgacacagatgatgtgaacttccccatcgacaacctgtgctttgtgggcctcatctccatgattgatcctcccagggctgctgtgcctgatgctgtgggcaagtgccgctctgctggcatcaaggtgatcatggtgactggagaccaccccatcacagccaaggccatcgccaagggcgtgggcatcatcagcgagggcaatgaaacagtggaggacattgctgcccggctgaacatccctgtgtcccaggtgaaccccagagatgccaaggcctgtgtggtgcacggcagtgacctgaaggacatgaccagcgagcagctggatgacatcctgaagtaccacacagaaattgtgtttgcccggaccagcccccagcagaagctgatcatcgtggagggctgccagaggcagggcgccatcgtggccgtgactggagatggagtgaatgacagccctgccctgaagaaggctgacattggagtggccatgggcattgctggcagtgatgtgtccaagcaggccgctgacatgatcctgctggatgacaactttgccagcatcgtgactggagtggaggagggccgcctcatctttgacaacctgaagaagagcatcgcctacaccctgaccagcaacatccctgagatcacccccttcctgatcttcatcatcgccaacatccccctgcccctgggcaccgtgaccatcctgtgcatcgacctgggcacagacatggtgcctgccatcagcctggcctatgagcaggccgagagtgacatcatgaagaggcagcccaggaaccccaagacagacaagctggtgaatgaaagactcatctccatggcctacggccagatcggcatgatccaggccctgggcggcttcttcacctactttgtgatcctggccgagaatggcttcctgcccatccacctgctgggcctgcgggtggactgggatgaccgctggatcaatgatgtggaggacagctatggccagcagtggacctatgagcagaggaagatcgtggagttcacctgccacacagccttctttgtgtccatcgtggtggtgcagtgggccgacctggtgatctgcaagaccaggaggaacagcgtcttccagcagggcatgaagaacaagatcctgatcttcggcctgtttgaggagacagccctggccgccttcctgagctactgccccggcatgggcgtggccctgaggatgtaccccctgaagcccacctggtggttctgtgccttcccctacagcctgctgatctttgtgtatgatgaggtgaggaagctgatcatcagaagaagacctgggggctgggtggagaaggagacctactactag

SEQ ID NO: 144511 - DNA, 321 bp, synthetic construct
  misc_feature 1..321: note = Description of Artificial Sequence: Synthetic coding sequence
  source 1..321: mol_type = other DNA
atggatgagctgaagaaggaggtgtccatggatgaccacaagctgagcctggatgagctgcacaggaaatatggaacagacctgagccggggcctgaccagcgcccgggctgctgagatcctggccagagatggccccaatgccctgaccccaccacccaccaccccagagtggatcaagttctgccggcagctgtttggaggcttctccatgctgctgtggattggagccatcctgtgcttcctggcctacagcatccaggccgccacagaggaggagccccagaatgacaacctgtacctgggcgtggtgctgtcctag

SEQ ID NO: 144512 - DNA, 474 bp, synthetic construct
  misc_feature 1..474: note = Description of Artificial Sequence: Synthetic coding sequence
  source 1..474: mol_type = other DNA
cggcagcccaggaaccccaagacagacaagctggtgaatgaaagactcatctccatggcctacggccagatcggcatgatccaggccctgggcggcttcttcacctactttgtgatcctggccgagaatggcttcctgcccatccacctgctgggcctgcgggtggactgggatgaccgctggatcaatgatgtggaggacagctatggccagcagtggacctatgagcagaggaagatcgtggagttcacctgccacacagccttctttgtgtccatcgtggtggtgcagtgggccgacctggtgatctgcaagaccaggaggaacagcgtcttccagcagggcatgaagaacaagatcctgatcttcggcctgtttgaggagacagccctggccgccttcctgagctactgccccggcatgggcgtggccctgaggatgtaccccctgaagaccctgacccagtacagctag

SEQ ID NO: 144513 - DNA, 480 bp, synthetic construct
  misc_feature 1..480: note = Description of Artificial Sequence: Synthetic coding sequence
  source 1..480: mol_type = other DNA
atgaagaggcagcccaggaaccccaagacagacaagctggtgaatgaaagactcatctccatggcctacggccagatcggcatgatccaggccctgggcggcttcttcacctactttgtgatcctggccgagaatggcttcctgcccatccacctgctgggcctgcgggtggactgggatgaccgctggatcaatgatgtggaggacagctatggccagcagtggacctatgagcagaggaagatcgtggagttcacctgccacacagccttctttgtgtccatcgtggtggtgcagtgggccgacctggtgatctgcaagaccaggaggaacagcgtcttccagcagggcatgaagaacaagatcctgatcttcggcctgtttgaggagacagccctggccgccttcctgagctactgccccggcatgggcgtggccctgaggatgtaccccctgaagaccctgacccagtacagctag

SEQ ID NO: 144514 - DNA, 3072 bp, synthetic construct
  misc_feature 1..3072: note = Description of Artificial Sequence: Synthetic coding sequence
  source 1..3072: mol_type = other DNA
atggccttcaaggtgggccgggacaagtatgagcctgctgctgtgtctgagcagggcgacaagaagggcaagaagggcaagaaggaccgggacatggatgagctgaagaaggaggtgtccatggatgaccacaagctgagcctggatgagctgcacaggaaatatggaacagacctgagccggggcctgaccagcgcccgggctgctgagatcctggccagagatggccccaatgccctgaccccaccacccaccaccccagagtggatcaagttctgccggcagctgtttggaggcttctccatgctgctgtggattggagccatcctgtgcttcctggcctacagcatccaggccgccacagaggaggagccccagaatgacaacctgtacctgggcgtggtgctgtctgctgtggtgatcatcaccggctgcttctcctactaccaggaggccaagagcagcaagatcatggagagcttcaagaacatggtgccccagcaggccctggtgatcagaaatggagagaagatgagcatcaatgctgaggaggtggtggtgggggacctggtggaggtgaagggcggggaccgcatcccagctgacctgcgcatcatcagcgccaacggctgcaaggtggacaacagcagcctgactggagagagcgagccccagaccaggagcccagacttcaccaatgaaaaccccctggagaccaggaacatcgccttcttcagcaccaactgtgtggagggcacagcccggggcatcgtggtgtacacaggagacagaacagtgatgggccgcatcgccaccctggccagcggcctggagggcggccagacccccatcgctgctgagattgagcacttcatccacatcatcaccggggtggccgtgttcctgggcgtgtccttcttcatcctgagcctcatcctggagtacacctggctggaggccgtcatcttcctgattggcatcatcgtggccaacgtgcctgagggcctgctggccaccgtgacagtgtgcctgaccctgacagccaagaggatggccaggaagaactgcctggtgaagaacctggaggccgtggagaccctgggcagcaccagcaccatctgcagcgacaagacaggcaccctgacccagaacaggatgacagtggcccacatgtggtttgacaaccagatccacgaggccgacaccacagagaaccagagcggcgtgtcctttgacaagaccagcgccacctggctggccctgagcagaattgctggcctgtgcaacagagctgtgttccaggccaaccaggagaacctgcccatcctgaagagagctgtggccggagatgccagcgagagcgccctgctgaagtgcatcgagctgtgctgcggctctgtgaaggagatgagggagagatatgccaagatcgtggagatccccttcaacagcaccaacaagtaccagctgagcatccacaagaaccccaacaccagcgagccccagcacctgctggtgatgaagggggcccctgagcgcatcctggaccgctgcagcagcatcctgctgcacggcaaggagcagcccctggatgaggagctgaaggatgccttccagaatgcctacctggagctgggcggcctgggggagcgggtgctgggcttctgccacctgttcctgcctgatgagcagtttcctgagggcttccagtttgacacagatgatgtgaacttccccatcgacaacctgtgctttgtgggcctcatctccatgattgacccccccagggctgctgtgcctgatgctgtgggcaaatgtagatctgctggcatcaaggtgatcatggtgactggagaccaccccatcacagccaaggccatcgccaagggcgtgggcatcatcagcgagggcaatgagaccgtggaggacattgctgcccggctgaacatccctgtgtcccaggtgaaccccagagatgccaaggcctgtgtggtgcacggcagtgacctgaaggacatgaccagcgagcagctggatgacatcctgaagtaccacacagagatcgtgtttgcccggaccagcccccagcagaagctgatcatcgtggagggctgccagaggcagggcgccatcgtggccgtgactggagatggagtgaatgacagccctgccctgaagaaggctgacatcggcgtggccatgggcattgctggcagtgatgtgtccaagcaggccgctgacatgatcctgctggatgacaactttgccagcatcgtgactggagtggaggagggccgcctcatctttgacaacctgaagaagagcatcgcctacaccctgaccagcaacatccctgagatcacccccttcctgatcttcatcatcgccaacatccccctgcccctgggcaccgtgaccatcctgtgcatcgacctgggcacagacatggtgcctgccatcagcctggcctatgagcaggccgagagtgacatcatgaagaggcagcccaggaaccccaagacagacaagctggtgaatgaaagactcatctccatggcctacggccagatcggcatgatccaggccctgggcggcttcttcacctacttcgtcatcctggctgaaaatggcttcctgcccatccacctgctgggcctgcgggtggactgggatgaccgctggatcaatgatgtggaggacagctatggccagcagtggacctatgagcagaggaagatcgtggagttcacctgccacacagccttctttgtgtccatcgtggtggtgcagtgggccgacctggtgatctgcaagaccaggagaaattctgtgttccagcagggcatgaagaacaagatcctgatcttcggcctgtttgaggagacagccctggccgccttcctgagctactgccccggcatgggcgtggccctgaggatgtaccccctgaagcccacctggtggttctgtgccttcccctacagcctgctgatctttgtgtatgatgaggtgaggaagctgatcatcagaagaagacctgggggctgggtggagaaggagacctactactag

SEQ ID NO: 144515 - DNA, 3063 bp, synthetic construct
  misc_feature 1..3063: note = Description of Artificial Sequence: Synthetic coding sequence
  source 1..3063: mol_type = other DNA
atgggcagaggagctggccgggagtacagccctgctgccaccacagcagaaaatggaggcggcaagaagaagcagaaggagaaggagctggatgagctgaagaaggaggtggccatggatgaccacaagctgagcctggatgagctgggcaggaagtaccaggtggacctgagcaagggcctgaccaaccagagggcccaggatgtgctggccagagatggccccaatgccctgaccccaccacccaccaccccagagtgggtgaagttctgccggcagctgtttggaggcttcagcatcctgctgtggattggagccatcctgtgcttcctggcctacggcatccaggccgccatggaggatgagcccagcaatgacaacctgtacctgggcgtggtgctggccgctgtggtgattgtgacaggctgcttctcctactaccaggaggccaagagcagcaagatcatggacagcttcaagaacatggtgccccagcaggccctggtgatccgggagggggagaagatgcagatcaatgctgaggaggtggtggtgggggacctggtggaggtgaagggcggggacagagtgcctgctgacctgcgcatcatcagcagccacggctgcaaggtggacaacagcagcctgactggagagagcgagccccagaccaggagccctgagttcacccatgagaaccccctggagaccaggaacatctgcttcttcagcaccaactgtgtggagggcacagcccggggcatcgtgattgccactggagacagaacagtgatgggccgcatcgccaccctggccagcggcctggaggtgggccgcacccccatcgccatggagattgagcacttcatccagctgatcaccggggtggccgtgttcctgggcgtgtccttctttgtgctgagcctcatcctgggctacagctggctggaggccgtcatcttcctgattggcatcatcgtggccaacgtgcctgagggcctgctggccaccgtgacagtgtgcctgaccctgacagccaagaggatggccaggaagaactgcctggtgaagaacctggaggccgtggagaccctgggcagcaccagcaccatctgcagcgacaagacaggcaccctgacccagaacaggatgacagtggcccacatgtggtttgacaaccagatccacgaggccgacaccacagaggaccagagcggggccacctttgacaagaggagccccacctggacagccctgagcagaattgctggcctgtgcaacagagctgtgttcaaggccggccaggagaacatctctgtgtccaagagggacacagctggagatgccagcgagagcgccctgctgaagtgcatcgagctgagctgtggctctgtgaggaagatgagggacaggaaccccaaggtggccgagatccccttcaacagcaccaacaagtaccagctgagcatccacgagcgggaggacagcccccagagccacgtgctggtgatgaagggggcccctgagcgcatcctggaccgctgcagcaccatcctggtgcagggcaaggagatccccctggacaaggagatgcaggatgccttccagaatgcctacatggagctgggcggcctgggggagcgggtgctgggcttctgccagctgaacctgcccagcggcaagttcccccggggcttcaagtttgacacagatgagctgaacttccccacagagaagctgtgctttgtgggcctgatgtccatgattgatcctcccagggctgctgtgcctgatgctgtgggcaagtgccgctctgctggcatcaaggtgatcatggtgactggagaccaccccatcacagccaaggccatcgccaagggcgtgggcatcatcagcgagggcaatgaaacagtggaggacattgctgcccggctgaacatccccatgagccaggtgaacccccgggaggccaaggcctgtgtggtgcacggcagtgacctgaaggacatgaccagcgagcagctggatgagatcctgaagaaccacacagaaattgtgtttgcccggaccagcccccagcagaagctgatcatcgtggagggctgccagaggcagggcgccatcgtggccgtgactggagatggagtgaatgacagccctgccctgaagaaggctgacattggaattgccatgggcatcagcggcagtgatgtgtccaagcaggccgctgacatgatcctgctggatgacaactttgccagcatcgtgactggagtggaggagggccgcctcatctttgacaacctgaagaagagcatcgcctacaccctgaccagcaacatccctgagatcacccccttcctgctcttcatcatcgccaacatccccctgcccctgggcaccgtgaccatcctgtgcatcgacctgggcacagacatggtgcctgccatcagcctggcctatgaagctgctgagagtgacatcatgaagaggcagcccaggaacagccagacagacaagctggtgaatgaaagactcatctccatggcctacggccagatcggcatgatccaggccctgggcggcttcttcacctactttgtgatcctggccgagaatggcttcctgcccagccggctgctgggcatccggctggactgggatgacaggaccatgaatgacctggaggacagctatggccaggagtggacctatgagcagaggaaggtggtggagttcacctgccacacagccttctttgccagcatcgtggtggtgcagtgggccgacctgatcatctgcaagaccaggaggaacagcgtcttccagcagggcatgaagaacaagatcctgatcttcggcctgctggaggagacagccctggccgccttcctgagctactgccccggcatgggcgtggccctgaggatgtaccccctgaaggtgacctggtggttctgtgccttcccctacagcctgctgatcttcatctatgatgaggtgaggaagctgatcctgcggcgctacccaggcggctgggtggagaaggagacctactactag

SEQ ID NO: 144516 - DNA, 3030 bp, synthetic construct
  misc_feature 1..3030: note = Description of Artificial Sequence: Synthetic coding sequence
  source 1..3030: mol_type = other DNA
atgggcagaggagctggccgggagtacagccctgctgccaccacagcagaaaatggaggcggcaagaagaagcagaaggagaaggagctggatgagctgaagaaggaggtggccatggatgaccacaagctgagcctggatgagctgggcaggaagtaccaggtggacctgagcaagggcctgaccaaccagagggcccaggatgtgctggccagagatggccccaatgccctgaccccaccacccaccaccccagagtgggtgaagttctgccggcagctgtttggaggcttcagcatcctgctgtggattggagccatcctgtgcttcctggcctacggcatccaggccgccatggaggatgagcccagcaatgacaacctgtacctgggcgtggtgctggccgctgtggtgattgtgacaggctgcttctcctactaccaggaggccaagagcagcaagatcatggacagcttcaagaacatggtgccccagcaggccctggtgatccgggagggggagaagatgcagatcaatgctgaggaggtggtggtgggggacctggtggaggtgaagggcggggacagagtgcctgctgacctgcgcatcatcagcagccacggctgcaaggtggacaacagcagcctgactggagagagcgagccccagaccaggagccctgagttcacccatgagaaccccctggagaccaggaacatctgcttcttcagcaccaactgtgtggagggcacagcccggggcatcgtgattgccactggagacagaacagtgatgggccgcatcgccaccctggccagcggcctggaggtgggccgcacccccatcgccatggagattgagcacttcatccagctgatcaccggggtggccgtgttcctgggcgtgtccttctttgtgctgagcctcatcctgggctacagctggctggaggccgtcatcttcctgattggcatcatcgtggccaacgtgcctgagggcctgctggccaccgtgacagtgtgcctgaccctgacagccaagaggatggccaggaagaactgcctggtgaagaacctggaggccgtggagaccctgggcagcaccagcaccatctgcagcgacaagacaggcaccctgacccagaacaggatgacagtggcccacatgtggtttgacaaccagatccacgaggccgacaccacagaggaccagagcggggccacctttgacaagaggagccccacctggacagccctgagcagaattgctggcctgtgcaacagagctgtgttcaaggccggccaggagaacatctctgtgtccaagagggacacagctggagatgccagcgagagcgccctgctgaagtgcatcgagctgagctgtggctctgtgaggaagatgagggacaggaaccccaaggtggccgagatccccttcaacagcaccaacaagtaccagctgagcatccacgagcgggaggacagcccccagagccacgtgctggtgatgaagggggcccctgagcgcatcctggaccgctgcagcaccatcctggtgcagggcaaggagatccccctggacaaggagatgcaggatgccttccagaatgcctacatggagctgggcggcctgggggagcgggtgctgggcttctgccagctgaacctgcccagcggcaagttcccccggggcttcaagtttgacacagatgagctgaacttccccacagagaagctgtgctttgtgggcctgatgtccatgattgatcctcccagggctgctgtgcctgatgctgtgggcaagtgccgctctgctggcatcaaggtgatcatggtgactggagaccaccccatcacagccaaggccatcgccaagggcgtgggcatcatcagcgagggcaatgaaacagtggaggacattgctgcccggctgaacatccccatgagccaggtgaacccccgggaggccaaggcctgtgtggtgcacggcagtgacctgaaggacatgaccagcgagcagctggatgagatcctgaagaaccacacagaaattgtgtttgcccggaccagcccccagcagaagctgatcatcgtggagggctgccagaggcagggcgccatcgtggccgtgactggagatggagtgaatgacagccctgccctgaagaaggctgacattggaattgccatgggcatcagcggcagtgatgtgtccaagcaggccgctgacatgatcctgctggatgacaactttgccagcatcgtgactggagtggaggagggccgcctcatctttgacaacctgaagaagagcatcgcctacaccctgaccagcaacatccctgagatcacccccttcctgctcttcatcatcgccaacatccccctgcccctgggcaccgtgaccatcctgtgcatcgacctgggcacagacatggtgcctgccatcagcctggcctatgaagctgctgagagtgacatcatgaagaggcagcccaggaacagccagacagacaagctggtgaatgaaagactcatctccatggcctacggccagatcggcatgatccaggccctgggcggcttcttcacctactttgtgatcctggccgagaatggcttcctgcccagccggctgctgggcatccggctggactgggatgacaggaccatgaatgacctggaggacagctatggccaggagtggacctatgagcagaggaaggtggtggagttcacctgccacacagccttctttgccagcatcgtggtggtgcagtgggccgacctgatcatctgcaagaccaggaggaacagcgtcttccagcagggcatgaagaacaagatcctgatcttcggcctgctggaggagacagccctggccgccttcctgagctactgccccggcatgggcgtggccctgaggatgtaccccctgaacctgctgatcttcatctatgatgaggtgaggaagctgatcctgcggcgctacccaggcggctgggtggagaaggagacctactactag

SEQ ID NO: 144517 - DNA, 2172 bp, synthetic construct
  misc_feature 1..2172: note = Description of Artificial Sequence: Synthetic coding sequence
  source 1..2172: mol_type = other DNA
atgctgagcagcgccctggccctgagcggggccctggtgaagaggctgaagccacccaacggccacttcatcctgacagacacccatgacctgaacaccagcaagattgagcacagcctcttcaccgtgtgcctgaccctgacagccaagaggatggccaggaagaactgcctggtgaagaacctggaggccgtggagaccctgggcagcaccagcaccatctgcagcgacaagacaggcaccctgacccagaacaggatgacagtggcccacatgtggtttgacaaccagatccatgaagctgacaccacagaggaccagagcggggccacctttgacaagaggagccccacctggacagccctgagcagaattgctggcctgtgcaacagagctgtgttcaaggccggccaggagaacatctctgtgtccaagagggacacagctggagatgccagcgagagcgccctgctgaagtgcatcgagctgagctgtggctctgtgaggaagatgagggacaggaaccccaaggtggccgagatccccttcaacagcaccaacaagtaccagctgagcatccacgagcgggaggacagcccccagagccacgtgctggtgatgaagggggcccctgagcgcatcctggaccgctgcagcaccatcctggtgcagggcaaggagatccccctggacaaggagatgcaggatgccttccagaatgcctacatggagctgggcggcctgggggagcgggtgctgggcttctgccagctgaacctgcccagcggcaagttcccccggggcttcaagtttgacacagatgagctgaacttccccacagagaagctgtgctttgtgggcctgatgtccatgattgacccccccagggctgctgtgcctgatgctgtgggcaaatgtagatctgctggcatcaaggtgatcatggtgactggagaccaccccatcacagccaaggccatcgccaagggcgtgggcatcatcagcgagggcaatgagaccgtggaggacattgctgcccggctgaacatccccatgagccaggtgaacccccgggaggccaaggcctgtgtggtgcacggcagtgacctgaaggacatgaccagcgagcagctggatgagatcctgaagaaccacacagagatcgtgtttgcccggaccagcccccagcagaagctgatcatcgtggagggctgccagaggcagggcgccatcgtggccgtgactggagatggagtgaatgacagccctgccctgaagaaggctgacatcggcatcgccatgggcatcagcggcagtgatgtgtccaagcaggccgctgacatgatcctgctggatgacaactttgccagcatcgtgactggagtggaggagggccgcctcatctttgacaacctgaagaagagcatcgcctacaccctgaccagcaacatccctgagatcacccccttcctgctcttcatcatcgccaacatccccctgcccctgggcaccgtgaccatcctgtgcatcgacctgggcacagacatggtgcctgccatcagcctggcctatgaggccgctgagagtgacatcatgaagaggcagcccaggaacagccagacagacaagctggtgaatgaaagactcatctccatggcctacggccagatcggcatgatccaggccctgggcggcttcttcacctacttcgtcatcctggctgaaaatggcttcctgcccagccggctgctgggcatccggctggactgggatgacaggaccatgaatgacctggaggacagctatggccaggagtggacctatgagcagaggaaggtggtggagttcacctgccacacagccttctttgccagcatcgtggtggtgcagtgggccgacctgatcatctgcaagaccaggagaaattctgtgttccagcagggcatgaagaacaagatcctgatcttcggcctgctggaggagacagccctggccgccttcctgagctactgccccggcatgggcgtggccctgaggatgtaccccctgaaggtgacctggtggttctgtgccttcccctacagcctgctgatcttcatctatgatgaggtgaggaagctgatcctgcggcgctacccaggcggctgggtggagaaggagacctactactag

SEQ ID NO: 144518 - DNA, 2145 bp, synthetic construct
  misc_feature 1..2145: note = Description of Artificial Sequence: Synthetic coding sequence
  source 1..2145: mol_type = other DNA
tgacagctgatcactggagtggccgtgttcctgggcgtgtccttctttgtgctgagcctcatcctgggctacagctggctggaggccgtcatcttcctgattggcatcatcgtggccaacgtgcctgagggcctgctggccaccgtgacagtgtgcctgaccctgacagccaagaggatggccaggaagaactgcctggtgaagaacctggaggccgtggagaccctgggcagcaccagcaccatctgcagcgacaagacaggcaccctgacccagaacaggatgacagtggcccacatgtggtttgacaaccagatccatgaagctgacaccacagaggaccagagcggggccacctttgacaagaggagccccacctggacagccctgagcagaattgctggcctgtgcaacagagctgtgttcaaggccggccaggagaacatctctgtgtccaagagggacacagctggagatgccagcgagagcgccctgctgaagtgcatcgagctgagctgtggctctgtgaggaagatgagggacaggaaccccaaggtggccgagatccccttcaacagcaccaacaagtaccagctgagcatccacgagcgggaggacagcccccagagccacgtgctggtgatgaagggggcccctgagcgcatcctggaccgctgcagcaccatcctggtgcagggcaaggagatccccctggacaaggagatgcaggatgccttccagaatgcctacatggagctgggcggcctgggggagcgggtgctgggcttctgccagctgaacctgcccagcggcaagttcccccggggcttcaagtttgacacagatgagctgaacttccccacagagaagctgtgctttgtgggcctgatgtccatgattgacccccccagggctgctgtgcctgatgctgtgggcaaatgtagatctgctggcatcaaggtgatcatggtgactggagaccaccccatcacagccaaggccatcgccaagggcgtgggcatcatcagcgagggcaatgagaccgtggaggacattgctgcccggctgaacatccccatgagccaggtgaacccccgggaggccaaggcctgtgtggtgcacggcagtgacctgaaggacatgaccagcgagcagctggatgagatcctgaagaaccacacagagatcgtgtttgcccggaccagcccccagcagaagctgatcatcgtggagggctgccagaggcagggcgccatcgtggccgtgactggagatggagtgaatgacagccctgccctgaagaaggctgacatcggcatcgccatgggcatcagcggcagtgatgtgtccaagcaggccgctgacatgatcctgctggatgacaactttgccagcatcgtgactggagtggaggagggccgcctcatctttgacaacctgaagaagagcatcgcctacaccctgaccagcaacatccctgagatcacccccttcctgctcttcatcatcgccaacatccccctgcccctgggcaccgtgaccatcctgtgcatcgacctgggcacagacatggtgcctgccatcagcctggcctatgaggccgctgagagtgacatcatgaagaggcagcccaggaacagccagacagacaagctggtgaatgaaagactcatctccatggcctacggccagattgaaaatggcttcctgcccagccggctgctgggcatccggctggactgggatgacaggaccatgaatgacctggaggacagctatggccaggagtggacctatgagcagaggaaggtggtggagttcacctgccacacagccttctttgccagcatcgtggtggtgcagtgggccgacctgatcatctgcaagaccaggaggaacagcgtcttccagcagggcatgaagaacaagatcctgatcttcggcctgctggaggagacagccctggccgccttcctgagctactgccccggcatgggcgtggccctgaggatgtaccccctgaaggtgacctggtggttctgtgccttcccctacagcctgctgatcttcatctatgatgaggtgaggaagctgatcctgcggcgctacccaggcggctgggtggagaaggagacctactactag

SEQ ID NO: 144519 - DNA, 819 bp, synthetic construct
  misc_feature 1..819: note = Description of Artificial Sequence: Synthetic coding sequence
  source 1..819: mol_type = other DNA
atggacagcttcaagaacatggtgccccagcaggccctggtgatccgggagggggagaagatgcagatcaatgctgaggaggtggtggtgggggacctggtggaggtgaagggcggggacagagtgcctgctgacctgcgcatcatcagcagccacggctgcaaggtggacaacagcagcctgaccggggagagcgagccccagaccaggagccctgagttcacccatgagaaccccctggagaccaggaacatctgcttcttcagcaccaactgtgtggagggcacagcccggggcatcgtcatcgccaccggggacagaacagtgatgggcagaattgccaccctggccagcggcctggaggtgggccgcacccccatcgccatggagattgagcacttcatccagctgatcactggagtggccgtgttcctgggcgtgtccttctttgtgctgagcctcatcctgggctacagctggctggaggccgtcatcttcctgattggcatcatcgtggccaacgtgcctgagggcctgctggccaccgtgacagtgtgcctgaccctgacagccaagaggatggccaggaagaactgcctggtgaagaacctggaggccgtggagaccctgggcagcaccagcaccatctgcagcgacaagacaggcaccctgacccagaacaggatgacagtggcccacatgtggtttgacaaccagatccatgaagctgacaccacagaggaccagagcggggactgggtgctgcagaggggctggattggcctggaggaggccgagggcagcggcgtggtgggctag

SEQ ID NO: 144520 - DNA, 3042 bp, synthetic construct
  misc_feature 1..3042: note = Description of Artificial Sequence: Synthetic coding sequence
  source 1..3042: mol_type = other DNA
atgggagacaagaaggatgacaaggacagccccaagaagaacaagggcaaggagcggcgggacctggatgacctgaagaaggaggtggccatgacagagcacaagatgtctgtggaggaggtgtgcaggaagtacaacacagactgtgtgcagggcctgacccacagcaaggcccaggagatcctggccagagatggccccaatgccctgaccccaccacccaccaccccagagtgggtgaagttctgccggcagctgtttggaggcttcagcatcctgctgtggattggagccatcctgtgcttcctggcctacggcatccaggccggcacagaagatgaccccagcggggacaacctgtacctgggcatcgtgctggccgctgtggtgatcatcaccggctgcttctcctactaccaggaggccaagagcagcaagatcatggagagcttcaagaacatggtgccccagcaggccctggtgatccgggagggggagaagatgcaggtgaatgctgaggaggtggtggtgggggacctggtggagatcaagggcggggacagagtgcctgctgacctgcgcatcatcagcgcccacggctgcaaggtggacaacagcagcctgactggagagagcgagccccagaccaggagcccagactgcacccatgacaaccccctggagaccaggaacatcaccttcttcagcaccaactgtgtggagggcacagcccggggcgtggtggtggccactggagacagaacagtgatgggccgcatcgccaccctggccagcggcctggaggtgggcaagacccccatcgccatcgagattgagcacttcatccagctgatcaccggggtggccgtgttcctgggcgtgtccttcttcatcctgagcctcatcctgggctacacctggctggaggccgtcatcttcctgattggcatcatcgtggccaacgtgcctgagggcctgctggccaccgtgacagtgtgcctgaccctgacagccaagaggatggccaggaagaactgcctggtgaagaacctggaggccgtggagaccctgggcagcaccagcaccatctgcagcgacaagacaggcaccctgacccagaacaggatgacagtggcccacatgtggtttgacaaccagatccacgaggccgacaccacagaggaccagagcggcaccagctttgacaagagcagccacacctgggtggccctgagccacatcgccggcctgtgcaacagagctgtgttcaagggcggccaggacaacatccctgtgctgaagagagatgtggccggagatgccagcgagagcgccctgctgaagtgcatcgagctgagcagcggctctgtgaagctgatgagggagaggaacaagaaggtggccgagatccccttcaacagcaccaacaagtaccagctgagcatccatgaaacagaggaccccaatgacaaccgctacctgctggtgatgaagggggcccctgagcgcatcctggaccgctgcagcaccatcctgctgcagggcaaggagcagcccctggatgaggagatgaaggaggccttccagaatgcctacctggagctgggcggcctgggggagcgggtgctgggcttctgccactactacctgcctgaggagcagttccccaagggctttgcctttgactgtgatgatgtgaacttcaccacagacaacctgtgctttgtgggcctgatgtccatgattgacccccccagggctgctgtgcctgatgctgtgggcaaatgtagatctgctggcatcaaggtgatcatggtgactggagaccaccccatcacagccaaggccatcgccaagggcgtgggcatcatcagcgagggcaatgagaccgtggaggacattgctgcccggctgaacatccctgtgtcccaggtgaaccccagagatgccaaggcctgtgtgatccacggcacagacctgaaggacttcaccagcgagcagattgatgagatcctgcagaaccacacagagatcgtgtttgcccggaccagcccccagcagaagctgatcatcgtggagggctgccagaggcagggcgccatcgtggccgtgactggagatggagtgaatgacagccctgccctgaagaaggctgacatcggcgtggccatgggcattgctggcagtgatgtgtccaagcaggccgctgacatgatcctgctggatgacaactttgccagcatcgtgactggagtggaggagggccgcctcatctttgacaacctgaagaagagcatcgcctacaccctgaccagcaacatccctgagatcacccccttcctgctcttcatcatggccaacatccccctgcccctgggcaccatcaccatcctgtgcatcgacctgggcacagacatggtgcctgccatcagcctggcctatgaggccgctgagagtgacatcatgaagaggcagcccaggaaccccaggacagacaagctggtgaatgaaagactcatctccatggcctacggccagatcggcatgatccaggccctgggcggcttcttctcctacttcgtcatcctggctgaaaatggcttcctgcccggcaacctggtgggcatccggctgaactgggatgacagaacagtgaatgacctggaggacagctatggccagcagtggacctatgagcagaggaaggtggtggagttcacctgccacacagccttctttgtgtccatcgtggtggtgcagtgggccgacctgatcatctgcaagaccaggagaaattctgtgttccagcagggcatgaagaacaagatcctgatcttcggcctgtttgaggagacagccctggccgccttcctgagctactgccccggcatggatgtggccctgaggatgtaccccctgaagcccagctggtggttctgtgccttcccctacagcttcctgatctttgtgtatgatgagatcaggaagctgatcctgcggagaaatcctgggggctgggtggagaaggagacctactactag

SEQ ID NO: 144521 - DNA, 2952 bp, synthetic construct
  misc_feature 1..2952: note = Description of Artificial Sequence: Synthetic coding sequence
  source 1..2952: mol_type = other DNA
atgacagagcacaagatgtctgtggaggaggtgtgcaggaagtacaacacagactgtgtgcagggcctgacccacagcaaggcccaggagatcctggccagagatggccccaatgccctgaccccaccacccaccaccccagagtgggtgaagttctgccggcagctgtttggaggcttcagcatcctgctgtggattggagccatcctgtgcttcctggcctacggcatccaggccggcacagaagatgaccccagcggggacaacctgtacctgggcatcgtgctggccgctgtggtgatcatcaccggctgcttctcctactaccaggaggccaagagcagcaagatcatggagagcttcaagaacatggtgccccagcaggccctggtgatccgggagggggagaagatgcaggtgaatgctgaggaggtggtggtgggggacctggtggagatcaagggcggggacagagtgcctgctgacctgcgcatcatcagcgcccacggctgcaaggtggacaacagcagcctgactggagagagcgagccccagaccaggagcccagactgcacccatgacaaccccctggagaccaggaacatcaccttcttcagcaccaactgtgtggagggcacagcccggggcgtggtggtggccactggagacagaacagtgatgggccgcatcgccaccctggccagcggcctggaggtgggcaagacccccatcgccatcgagattgagcacttcatccagctgatcaccggggtggccgtgttcctgggcgtgtccttcttcatcctgagcctcatcctgggctacacctggctggaggccgtcatcttcctgattggcatcatcgtggccaacgtgcctgagggcctgctggccaccgtgacagtgtgcctgaccctgacagccaagaggatggccaggaagaactgcctggtgaagaacctggaggccgtggagaccctgggcagcaccagcaccatctgcagcgacaagacaggcaccctgacccagaacaggatgacagtggcccacatgtggtttgacaaccagatccacgaggccgacaccacagaggaccagagcggcaccagctttgacaagagcagccacacctgggtggccctgagccacatcgccggcctgtgcaacagagctgtgttcaagggcggccaggacaacatccctgtgctgaagagagatgtggccggagatgccagcgagagcgccctgctgaagtgcatcgagctgagcagcggctctgtgaagctgatgagggagaggaacaagaaggtggccgagatccccttcaacagcaccaacaagtaccagctgagcatccatgaaacagaggaccccaatgacaaccgctacctgctggtgatgaagggggcccctgagcgcatcctggaccgctgcagcaccatcctgctgcagggcaaggagcagcccctggatgaggagatgaaggaggccttccagaatgcctacctggagctgggcggcctgggggagcgggtgctgggcttctgccactactacctgcctgaggagcagttccccaagggctttgcctttgactgtgatgatgtgaacttcaccacagacaacctgtgctttgtgggcctgatgtccatgattgacccccccagggctgctgtgcctgatgctgtgggcaaatgtagatctgctggcatcaaggtgatcatggtgactggagaccaccccatcacagccaaggccatcgccaagggcgtgggcatcatcagcgagggcaatgagaccgtggaggacattgctgcccggctgaacatccctgtgtcccaggtgaaccccagagatgccaaggcctgtgtgatccacggcacagacctgaaggacttcaccagcgagcagattgatgagatcctgcagaaccacacagagatcgtgtttgcccggaccagcccccagcagaagctgatcatcgtggagggctgccagaggcagggcgccatcgtggccgtgactggagatggagtgaatgacagccctgccctgaagaaggctgacatcggcgtggccatgggcattgctggcagtgatgtgtccaagcaggccgctgacatgatcctgctggatgacaactttgccagcatcgtgactggagtggaggagggccgcctcatctttgacaacctgaagaagagcatcgcctacaccctgaccagcaacatccctgagatcacccccttcctgctcttcatcatggccaacatccccctgcccctgggcaccatcaccatcctgtgcatcgacctgggcacagacatggtgcctgccatcagcctggcctatgaggccgctgagagtgacatcatgaagaggcagcccaggaaccccaggacagacaagctggtgaatgaaagactcatctccatggcctacggccagatcggcatgatccaggccctgggcggcttcttctcctacttcgtcatcctggctgaaaatggcttcctgcccggcaacctggtgggcatccggctgaactgggatgacagaacagtgaatgacctggaggacagctatggccagcagtggacctatgagcagaggaaggtggtggagttcacctgccacacagccttctttgtgtccatcgtggtggtgcagtgggccgacctgatcatctgcaagaccaggagaaattctgtgttccagcagggcatgaagaacaagatcctgatcttcggcctgtttgaggagacagccctggccgccttcctgagctactgccccggcatggatgtggccctgaggatgtaccccctgaagcccagctggtggttctgtgccttcccctacagcttcctgatctttgtgtatgatgagatcaggaagctgatcctgcggagaaatcctgggggctgggtggagaaggagacctactactag

SEQ ID NO: 144522 - DNA, 3681 bp, synthetic construct
  misc_feature 1..3681: note = Description of Artificial Sequence: Synthetic coding sequence
  source 1..3681: mol_type = other DNA
atgggagacaagaaggatgacaaggacagccccaagaagaacaagggcaaggagcggcgggacctggatgacctgaagaaggaggtggccatgacagagcacaagatgtctgtggaggaggtgtgcaggaagtacaacacagactgtgtgcagggcctgacccacagcaaggcccaggagatcctggccagagatggccccaatgccctgaccccaccacccaccaccccagagtgggtgaagttctgccggcagctgtttggaggcttcagcatcctgctgtggattggagccatcctgtgcttcctggcctacggcatccaggccggcacagaagatgaccccagcggggacaacctgtacctgggcatcgtgctggccgctgtggtgatcatcaccggctgcttctcctactaccaggaggccaagagcagcaagatcatggagagcttcaagaacatggtgccccagcaggccctggtgatccgggagggggagaagatgcaggtgaatgctgaggaggtggtggtgggggacctggtggagatcaagggcggggacagagtgcctgctgacctgcgcatcatcagcgcccacggctgcaaggtggacaacagcagcctgactggagagagcgagccccagaccaggagcccagactgcacccatgacaaccccctggagaccaggaacatcaccttcttcagcaccaactgtgtggagggcacagcccggggcgtggtggtggccactggagacagaacagtgatgggccgcatcgccaccctggccagcggcctggaggtgggcaagacccccatcgccatcgagattgagcacttcatccagctgatcaccggggtggccgtgttcctgggcgtgtccttcttcatcctgagcctcatcctgggctacacctggctggaggccgtcatcttcctgattggcatcatcgtggccaacgtgcctgagggcctgctggccaccgtgacagtgtgcctgaccctgacagccaagaggatggccaggaagaactgcctggtgaagaacctggaggccgtggagaccctgggcagcaccagcaccatctgcagcgacaagacaggcaccctgacccagaacaggatgacagtggcccacatgtggtttgacaaccagatccacgaggccgacaccacagaggaccagagcggcaccagctttgacaagagcagccacacctgggtggccctgagccacatcgccggcctgtgcaacagagctgtgttcaagggcggccaggacaacatccctgtgctgaagagagatgtggccggagatgccagcgagagcgccctgctgaagtgcatcgagctgagcagcggctctgtgaagctgatgagggagaggaacaagaaggtggccgagatccccttcaacagcaccaacaagtaccagctgagcatccatgaaacagaggaccccaatgacaaccgctacctgctggtgatgaagggggcccctgagcgcatcctggaccgctgcagcaccatcctgctgcagggcaaggagcagcccctggatgaggagatgaaggaggccttccagaatgcctacctggagctgggcggcctgggggagcgggtgctgggcttctgccactactacctgcctgaggagcagttccccaagggctttgcctttgactgtgatgatgtgaacttcaccacagacaacctgtgctttgtgggcctgatgtccatgattgacccccccagggctgctgtgcctgatgctgtgggcaaatgtagatctgctggcatcaaggtgatcatggtgactggagaccaccccatcacagccaaggccatcgccaagggcgtgggcatcatcagcgagggcaatgagaccgtggaggacattgctgcccggctgaacatccctgtgtcccaggtgaaccccagagatgccaaggcctgtgtgatccacggcacagacctgaaggacttcaccagcgagcagattgatgagatcctgcagaaccacacagagatcgtgtttgcccggaccagcccccagcagaagctgatcatcgtggagggctgccagaggcagggcgccatcgtggccgtgactggagatggagtgaatgacagccctgccctgaagaaggctgacatcggcgtggccatgggcattgctggcagtgatgtgtccaagcaggccgctgacatgatcctgctggatgacaactttgccagcatcgtgactggagtggaggagggccgcctcatctttgacaacctgaagaagagcatcgcctacaccctgaccagcaacatccctgagatcacccccttcctgctcttcatcatggccaacatccccctgcccctgggcaccatcaccatcctgtgcatcgacctgggcacagacatggtgcctgccatcagcctggcctatgaggccgctgagagtgacatcatgaagaggcagcccaggaaccccaggacagacaagctggtgaatgaaagactcatctccatggcctacggccagatcggcatgatccaggccctgggcggcttcttctcctacttcgtcatcctggctgaaaatggcttcctgcccggcaacctggtgggcatccggctgaactgggatgacagaacagtgaatgacctggaggacagctatggccagcagtggacctatgagcagaggaaggtggtggagttcacctgccacacagccttctttgtgtccatcgtggtggtgcagtgggccgacctgatcatctgcaagaccaggagaaattctgtgttccagcagggcatgaagaacaagatcctgatcttcggcctgtttgaggagacagccctggccgccttcctgagctactgccccggcatggatgtggccctgaggatgtaccccctgaagcccagctggtggttctgtgccttcccctacagcttcctgatctttgtgtatgatgagatcaggaagctgatcctgcggagaaatcctggaggagagggcgcccggcagggcagccggggcggccgcggggctgctggcagccaggccgccggcccccggctgcccagcccctgctggatggccctgcccccaggcagccacagcagcctgagcagccacctgagcggccaccccctgtgcctgctgaccggcctgtgcctgtgtggcttcctggtgtccctgcccctgtgccccagcctgtgctgggccgcccggctggcctgcctgagccccagcctgaccctgagcctgtccttcctgctgtgcctgagccggctgggcggggagggcaacctgctgctgaccagcgccccaccccaccggcccagcctgcccaggcctcctggccctggcccccccctgtctgtgccccccatcctgtacagcggcggccgcagccccctcttcctgtggccccacctgggcccccaccccctgcactacctgctgcccccacccctgtggctggccagcctgccctgccccaagcccctgagcagcctcttctctgtgtctgtgtccctgcccctgctgacccccctgagcatccccccagccccagccaccagcctgggcagcttcctgctgcccttcagccccccagcagatgccatcagcggcagcggccagctgagcaacatctctgtgggccgggagtag

SEQ ID NO: 144523 - DNA, 444 bp, synthetic construct
  misc_feature 1..444: note = Description of Artificial Sequence: Synthetic coding sequence
  source 1..444: mol_type = other DNA
atgggcagcggcggcagtgacagctacagaattgccaccagccaggacaagaaggatgacaaggacagccccaagaagaacaagggcaaggagcggcgggacctggatgacctgaagaaggaggtggccatgacagagcacaagatgtctgtggaggaggtgtgcaggaagtacaacacagactgtgtgcagggcctgacccacagcaaggcccaggagatcctggccagagatggccccaatgccctgaccccaccacccaccaccccagagtgggtgaagttctgccggcagctgtttggaggcttcagcatcctgctgtggattggagccatcctgtgcttcctggcctacggcatccaggccggcacagaagatgaccccagcggggacaacctgtacctgggcatcgtgctggccgctgtggtgatcatcaccggctag

SEQ ID NO: 144524 - DNA, 2049 bp, synthetic construct
  misc_feature 1..2049: note = Description of Artificial Sequence: Synthetic coding sequence
  source 1..2049: mol_type = other DNA
atgggccgcatcgccaccctggccagcggcctggaggtgggcaagacccccatcgccatcgagattgagcacttcatccagctgatcaccggggtggccgtgttcctgggcgtgtccttcttcatcctgagcctcatcctgggctacacctggctggaggccgtcatcttcctgattggcatcatcgtggccaacgtgcctgagggcctgctggccaccgtgacagtgtgcctgaccctgacagccaagaggatggccaggaagaactgcctggtgaagaacctggaggccgtggagaccctgggcagcaccagcaccatctgcagcgacaagacaggcaccctgacccagaacaggatgacagtggcccacatgtggtttgacaaccagatccacgaggccgacaccacagaggaccagagcggcaccagctttgacaagagcagccacacctgggtggccctgagccacatcgccggcctgtgcaacagagctgtgttcaagggcggccaggacaacatccctgtgctgaagagagatgtggccggagatgccagcgagagcgccctgctgaagtgcatcgagctgagcagcggctctgtgaagctgatgagggagaggaacaagaaggtggccgagatccccttcaacagcaccaacaagtaccagctgagcatccatgaaacagaggaccccaatgacaaccgctacctgctggtgatgaagggggcccctgagcgcatcctggaccgctgcagcaccatcctgctgcagggcaaggagcagcccctggatgaggagatgaaggaggccttccagaatgcctacctggagctgggcggcctgggggagcgggtgctgggcttctgccactactacctgcctgaggagcagttccccaagggctttgcctttgactgtgatgatgtgaacttcaccacagacaacctgtgctttgtgggcctgatgtccatgattgacccccccagggctgctgtgcctgatgctgtgggcaaatgtagatctgctggcatcaaggtgatcatggtgactggagaccaccccatcacagccaaggccatcgccaagggcgtgggcatcatcagcgagggcaatgagaccgtggaggacattgctgcccggctgaacatccctgtgtcccaggtgaaccccagagatgccaaggcctgtgtgatccacggcacagacctgaaggacttcaccagcgagcagattgatgagatcctgcagaaccacacagagatcgtgtttgcccggaccagcccccagcagaagctgatcatcgtggagggctgccagaggcagggcgccatcgtggccgtgactggagatggagtgaatgacagccctgccctgaagaaggctgacatcggcgtggccatgggcattgctggcagtgatgtgtccaagcaggccgctgacatgatcctgctggatgacaactttgccagcatcgtgactggagtggaggagggccgcctcatctttgacaacctgaagaagagcatcgcctacaccctgaccagcaacatccctgagatcacccccttcctgctcttcatcatggccaacatccccctgcccctgggcaccatcaccatcctgtgcatcgacctgggcacagacatggtgcctgccatcagcctggcctatgaggccgctgagagtgacatcatgaagaggcagcccaggaaccccaggacagacaagctggtgaatgaaagactcatctccatggcctacggccagatcggcatgatccaggccctgggcggcttcttctcctacttcgtcatcctggctgaaaatggcttcctgcccggcaacctggtgggcatccggctgaactgggatgacagaacagtgaatgacctggaggacagctatggccagcagtggacctatgagcagaggaaggtggtggagttcacctgccacacagccttctttgtgtccatcgtggtggtgcagtgggccgacctgatcatctgcaagaccaggaggaccaggagcagcagccgggcctag

SEQ ID NO: 144525 - DNA, 3075 bp, synthetic construct
  misc_feature 1..3075: note = Description of Artificial Sequence: Synthetic coding sequence
  source 1..3075: mol_type = other DNA
atgggcggctgggaggaggagaggaacagaagagccacagacaagaaggatgacaaggacagccccaagaagaacaagggcaaggagcggcgggacctggatgacctgaagaaggaggtggccatgacagagcacaagatgtctgtggaggaggtgtgcaggaagtacaacacagactgtgtgcagggcctgacccacagcaaggcccaggagatcctggccagagatggccccaatgccctgaccccaccacccaccaccccagagtgggtgaagttctgccggcagctgtttggaggcttcagcatcctgctgtggattggagccatcctgtgcttcctggcctacggcatccaggccggcacagaagatgaccccagcggggacaacctgtacctgggcatcgtgctggccgctgtggtgatcatcaccggctgcttctcctactaccaggaggccaagagcagcaagatcatggagagcttcaagaacatggtgccccagcaggccctggtgatccgggagggggagaagatgcaggtgaatgctgaggaggtggtggtgggggacctggtggagatcaagggcggggacagagtgcctgctgacctgcgcatcatcagcgcccacggctgcaaggtggacaacagcagcctgaccggggagagcgagccccagaccaggagcccagactgcacccatgacaaccccctggagaccaggaacatcaccttcttcagcaccaactgtgtggagggcacagcccggggcgtggtggtggccaccggggacagaacagtgatgggcagaattgccaccctggccagcggcctggaggtgggcaagacccccatcgccattgaaattgagcacttcatccagctgatcactggagtggccgtgttcctgggcgtgtccttcttcatcctgagcctcatcctgggctacacctggctggaggccgtcatcttcctgattggcatcatcgtggccaacgtgcctgagggcctgctggccaccgtgacagtgtgcctgaccctgacagccaagaggatggccaggaagaactgcctggtgaagaacctggaggccgtggagaccctgggcagcaccagcaccatctgcagcgacaagacaggcaccctgacccagaacaggatgacagtggcccacatgtggtttgacaaccagatccatgaagctgacaccacagaggaccagagcggcaccagctttgacaagagcagccacacctgggtggccctgagccacatcgccggcctgtgcaacagagctgtgttcaagggcggccaggacaacatccctgtgctgaagagagatgtggccggagatgccagcgagagcgccctgctgaagtgcatcgagctgagcagcggctctgtgaagctgatgagggagaggaacaagaaggtggccgagatccccttcaacagcaccaacaagtaccagctgagcatccacgagacagaggaccccaatgacaaccgctacctgctggtgatgaagggggcccctgagcgcatcctggaccgctgcagcaccatcctgctgcagggcaaggagcagcccctggatgaggagatgaaggaggccttccagaatgcctacctggagctgggcggcctgggggagcgggtgctgggcttctgccactactacctgcctgaggagcagttccccaagggctttgcctttgactgtgatgatgtgaacttcaccacagacaacctgtgctttgtgggcctgatgtccatgattgatcctcccagggctgctgtgcctgatgctgtgggcaagtgccgctctgctggcatcaaggtgatcatggtgactggagaccaccccatcacagccaaggccatcgccaagggcgtgggcatcatcagcgagggcaatgaaacagtggaggacattgctgcccggctgaacatccctgtgtcccaggtgaaccccagagatgccaaggcctgcgtcatccatggaacagacctgaaggacttcaccagcgagcagattgatgagatcctgcagaaccacacagaaattgtgtttgcccggaccagcccccagcagaagctgatcatcgtggagggctgccagaggcagggcgccatcgtggccgtgactggagatggagtgaatgacagccctgccctgaagaaggctgacattggagtggccatgggcattgctggcagtgatgtgtccaagcaggccgctgacatgatcctgctggatgacaactttgccagcatcgtgactggagtggaggagggccgcctcatctttgacaacctgaagaagagcatcgcctacaccctgaccagcaacatccctgagatcacccccttcctgctcttcatcatggccaacatccccctgcccctgggcaccatcaccatcctgtgcatcgacctgggcacagacatggtgcctgccatcagcctggcctatgaagctgctgagagtgacatcatgaagaggcagcccaggaaccccaggacagacaagctggtgaatgaaagactcatctccatggcctacggccagatcggcatgatccaggccctgggcggcttcttctcctactttgtgatcctggccgagaatggcttcctgcccggcaacctggtgggcatccggctgaactgggatgacagaacagtgaatgacctggaggacagctatggccagcagtggacctatgagcagaggaaggtggtggagttcacctgccacacagccttctttgtgtccatcgtggtggtgcagtgggccgacctgatcatctgcaagaccaggaggaacagcgtcttccagcagggcatgaagaacaagatcctgatcttcggcctgtttgaggagacagccctggccgccttcctgagctactgccccggcatggatgtggccctgaggatgtaccccctgaagcccagctggtggttctgtgccttcccctacagcttcctgatctttgtgtatgatgagatcaggaagctgatcctgcggaggaaccctgggggctgggtggagaaggagacctactactag

SEQ ID NO: 144526 - DNA, 3081 bp, synthetic construct
  misc_feature 1..3081: note = Description of Artificial Sequence: Synthetic coding sequence
  source 1..3081: mol_type = other DNA
atgggcagcggcggcagtgacagctacagaattgccaccagccaggacaagaaggatgacaaggacagccccaagaagaacaagggcaaggagcggcgggacctggatgacctgaagaaggaggtggccatgacagagcacaagatgtctgtggaggaggtgtgcaggaagtacaacacagactgtgtgcagggcctgacccacagcaaggcccaggagatcctggccagagatggccccaatgccctgaccccaccacccaccaccccagagtgggtgaagttctgccggcagctgtttggaggcttcagcatcctgctgtggattggagccatcctgtgcttcctggcctacggcatccaggccggcacagaagatgaccccagcggggacaacctgtacctgggcatcgtgctggccgctgtggtgatcatcaccggctgcttctcctactaccaggaggccaagagcagcaagatcatggagagcttcaagaacatggtgccccagcaggccctggtgatccgggagggggagaagatgcaggtgaatgctgaggaggtggtggtgggggacctggtggagatcaagggcggggacagagtgcctgctgacctgcgcatcatcagcgcccacggctgcaaggtggacaacagcagcctgaccggggagagcgagccccagaccaggagcccagactgcacccatgacaaccccctggagaccaggaacatcaccttcttcagcaccaactgtgtggagggcacagcccggggcgtggtggtggccaccggggacagaacagtgatgggcagaattgccaccctggccagcggcctggaggtgggcaagacccccatcgccattgaaattgagcacttcatccagctgatcactggagtggccgtgttcctgggcgtgtccttcttcatcctgagcctcatcctgggctacacctggctggaggccgtcatcttcctgattggcatcatcgtggccaacgtgcctgagggcctgctggccaccgtgacagtgtgcctgaccctgacagccaagaggatggccaggaagaactgcctggtgaagaacctggaggccgtggagaccctgggcagcaccagcaccatctgcagcgacaagacaggcaccctgacccagaacaggatgacagtggcccacatgtggtttgacaaccagatccatgaagctgacaccacagaggaccagagcggcaccagctttgacaagagcagccacacctgggtggccctgagccacatcgccggcctgtgcaacagagctgtgttcaagggcggccaggacaacatccctgtgctgaagagagatgtggccggagatgccagcgagagcgccctgctgaagtgcatcgagctgagcagcggctctgtgaagctgatgagggagaggaacaagaaggtggccgagatccccttcaacagcaccaacaagtaccagctgagcatccacgagacagaggaccccaatgacaaccgctacctgctggtgatgaagggggcccctgagcgcatcctggaccgctgcagcaccatcctgctgcagggcaaggagcagcccctggatgaggagatgaaggaggccttccagaatgcctacctggagctgggcggcctgggggagcgggtgctgggcttctgccactactacctgcctgaggagcagttccccaagggctttgcctttgactgtgatgatgtgaacttcaccacagacaacctgtgctttgtgggcctgatgtccatgattgatcctcccagggctgctgtgcctgatgctgtgggcaagtgccgctctgctggcatcaaggtgatcatggtgactggagaccaccccatcacagccaaggccatcgccaagggcgtgggcatcatcagcgagggcaatgaaacagtggaggacattgctgcccggctgaacatccctgtgtcccaggtgaaccccagagatgccaaggcctgcgtcatccatggaacagacctgaaggacttcaccagcgagcagattgatgagatcctgcagaaccacacagaaattgtgtttgcccggaccagcccccagcagaagctgatcatcgtggagggctgccagaggcagggcgccatcgtggccgtgactggagatggagtgaatgacagccctgccctgaagaaggctgacattggagtggccatgggcattgctggcagtgatgtgtccaagcaggccgctgacatgatcctgctggatgacaactttgccagcatcgtgactggagtggaggagggccgcctcatctttgacaacctgaagaagagcatcgcctacaccctgaccagcaacatccctgagatcacccccttcctgctcttcatcatggccaacatccccctgcccctgggcaccatcaccatcctgtgcatcgacctgggcacagacatggtgcctgccatcagcctggcctatgaagctgctgagagtgacatcatgaagaggcagcccaggaaccccaggacagacaagctggtgaatgaaagactcatctccatggcctacggccagatcggcatgatccaggccctgggcggcttcttctcctactttgtgatcctggccgagaatggcttcctgcccggcaacctggtgggcatccggctgaactgggatgacagaacagtgaatgacctggaggacagctatggccagcagtggacctatgagcagaggaaggtggtggagttcacctgccacacagccttctttgtgtccatcgtggtggtgcagtgggccgacctgatcatctgcaagaccaggaggaacagcgtcttccagcagggcatgaagaacaagatcctgatcttcggcctgtttgaggagacagccctggccgccttcctgagctactgccccggcatggatgtggccctgaggatgtaccccctgaagcccagctggtggttctgtgccttcccctacagcttcctgatctttgtgtatgatgagatcaggaagctgatcctgcggaggaaccctgggggctgggtggagaaggagacctactactag

SEQ ID NO: 144527 - DNA, 3090 bp, synthetic construct
  misc_feature 1..3090: note = Description of Artificial Sequence: Synthetic coding sequence
  source 1..3090: mol_type = other DNA
atgggcctgtggggcaagaagggcaccgtggcccctcatgaccagagccccaggagaagacccaagaagggcctcatcaagaagaagatggtgaagcgggagaagcagaagaggaacatggaggagctgaagaaggaggtggtgatggatgaccacaagctgaccctggaggagctgagcaccaagtacagcgtggacctgaccaagggccacagccaccagagggccaaggagatcctgacccggggcggccccaacacagtgaccccaccacccaccaccccagagtgggtgaagttctgcaagcagctgtttggaggcttcagcctgctgctgtggacaggagccatcctgtgctttgtggcctacagcatccagatctacttcaatgaggagcccaccaaggacaacctgtacctgagcatcgtgctgtctgtggtggtgattgtgacaggctgcttctcctactaccaggaggccaagagcagcaagatcatggagagcttcaagaacatggtgccccagcaggccctggtgatccggggcggggagaagatgcagatcaacgtgcaggaggtggtgctgggggacctggtggagatcaagggcggggacagagtgcctgctgacctgcggctcatcagcgcccagggctgcaaggtggacaacagcagcctgactggagagagcgagccccagagccgcagcccagacttcacccatgagaaccccctggagaccaggaacatctgcttcttcagcaccaactgtgtggagggcacagcccggggcatcgtgattgccactggagacagcacagtgatgggccgcatcgccagcctgaccagcggcctggccgtgggccagacccccatcgctgctgagattgagcacttcatccacctgatcaccgtggtggccgtgttcctgggcgtgaccttctttgccctgagcctgctgctgggctacggctggctggaggccatcatcttcctgattggcatcatcgtggccaacgtgcctgagggcctgctggccaccgtgacagtgtgcctgaccctgacagccaagaggatggccaggaagaactgcctggtgaagaacctggaggccgtggagaccctgggcagcaccagcaccatctgcagcgacaagacaggcaccctgacccagaacaggatgacagtggcccacatgtggtttgacatgacagtgtatgaggccgacaccacagaggagcagacaggcaagaccttcaccaagagcagtgacacctggttcatgctggccagaattgctggcctgtgcaacagagctgacttcaaggccaaccaggagatcctgcccatcgccaagagggccaccactggagatgccagcgagagcgccctgctgaagttcatcgagcagagctacagctctgtggccgagatgagggagaagaaccccaaggtggccgagatccccttcaacagcaccaacaagtaccagatgagcatccacctgcgggaggacagcagccagacccacgtgctgatgatgaagggggcccctgagcgcatcctggagttctgcagcaccttcctgctgaatggccaggagtacagcatgaatgatgagatgaaggaggccttccagaatgcctacctggagctgggcggcctgggggagcgggtgctgggcttctgcttcctgaacctgcccagcagcttcagcaagggcttccccttcaacacagatgagatcaacttccccatggacaacctgtgctttgtgggcctcatctccatgattgacccccccagggctgctgtgcctgatgctgtgtccaaatgtagatctgctggcatcaaggtgatcatggtgactggagaccaccccatcacagccaaggccatcgccaagggcgtgggcatcatcagcgagggcacagaaacagctgaggaggtggccgcccggctgaagatccccatcagcaaggtggatgccagcgctgccaaggccatcgtggtgcacggggctgagctgaaggacatccagagcaagcagctggaccagatcctgcagaaccaccctgagatcgtgtttgcccggaccagcccccagcagaagctgatcatcgtggagggctgccagaggctgggcgctgtggtggccgtgactggagatggagtgaatgacagccctgccctgaagaaggctgacatcggcatcgccatgggcatcagcggcagtgatgtgtccaagcaggccgctgacatgatcctgctggatgacaactttgccagcatcgtgactggagtggaggagggccgcctcatctttgacaacctgaagaagagcatcatgtacaccctgaccagcaacatccctgagatcacccccttcctgatgttcatcatcctgggcatccccctgcccctgggcaccatcaccatcctgtgcatcgacctgggcacagacatggtgcctgccatcagcctggcctatgagagcgctgagagtgacatcatgaagaggctgcccaggaaccccaagacagacaacctggtgaaccacaggctcatcggcatggcctacggccagatcggcatgatccaggccctggccggcttcttcacctacttcgtcatcctggctgaaaatggcttccggcctgtggacctgctgggcatccggctgcactgggaggacaagtacctgaatgacctggaggacagctatggccagcagtggacctatgagcagaggaaggtggtggagttcacctgccagacagccttctttgtgaccatcgtggtggtgcagtgggccgacctgatcatcagcaagaccaggaggaacagcctcttccagcagggcatgaggaacaaggtgctgatcttcggcatcctggaggagaccctgctggccgccttcctgagctacaccccaggcatggatgtggccctgaggatgtaccccctgaagatcacctggtggctgtgtgccatcccctacagcatcctgatctttgtgtatgatgagatcaggaagctgctgatccggcagcacccagatggctgggtggagcgggagacctactactag

SEQ ID NO: 144528 - DNA, 498 bp, synthetic construct
  misc_feature 1..498: note = Description of Artificial Sequence: Synthetic coding sequence
  source 1..498: mol_type = other DNA
atgatccaggccctggccggcttcttcacctacttcgtcatcctggctgaaaatggcttccggcctgtggacctgctgggcatccggctgcactgggaggacaagtacctgaatgacctggaggacagctatggccagcagtggacctatgagcagaggaaggtggtggagttcacctgccagacagccttctttgtgaccatcgtggtggtgcagtgggccgacctgatcatcagcaagaccaggaggaacagcctcttccagcagggcatgaggaacaaggtgctgatcttcggcatcctggaggagaccctgctggccgccttcctgagctacaccccaggcatggatgtggccctgaggatgtaccccctgaagatcacctggtggctgtgtgccatcccctacagcatcctgatctttgtgtatgatgagatcaggaagctgctgatccggcagcacccagatggctgggtggagcgggagacctactactag

SEQ ID NO: 144529 - DNA, 888 bp, synthetic construct
  misc_feature 1..888: note = Description of Artificial Sequence: Synthetic coding sequence
  source 1..888: mol_type = other DNA
atgggcaagaggaagtgcagccctgccagccagagcctcttcctgttccagttccagaagatggagctgaagttcaagatcctgctcttctacgtgatcttctacggctgcctggccggcatcttcatcggcaccatccaggtgatgctgctgaccatcagcgagttcaagcccacctaccaggacagagtggcccctcctggcctgacccagatcccccagatccagaagacagagatctccttccggcccaatgaccccaagagctatgaggcctacgtgctgaacatcgtgcgcttcctggagaagtacaaggacagcgcccagagagatgacatgatctttgaggactgtggagatgtgcccagcgagcccaaggagcggggggacttcaaccacgagcggggggagaggaaggtgtgccgcttcaagctggagtggctgggcaactgcagcggcctgaatgatgagacctacggctacaaggagggcaagccctgcatcatcatcaagctgaacagagtgctgggcttcaagcccaagccacccaagaatgaaagcctggagacctaccctgtgatgaagtacaaccccaacgtgctgcctgtgcagtgcaccgggaagagagatgaggacaaggacaaggtgggcaatgtggagtacttcggcctgggcaacagccctggcttccccctgcagtactacccctactacggcaagctgctgcagcccaagtacctgcagcccctgctggccgtgcagttcaccaacctgaccatggacacagagatcagaattgagtgcaaggcctatggagaaaatattggctacagcgagaaggaccgcttccagggccgctttgatgtgaagattgaggtgaagagctag

SEQ ID NO: 144530 - DNA, 912 bp, synthetic construct
  misc_feature 1..912: note = Description of Artificial Sequence: Synthetic coding sequence
  source 1..912: mol_type = other DNA
atggcccggggcaaggccaaggaggagggctcctggaagaagttcatctggaacagcgagaagaaggagttcctgggccgcactggaggctcctggttcaagatcctgctcttctacgtgatcttctacggctgcctggccggcatcttcatcggcaccatccaggtgatgctgctgaccatcagcgagttcaagcccacctaccaggacagagtggcccctcctggcctgacccagatcccccagatccagaagacagagatctccttccggcccaatgaccccaagagctatgaggcctacgtgctgaacatcgtgcgcttcctggagaagtacaaggacagcgcccagagagatgacatgatctttgaggactgtggagatgtgcccagcgagcccaaggagcggggggacttcaaccacgagcggggggagaggaaggtgtgccgcttcaagctggagtggctgggcaactgcagcggcctgaatgatgagacctacggctacaaggagggcaagccctgcatcatcatcaagctgaacagagtgctgggcttcaagcccaagccacccaagaatgaaagcctggagacctaccctgtgatgaagtacaaccccaacgtgctgcctgtgcagtgcaccgggaagagagatgaggacaaggacaaggtgggcaatgtggagtacttcggcctgggcaacagccctggcttccccctgcagtactacccctactacggcaagctgctgcagcccaagtacctgcagcccctgctggccgtgcagttcaccaacctgaccatggacacagagatcagaattgagtgcaaggcctatggagaaaatattggctacagcgagaaggaccgcttccagggccgctttgatgtgaagattgaggtgaagagctag

SEQ ID NO: 144531 - DNA, 912 bp, synthetic construct; identical to SEQ ID NO: 144530
  misc_feature 1..912: note = Description of Artificial Sequence: Synthetic coding sequence
  source 1..912: mol_type = other DNA

SEQ ID NO: 144532 - DNA, 744 bp, synthetic construct
  misc_feature 1..744: note = Description of Artificial Sequence: Synthetic coding sequence
  source 1..744: mol_type = other DNA
atgctgctgaccatcagcgagttcaagcccacctaccaggacagagtggcccctcctggcctgacccagatcccccagatccagaagacagagatctccttccggcccaatgaccccaagagctatgaggcctacgtgctgaacatcgtgcgcttcctggagaagtacaaggacagcgcccagagagatgacatgatctttgaggactgtggagatgtgcccagcgagcccaaggagcggggggacttcaaccacgagcggggggagaggaaggtgtgccgcttcaagctggagtggctgggcaactgcagcggcctgaatgatgagacctacggctacaaggagggcaagccctgcatcatcatcaagctgaacagagtgctgggcttcaagcccaagccacccaagaatgaaagcctggagacctaccctgtgatgaagtacaaccccaacgtgctgcctgtgcagtgcaccgggaagagagatgaggacaaggacaaggtgggcaatgtggagtacttcggcctgggcaacagccctggcttccccctgcagtactacccctactacggcaagctgctgcagcccaagtacctgcagcccctgctggccgtgcagttcaccaacctgaccatggacacagagatcagaattgagtgcaaggcctatggagaaaatattggctacagcgagaaggaccgcttccagggccgctttgatgtgaagattgaggtgaagagctag

SEQ ID NO: 144533 - DNA, 873 bp, synthetic construct
  misc_feature 1..873: note = Description of Artificial Sequence: Synthetic coding sequence
  source 1..873: mol_type = other DNA
atggtgatccagaaggagaagaagagctgtggccaggtggtggaggagtggaaggagtttgtgtggaaccccaggacccaccagttcatgggccgcacaggcacctcctgggccttcatcctgctcttctacctggtgttctacggcttcctgacagccatgttcaccctgaccatgtgggtgatgctgcagacagtgtctgaccacacccccaagtaccaggaccggctggccaccccaggcctgatgatccggcccaagacagagaacctggatgtgattgtgaatgtgtctgacacagagagctgggaccagcacgtgcagaagctgaacaagttcctggagccctacaatgacagcatccaggcccagaagaatgatgtgtgcaggcctggccgctactatgagcagcctgacaacggggtgctgaactaccccaagagggcctgccagttcaacagaacccagctgggcaactgcagcggcattggagacagcacccactacggctacagcacaggccagccctgtgtgttcatcaagatgaacagagtcatcaacttctacgccggggccaaccagagcatgaatgtgacctgtgccggcaagagagatgaagatgctgagaacctgggcaactttgtgatgtttcctgccaacggcaacatcgacctgatgtacttcccctactacggcaagaagttccacgtgaactacacccagcccctggtggccgtgaagttcctgaatgtgacccccaacgtggaggtgaatgtggagtgccgcatcaatgctgccaacatcgccacagatgatgagcgggacaagtttgctggccgggtggccttcaagctgcgcatcaacaagacctag

SEQ ID NO: 144534 - DNA, 840 bp, synthetic construct
  misc_feature 1..840: note = Description of Artificial Sequence: Synthetic coding sequence
  source 1..840: mol_type = other DNA
atgaccaagaatgagaagaagagcctgaaccagagcctggccgagtggaagctgttcatctacaaccccaccactggagagttcctgggccgcacagccaagtcctggggcctcatcctgctcttctacctggtgttctacggcttcctggccgccctcttctccttcaccatgtgggtgatgctgcagaccctgaatgatgaggtgcccaagtacagagaccagatccccagccctggcctgatggtgttccccaagcctgtgacagccctggagtacaccttcagcagaagtgaccccaccagctatgccggctacatcgaggacctgaagaagttcctgaagccctacaccctggaggagcagaagaacctgactgtgtgcccagatggagccctgtttgagcagaagggccctgtgtatgtggcctgccagttccccatcagcctgctgcaggcctgcagcggcatgaatgaccctgactttggctacagccagggcaacccctgcatcctggtgaagatgaaccgcatcatcggcctgaagccagagggcgtgcccagaattgactgtgtgtccaagaatgaagacatccccaacgtggccgtgtacccccacaacggcatgattgacctgaagtacttcccctactacggcaagaagctgcacgtgggctacctgcagcccctggtggccgtgcaggtgtcctttgcccccaacaacacaggcaaggaggtgacagtggagtgcaagattgatggcagcgccaacctgaagagccaggatgaccgggacaagttcctgggccgggtgatgttcaagatcacagcccgggcctag

SEQ ID NO: 144535 - DNA, 582 bp, synthetic construct
  misc_feature 1..582: note = Description of Artificial Sequence: Synthetic coding sequence
  source 1..582: mol_type = other DNA
atgctgtctgagggggacatcctcttcagcagcctgctgagcagccccagcctcttctggcccccaggcctcatcctgctcttctacctggtgttctacggcttcctggccgccctcttctccttcaccatgtgggtgatgctgcagaccctgaatgatgaggtgcccaagtacagagaccagatccccagccctggcctgatggtgttccccaagcctgtgacagccctggagtacaccttcagcagaagtgaccccaccagctatgccggctacatcgaggacctgaagaagttcctgaagccctacaccctggaggagcagaagaacctgactgtgtgcccagatggagccctgtttgagcagaagggccctgtgtatgtggcctgccagttccccatcagcctgctgcaggcctgcagcggcatgaatgaccctgactttggctacagccagggcaacccctgcatcctggtgaagatgaaccgcatcatcggcctgaagccagagggcgtgcccagaattgactgtgtgtccaagaccaacaacgtgaaggatggcatgaagatctaccagatgtag

SEQ ID NO: 144536 - DNA, 2139 bp, synthetic construct
  misc_feature 1..2139: note = Description of Artificial Sequence: Synthetic coding sequence
  source 1..2139: mol_type = other DNA
atggccctgctggccatgcacagctggcgctgggccgctgctgctgctgcctttgagaagagaagacacagcgccatcctgatccggcccctggtgtctgtgtctggcagcggcccccagtggaggccccaccagctgggcgccctgggcacagcccgggcctaccagatccctgagagcctgaagagcatcacctggcagaggctgggcaaaggaaacagcggccagttcctggatgctgccaaggccctgcaggtgtggcccctcatcgagaagaggacctgctggcacggccacgccggcggcggcctgcacacagaccccaaggagggcgccatgaacatcgtggtgcccttcatgttcaagtatgctgtggacagcctgaaccagatgagcggcaacatgctgaacctgagtgatgcccccaacacagtggccaccatggccacagctgtgctgattggctacggcgtgtccagagctggagctgccttcttcaatgaggtgagaaatgctgtgtttgggaaggtggcccagaacagcatcagaagaattgccaagaatgtgttcctgcacctgcacaacctggacctgggcttccacctgagccggcagacaggagccctgagcaaggccatcgaccggggcacccggggcatcagctttgtgctgagcgccctggtgttcaacctgctgcccatcatgtttgaggtgatgctggtgtctggagtgctgtactacaagtgtggggcccagtttgccctggtgaccctgggcaccctgggcacctacacagccttcaccgtggccgtgacccgctggaggacccgcttccgcatcgagatgaacaaggctgacaatgatgctggaaatgctgccatcgacagcctgctgaactatgagaccgtgaagtacttcaacaatgaaagatatgaggcccagagatatgatggcttcctgaagacctatgaaacagccagcctgaagagcaccagcaccctggccatgctgaactttggccagagcgccatcttctctgtgggcctgacagccatcatggtgctggccagccagggcatcgtggccggcaccctgactgtgggggacctggtgatggtgaatggcctgctcttccagctgagcctgcccctgaacttcctgggcaccgtgtaccgggagacccggcaggccctgattgacatgaacaccctcttcaccctgctgaaggtggacacccagatcaaggacaaggtgatggccagccccctgcagatcaccccccagacagccaccgtggcctttgacaacgtgcactttgagtacatcgagggccagaaggtgctgagcggcatcagctttgaggtgcctgctgggaagaaggtggccatcgtgggcggcagcggcagcggcaagagcaccatcgtgcggctgctcttccgcttctatgagccccagaagggcagcatctacctggccggccagaacatccaggatgtgtccctggagagcctgcggcgggctgtgggcgtggtgccccaggatgctgtgctcttccacaacaccatctactacaacctgctgtatggcaacatcagcgccagccctgaggaggtgtatgctgtggccaagctggccggcctgcatgatgccatcctgaggatgccccacggctatgacacccaggtgggggagcggggcctgaagctgagcggcggggagaagcagagggtggccatcgcccgggccatcctgaaggacccccctgtgatcctgtatgatgaggccaccagcagcctggacagcatcacagaggagaccatcctgggcgccatgaaggatgtggtgaagcacaggaccagcatcttcatcgcccaccggctgagcacagtggtggatgctgatgagatcatcgtgctggaccagggcaaggtggccgagcggggcacccaccacggcctgctggccaacccccacagcatctacagcgagatgtggcacacccagagcagccgggtgcagaaccacgacaaccccaagtgggaggccaagaaggagaacatcagcaaggaggaggagaggaagaagctgcaggaggagatcgtgaacagcgtgaagggctgcggcaactgcagctgctag

SEQ ID NO: 144537 - DNA, 2046 bp, synthetic construct
  misc_feature 1..2046: note = Description of Artificial Sequence: Synthetic coding sequence
  source 1..2046: mol_type = other DNA
atgaggctgtggaaggctgtggtggtgaccctggccttcatgtctgtggacatctgtgtgaccacagccatctacgtgttcagccacctggacaggagcctgctggaggacatccgccacttcaacatctttgacagcgtgctggacctgtgggccgcctgcctgtaccgcagctgcctgctgctgggcgccaccatcggcgtggccaagaacagcgccctgggcccccggcggctgcgggcctcctggctggtgatcaccctggtgtgcctgtttgtgggcatctatgccatggtgaagctgctgctcttcagcgaggtgcggcggcccatccgggacccctggttctgggccctgtttgtgtggacctacatcagcctgggcgccagcttcctgctgtggtggctgctgagcacagtgcggcccggcacccaggccctggagcctggagctgccacagaagctgagggcttccctggcagcggccggcccccacctgagcaggccagcggggccaccctgcagaagctgctgagctacaccaagccagatgtggccttcctggtggccgccagcttcttcctgattgtggccgccctgggggagaccttcctgccctactacacaggccgggccattgatggcatcgtcatccagaagtccatggaccagttcagcacagctgtggtgattgtgtgcctgctggccatcggcagcagctttgctgctggcatccggggcggcatcttcaccctcatctttgcccggctgaacatccggctgaggaactgcctcttccgcagcctggtgtcccaggagaccagcttctttgatgaaaatagaactggagacctgatcagccggctgaccagtgacaccaccatggtgtctgacctggtgtcccagaacatcaacgtgttcctgaggaacacagtgaaggtgactggagtggtggtgttcatgttcagcctgtcctggcagctgagcctggtgaccttcatgggcttccccatcatcatgatggtgagcaacatctacggcaagtactacaagaggctgagcaaggaggtgcagaatgccctggcccgggccagcaacacagctgaggagaccatcagcgccatgaagacagtgcgcagctttgccaatgaggaggaggaggccgaggtgtacctgaggaagctgcagcaggtgtacaagctgaacaggaaggaggccgccgcctacatgtactacgtgtggggcagcggcctgaccctgctggtggtgcaggtgtccatcctgtactacggcggccacctggtgatcagcggccagatgaccagcggcaacctgattgccttcatcatctatgaatttgtgctgggggactgcatggagagcgtgggctctgtgtacagcggcctgatgcagggcgtgggcgctgctgagaaggtgtttgagttcatcgaccggcagcccaccatggtgcatgatggcagcctggccccagaccacctggagggccgggtggactttgaaaatgtgaccttcacctaccgcacccggccccacacccaggtgctgcagaatgtgtccttcagcctgagccctgggaaggtgacagccctggtgggccccagcggcagcggcaagagcagctgtgtgaacatcctggagaacttctaccccctggagggcggccgggtgctgctggatggcaagcccatcagcgcctatgaccacaagtacctgcacagggtcatcagcctggtgtcccaggagcctgtgctgtttgcccggagcatcacagacaacatctcctatggcctgcccaccgtgccctttgagatggtggtggaggccgcccagaaggccaatgcccacggcttcatcatggagctgcaggacggctacagcacagagaccggggagaagggggcccagctgagcggcggccagaagcagagggtggccatggcccgggccctggtgagaaatcctcctgtgctgatcctggatgaggccaccagcgccctggatgctgagagcgagtacctgatctag

SEQ ID NO: 144538 - DNA, 2052 bp, synthetic construct
  misc_feature 1..2052: note = Description of Artificial Sequence: Synthetic coding sequence
  source 1..2052: mol_type = other DNA
atgaggctgtggaaggctgtggtggtgaccctggccttcatgtctgtggacatctgtgtgaccacagccatctacgtgttcagccacctggacaggagcctgctggaggacatccgccacttcaacatctttgacagcgtgctggacctgtgggccgcctgcctgtaccgcagctgcctgctgctgggcgccaccatcggcgtggccaagaacagcgccctgggcccccggcggctgcgggcctcctggctggtgatcaccctggtgtgcctgtttgtgggcatctatgccatggtgaagctgctgctcttcagcgaggtgcggcggcccatccgggacccctggttctgggccctgtttgtgtggacctacatcagcctgggcgccagcttcctgctgtggtggctgctgagcacagtgcggcccggcacccaggccctggagcctggagctgccacagaagctgagggcttccctggcagcggccggcccccacctgagcaggccagcggggccaccctgcagaagctgctgagctacaccaagccagatgtggccttcctggtggccgccagcttcttcctgattgtggccgccctgggggagaccttcctgccctactacacaggccgggccattgatggcatcgtcatccagaagtccatggaccagttcagcacagctgtggtgattgtgtgcctgctggccatcggcagcagctttgctgctggcatccggggcggcatcttcaccctcatctttgcccggctgaacatccggctgaggaactgcctcttccgcagcctggtgtcccaggagaccagcttctttgatgaaaatagaactggagacctgatcagccggctgaccagtgacaccaccatggtgtctgacctggtgtcccagaacatcaacgtgttcctgaggaacacagtgaaggtgactggagtggtggtgttcatgttcagcctgtcctggcagctgagcctggtgaccttcatgggcttccccatcatcatgatggtgagcaacatctacggcaagtactacaagaggctgagcaaggaggtgcagaatgccctggcccgggccagcaacacagctgaggagaccatcagcgccatgaagacagtgcgcagctttgccaatgaggaggaggaggccgaggtgtacctgaggaagctgcagcaggtgtacaagctgaacaggaaggaggccgccgcctacatgtactacgtgtggggcagcggcctgaccctgctggtggtgcaggtgtccatcctgtactacggcggccacctggtgatcagcggccagatgaccagcggcaacctgattgccttcatcatctatgaatttgtgctgggggactgcatggagagcgtgggctctgtgtacagcggcctgatgcagggcgtgggcgctgctgagaaggtgtttgagttcatcgaccggcagcccaccatggtgcatgatggcagcctggccccagaccacctggagggccgggtggactttgaaaatgtgaccttcacctaccgcacccggccccacacccaggtgctgcagaatgtgtccttcagcctgagccctgggaaggtgacagccctggtgggccccagcggcagcggcaagagcagctgtgtgaacatcctggagaacttctaccccctggagggcggccgggtgctgctggatggcaagcccatcagcgcctatgaccacaagtacctgcacagggtcatcagcctggtgtcccaggagcctgtgctgtttgcccggagcatcacagacaacatctcctatggcctgcccaccgtgccctttgagatggtggtggaggccgcccagaaggccaatgcccacggcttcatcatggagctgcaggacggctacagcacagagaccggggagaagggggcccagctgagcggcggccagaagcagagggtggccatggcccgggccctggtgagaaatcctcctgtgctgatcctggatgaggccaccagcgccctggatgctgagagcgagtacctgtgtgccggctag

SEQ ID NO: 144539 - DNA, 300 bp, synthetic construct
  misc_feature 1..300: note = Description of Artificial Sequence: Synthetic coding sequence
  source 1..300: mol_type = other DNA
atggccgccccagctgagccctgtgccggccagggcgtgtggaaccagacagagcctgagcctgctgccaccagcctgctgagcctgtgcttcctgaggacagctggggtgtgggtgccccccatgtacctgtgggtgctgggccccatctacctgctcttcatccaccaccacggccggggctacctgaggatgagccccctcttcaaggccaagatggtggccgccatccctggcagcctggagcctggaaatgtgcggggccggcagggcaccggctggaacctggtgaagagctag

SEQ ID NO: 144540 - DNA, 372 bp, synthetic construct
  misc_feature 1..372: note = Description of Artificial Sequence: Synthetic coding sequence
  source 1..372: mol_type = other DNA
atgcccagcgctggcaccctgccctgggtgcagggcatcatctgcaatgccaacaacccctgcttccgctaccccaccccaggagaggcccctggggtggtgggcaacttcaacaagagcatcgtggcccggctcttcagtgatgcccggcggctgctgctgtacagccagaaggacacctccatgaaggacatgaggaaggtgctgcggaccctgcagcagatcaagaagagcagcagcaacctgaagctgcaggacttcctggtggacaatgagaccttcagcggcttcctgtaccacaacctgagcctgcccaagagcacagtggacaagatgctgcgggcagatgtgatcctgcacaaggtgtcctag

SEQ ID NO: 144541 - DNA, 6786 bp, synthetic construct
  misc_feature 1..6786: note = Description of Artificial Sequence: Synthetic coding sequence
  source 1..6786: mol_type = other DNA
atggcctgctggccccagctgcggctgctgctgtggaagaacctgaccttcagaagacggcagacctgccagctgctgctggaggtggcctggcccctcttcatcttcctgatcctgatctctgtgcggctgagctacccaccctatgagcagcacgagtgccacttccccaacaaggccatgcccagcgctggcaccctgccctgggtgcagggcatcatctgcaatgccaacaacccctgcttccgctaccccaccccaggagaggcccctggggtggtgggcaacttcaacaagagcatcgtggcccggctcttcagtgatgcccggcggctgctgctgtacagccagaaggacacctccatgaaggacatgaggaaggtgctgcggaccctgcagcagatcaagaagagcagcagcaacctgaagctgcaggacttcctggtggacaatgagaccttcagcggcttcctgtaccacaacctgagcctgcccaagagcacagtggacaagatgctgcgggcagatgtgatcctgcacaaggtgttcctgcagggctaccagctgcacctgaccagcctgtgcaatggcagcaagtctgaggagatgatccagctgggggaccaggaggtgtctgagctgtgtggcctgccccgggagaagctggccgctgctgagcgggtgctgcggagcaacatggacatcctgaagcccatcctgcggaccctgaacagcaccagccccttccccagcaaggagctggccgaggccaccaagaccctgctgcacagcctgggcaccctggcccaggagctgttctccatgaggtcctggagcgacatgaggcaggaggtgatgttcctgaccaacgtgaacagcagcagcagcagcacccagatctaccaggccgtgtccagaattgtgtgtggccaccctgagggcggcggcctgaagatcaagagcctgaactggtatgaggacaacaactacaaggccctgtttggaggaaatggaacagaagaagatgctgagaccttctatgacaacagcaccaccccctactgcaatgacctgatgaagaacctggagagcagccccctgagccgcatcatctggaaggccctgaagcccctgctggtgggcaagatcctgtacaccccagacaccccagccacccggcaggtgatggccgaggtgaacaagaccttccaggagctggccgtgttccatgacctggagggcatgtgggaggagctgagccccaagatctggaccttcatggagaacagccaggagatggacctggtgaggatgctgctggacagccgggacaatgaccacttctgggagcagcagctggatggcctggactggacagcccaggacatcgtggccttcctggccaagcacccagaagatgtgcagagcagcaatggatctgtgtacacctggagggaggccttcaatgagaccaaccaggccatccgcaccatcagccgcttcatggagtgtgtgaacctgaacaagctggagcccatcgccacagaggtgtggctgatcaacaagtccatggagctgctggatgagaggaagttctgggccggcatcgtgttcaccggcatcaccccaggcagcattgagctgccccaccacgtgaagtacaagatccgcatggacatcgacaacgtggagaggaccaacaagatcaaggatggctactgggaccccggccccagggctgacccctttgaggacatgagatatgtgtggggcggctttgcctacctgcaggatgtggtggagcaggccatcatccgggtgctgactggaacagagaagaagacaggagtgtacatgcagcagatgccctacccctgctacgtggatgacatcttcctgcgggtgatgagccgctccatgcccctcttcatgaccctggcctggatctacagcgtggccgtcatcatcaagggcatcgtgtatgagaaggaggcccggctgaaggagaccatgaggatcatgggcctggacaacagcatcctgtggttctcctggttcatcagcagcctcatccccctgctggtgtctgctggcctgctggtggtgatcctgaagctgggcaacctgctgccctacagcgaccccagcgtggtgtttgtgttcctgtctgtgtttgctgtggtgaccatcctgcagtgcttcctgatcagcaccctcttcagccgggccaacctggccgccgcctgtggcggcatcatctacttcaccctgtacctgccctacgtgctgtgtgtggcctggcaggactatgtgggcttcaccctgaagatctttgccagcctgctgagccctgtggcctttggatttggctgtgagtactttgccctgtttgaggagcagggcatcggcgtgcagtgggacaacctgtttgagagccctgtggaggaggatggcttcaacctgaccacctctgtgtccatgatgctgtttgacaccttcctgtatggagtgatgacctggtacatcgaggccgtgtttcctggccagtatggcatcccccggccctggtacttcccctgcaccaagagctactggtttggagaggagagtgatgagaagagccaccctggcagcaaccagaagaggatcagcgagatctgcatggaggaggagcccacccacctgaagctgggcgtgtccatccagaacctggtgaaggtgtacagagatggcatgaaggtggccgtggatggcctggccctgaacttctatgagggccagatcaccagcttcctgggccacaatggagctgggaagaccaccaccatgagcatcctgaccggcctcttcccccccaccagcggcacagcctacatcctgggcaaggacatccgctctgagatgagcaccatccggcagaacctgggcgtgtgcccccagcacaacgtgctgtttgacatgctgactgtggaggagcacatctggttctacgcccggctgaagggcctgtctgagaagcacgtgaaggccgagatggagcagatggccctggatgtgggcctgcccagcagcaagctgaagagcaagaccagccagctgagcggcggcatgcagaggaagctgtctgtggccctggcctttgtgggcggcagcaaggtggtgatcctggatgagcccacagctggggtggacccctacagccggcggggcatctgggagctgctgctgaagtaccggcagggccgcaccatcatcctgagcacccaccacatggatgaagcagatgtgctgggggacagaattgccatcatcagccacggcaagctgtgctgcgtgggcagcagcctcttcctgaagaaccagctgggcaccggctactacctgaccctggtgaagaaggatgtggagagcagcctgagcagctgcaggaacagcagcagcacagtgtcctacctgaagaaggaggacagcgtgtcccagagcagcagtgatgctggcctgggcagtgaccatgaaagtgacaccctgaccattgatgtgtctgccatcagcaacctgatcaggaagcacgtgtctgaggcccggctggtggaggacatcggccacgagctgacctacgtgctgccctatgaggccgccaaggagggcgcctttgtggagctgttccatgaaattgatgaccggctgagtgacctgggcatcagcagctatggcatcagcgagaccaccctggaggagatcttcctgaaggtggccgaggagagcggcgtggatgctgagaccagtgatggcaccctgcctgcccggaggaacagaagagcctttggagacaagcagagctgcctgcggcccttcacagaagatgatgctgctgaccccaatgacagcgacatcgaccctgagagccgggagacagacctgctgagcggcatggatggcaagggcagctaccaggtgaagggctggaagctgacccagcagcagtttgtggccctgctgtggaagaggctgctgattgcccggcgcagcaggaagggcttctttgcccagatcgtgctgcctgctgtgtttgtgtgcatcgccctggtgttcagcctgattgtgcccccatttgggaagtaccccagcctggagctgcagccctggatgtacaatgagcagtacacctttgtgtccaatgatgcccctgaggacaccggcaccctggagctgctgaatgccctgaccaaggaccccggcttcggcacccgctgcatggagggcaaccccatcccagacaccccctgccaggccggggaggaggagtggaccacagcccctgtgccccagaccatcatggacctcttccagaatggaaactggaccatgcagaaccccagccctgcctgccagtgcagcagtgacaagatcaagaagatgctgcctgtgtgccccccaggagctgggggcctgcccccaccccagaggaagcagaacacagctgacatcctgcaggacctgactggaagaaacatcagtgactacctggtgaagacctacgtgcagatcatcgccaagagcctgaagaacaagatctgggtgaatgagttccgctatggaggcttcagcctgggcgtgagcaacacccaggccctgccccccagccaggaggtgaatgatgccatcaagcagatgaagaagcacctgaagctggccaaggacagcagcgctgaccgcttcctgaacagcctgggccgcttcatgacaggcctggacaccaagaacaacgtgaaggtgtggttcaacaacaagggctggcacgccatcagcagcttcctgaatgtcatcaacaatgccatcctgcgggccaacctgcagaagggggagaaccccagccactacggcatcacagccttcaaccaccccctgaacctgaccaagcagcagctgtctgaggtggccctgatgaccacctctgtggatgtgctggtgtccatctgtgtgatctttgccatgagctttgtgcctgccagctttgtggtgttcctgatccaggagcgggtgtccaaggccaagcacctgcagttcatctctggagtgaagcctgtgatctactggctgagcaactttgtgtgggacatgtgcaactacgtggtgcctgccaccctggtgatcatcatcttcatctgcttccagcagaagagctatgtgagcagcaccaacctgcctgtgctggccctgctgctgctgctgtatggctggagcatcacccccctgatgtacccagccagctttgtgttcaagatccccagcacagcctacgtggtgctgacctctgtgaacctcttcatcggcatcaatggatctgtggccacctttgtgctggagctgttcacagacaacaagctgaacaacatcaatgacatcctgaagtctgtgttcctgatcttcccccacttctgcctgggccggggcctgattgacatggtgaagaaccaggccatggctgatgccctggagagatttggagaaaatagatttgtgagccccctgtcctgggacctggtgggcaggaacctgtttgccatggctgtggagggcgtggtgttcttcctgatcaccgtgctgatccagtaccgcttcttcatccggcccaggcctgtgaatgccaagctgagccccctgaatgatgaagatgaagatgtgcggcgggagcggcagaggatcctggatggcggcggccagaatgacatcctggagatcaaggagctgaccaagatctacagaaggaagaggaagccagctgtggaccgcatctgtgtgggcatccccccaggagagtgcttcggcctgctgggcgtgaatggagctgggaagagcagcaccttcaagatgctgaccggggacaccaccgtgaccagaggagatgccttcctgaacaagaacagcatcctgagcaacatccacgaggtgcaccagaacatgggctactgcccccagtttgatgccatcacagagctgctgaccggccgggagcacgtggagttctttgccctgctgcggggcgtgcctgagaaggaggtgggcaaggtgggggagtgggccatcaggaagctgggcctggtgaagtatggagagaagtatgccggcaactacagcggcggcaacaagaggaagctgagcacagccatggccctgattggaggcccccctgtggtgttcctggatgagcccaccaccggcatggaccccaaggcccggcgcttcctgtggaactgtgccctgtctgtggtgaaggagggccgctctgtggtgctgaccagccacagcatggaggagtgtgaggccctgtgcaccaggatggccatcatggtgaatggccgcttccgctgcctgggctctgtgcagcacctgaagaacagatttggagatggctacaccatcgtggtgagaattgctggcagcaacccagacctgaagcctgtgcaggacttcttcggcctggccttccctggctctgtgctgaaggagaagcacaggaacatgctgcagtaccagctgcccagcagcctgagcagcctggcccgcatcttcagcatcctgagccagagcaagaagaggctgcacatcgaggactacagcgtgtcccagaccaccctggaccaggtgtttgtgaactttgccaaggaccagagtgatgatgaccacctgaaggacctgagcctgcacaagaaccagacagtggtggatgtggccgtgctgaccagcttcctgcaggatgagaaggtgaaggagagctatgtgtag

SEQ ID NO: 144542 - DNA, 1092 bp, synthetic construct
  misc_feature 1..1092: note = Description of Artificial Sequence: Synthetic coding sequence
  source 1..1092: mol_type = other DNA
atggcctgctggccccagctgcggctgctgctgtggaagaacctgaccttcagaagacggcagacctgccagctgctgctggaggtggcctggcccctcttcatcttcctgatcctgatctctgtgcggctgagctacccaccctatgagcagcacgagtgccacttccccaacaaggccatgcccagcgctggcaccctgccctgggtgcagggcatcatctgcaatgccaacaacccctgcttccgctaccccaccccaggagaggcccctggggtggtgggcaacttcaacaagagcatcgtggcccggctcttcagtgatgcccggcggctgctgctgtacagccagaaggacacctccatgaaggacatgaggaaggtgctgcggaccctgcagcagatcaagaagagcagcagcaacctgaagctgcaggacttcctggtggacaatgagaccttcagcggcttcctgtaccacaacctgagcctgcccaagagcacagtggacaagatgctgcgggcagatgtgatcctgcacaaggtgttcctgcagggctaccagctgcacctgaccagcctgtgcaatggcagcaagtctgaggagatgatccagctgggggaccaggaggtgtctgagctgtgtggcctgccccgggagaagctggccgctgctgagcgggtgctgcggagcaacatggacatcctgaagcccatcctgatggatgtgacctgtgatgacatcgcccacggccagctgactgtgcccaggtctgctgctgtggccgccactggagatgccaagcccaacatgatgggccgggagaccctgctgagcatctgtgcctctgtgcccaaggtggagttccacgagcggcacatcctgaagcacttctccttctgtgtgtgtgtgtctgtgtccctcttccctgccaagggcatcgtgtccttctcctgggccagcttccgcatctgggtgctgtggaaggctgtgttctggcagcacggggagagcatggctgtgtgggagggccagctgggcctgggcctgaacatcgcctttgagtacttcaccagcattgatgtgggctag

SEQ ID NO: 144543 - DNA, 4632 bp, synthetic construct
  misc_feature 1..4632: note = Description of Artificial Sequence: Synthetic coding sequence
  source 1..4632: mol_type = other DNA
atgaacaagatggccctggccagcttcatgaagggccgcaccgtcatcggcaccccagatgaggagaccatggacatcgagctgcccaagaagtaccacgagatggtgggcgtcatcttcagtgacaccttctcctaccgcctgaagttcaactggggctaccgcatccctgtgatcaaggagcacagcgagtacacagagcactgctgggccatgcatggagagatcttctgctacctggccaagtactggctgaagggctttgtggccttccaggccgccatcaatgctgccatcatcgaggtgaccaccaaccacagcgtgatggaggagctgaccagcgtcatcggcatcaacatgaagatcccccccttcatcagcaagggggagatcatgaatgagtggttccacttcacctgcctggtgtccttcagcagcttcatctactttgccagcctgaatgtggcccgggagcggggcaagttcaagaagctgatgacagtgatgggcctgcgggagagcgccttctggctgtcctggggcctgacctacatctgcttcatcttcatcatgagcatcttcatggccctggtgatcaccagcatccccatcgtgttccacacaggcttcatggtgatcttcaccctgtacagcctgtatggcctgagcctgattgccctggccttcctgatgtctgtgctgatcaggaagcccatgctggccggcctggccggcttcctgttcaccgtcttctggggctgcctgggcttcaccgtgctgtaccggcagctgcccctgagcctgggctgggtgctgagcctgctgagcccctttgccttcaccgctggcatggcccagatcacccacctggacaactacctgtctggagtcatcttcccagaccccagcggggacagctacaagatgattgccaccttcttcatcctggcctttgacaccctcttctacctgatcttcaccctgtactttgagcgggtgctgcctgacaaggatggccacggggacagccccctcttcttcctgaagagcagcttctggagcaagcaccagaacacccaccacgagatctttgaaaatgagatcaaccctgagcacagcagtgatgacagctttgagcctgtgtccccagagttccacggcaaggaggccatccgcatcagaaatgtcatcaaggagtacaacgggaagacaggcaaggtggaggccctgcagggcatcttctttgacatctatgagggccagatcacagccatcctgggccacaatggagctgggaagagcaccctgctgaacatcctgagcggcctgtctgtgtccacagagggcagcgccaccatctacaacacccagctgtctgagatcacagacatggaggagatcaggaagaacatcggcttctgcccccagttcaacttccagtttgacttcctgactgtgcgggagaacctgcgggtgtttgccaagatcaagggcatccagcccaaggaggtggagcaggaggtgaagaggatcatcatggagctggacatgcagagcatccaggacatcatcgccaagaagctgagcggcggccagaagaggaagctgaccctgggcatcgccatcctgggggacccccaggtgctgctgctggatgagcccacagctggcctggaccccttcagccgccaccgggtgtggagcctgctgaaggagcacaaggtggacaggctcatcctcttcagcacccagttcatggatgaagctgacatcctggccgacaggaaggtgttcctgagcaatggcaagctgaagtgtgccggcagcagcctcttcctgaagaggaagtggggcatcggctaccacctgagcctgcacagaaatgagatgtgtgacacagagaagatcaccagcctcatcaagcagcacatcccagatgccaagctgaccacagaaagtgaggagaagctggtgtacagcctgcccctggagaagaccaacaagttcccagacctgtacagcgacctggacaagtgcagcgaccagggcatcagaaattatgctgtgtctgtgaccagcctgaatgaggtgttcctgaacctggagggcaagagcgccattgatgagccagactttgacatcggcaagcaggagaagatccacgtgaccaggaacacaggagatgagagcgagatggagcaggtgctgtgcagcctgcctgagaccaggaaggctgtgagcagcgctgccctgtggaggcggcagatctatgctgtggccaccctgcgcttcctgaagctgcggcgggagcggcgggccctgctgtgcctgctgctggtgctgggcatcgccttcatccccatcatcctggagaagatcatgtacaaggtgacccgggagacccactgctgggagttcagccccagcatgtacttcctgagcctggagcagatccccaagacccccctgaccagcctgctgattgtgaacaacacaggcagcaacatcgaggacctggtgcacagcctgaagtgccaggacatcgtgctggagattgatgacttcaggaacagaaatggaagtgatgaccccagctacaatggagccatcatcgtgtctggggaccagaaggactaccgcttctctgtggcctgcaacaccaagaagctgaactgcttccctgtgctgatgggcatcgtgtccaatgccctgatgggcatcttcaacttcacagagctgatccagatggagagcaccagcttcagcagagatgacatcgtgctggacctgggcttcattgatggcagcatcttcctgctgctgatcaccaactgtgtgagccccttcatcggcatgagcagcatcagtgactacaagaagaatgtgcagagccagctgtggatcagcggcctgtggcccagcgcctactggtgtggccaggccctggtggacatccccctgtacttcctgatcctcttcagcatccacctgatctactacttcatcttcctgggcttccagctgtcctgggagctgatgtttgtgctggtggtgtgcatcatcggctgtgctgtgtccctcatcttcctgacctacgtgctgtccttcatcttcaggaagtggaggaagaacaacggcttctggagctttggcttcttcatcatcctgatctgtgtgtccaccatcatggtgtccacccagtatgagaagctgaacctgatcctgtgcatgatcttcatccccagcttcaccctgctgggctacgtgatgctgctgatccagctggacttcatgaggaacctggacagcctggacaaccgcatcaatgaggtgaacaagaccatcctgctgaccaccctcatcccctacctgcagagcgtcatcttcctgtttgtgatccgctgcctggagatgaagtatggaaatgagatcatgaacaaggaccctgtgttccgcatcagccccaggagccgggagacccaccccaaccctgaggagcctgaggaggaggatgaagatgtgcaggccgagcgggtgcaggccgccaatgccctgacagcccccaacctggaggaggagcccgtcatcacagccagctgcctgcacaaggagtactatgagaccaagaagagctgcttcagcaccaggaagaagaagatcgccatcagaaatgtgtccttctgtgtgaagaagggggaggtgctgggcctgctgggccacaatggagctgggaagagcaccagcatcaagatgatcaccggctgcaccaagcccacagctggggtggtggtgctgcagggcagccgggcctctgtgcggcagcagcacgacaacagcctgaagttcctgggctactgcccccaggagaacagcctgtggcccaagctgaccatgaaggagcacctggagctgtatgctgctgtgaagggcctgggcaaggaggatgctgccctgagcatcagccggctggtggaggccctgaagctgcaggagcagctgaaggcccctgtgaagaccctgtctgagggcatcaagaggaagctgtgctttgtgctgagcatcctgggcaaccccagcgtggtgctgctggatgagcccttcaccggcatggaccctgagggccagcagcagatgtggcagatcctgcaggccaccgtgaagaacaaggagcggggcaccctgctgaccacccactacatgtctgaggccgaggccgtgtgtgacaggatggccatgatggtgtctggcaccctgcgctgcatcggcagcatccagcacctgaagaacaagtttggccgggactacctgctggagatcaagatgaaggagcccacccaggtggaggccctgcacacagagatcctgaagctgttcccccaggccgcctggcaggagcgctacagcagcctgatggcctacaagctgcctgtggaggatgtgcaccccctgagccgggccttcttcaagctggaggccatgaagcagaccttcaacctggaggagtacagcctgagccaggccaccctggagcaggtgttcctggagctgtgcaaggagcaggagctgggcaatgtggatgacaagattgacaccaccgtggagtggaagctgctgccccaggaggacccctag

SEQ ID NO: 144544 - DNA, 1401 bp, synthetic construct
  misc_feature 1..1401: note = Description of Artificial Sequence: Synthetic coding sequence
  source 1..1401: mol_type = other DNA
atgaacaagatggccctggccagcttcatgaagggccgcaccgtcatcggcaccccagatgaggagaccatggacatcgagctgcccaagaagtaccacgagatggtgggcgtcatcttcagtgacaccttctcctaccgcctgaagttcaactggggctaccgcatccctgtgatcaaggagcacagcgagtacacagagcactgctgggccatgcatggagagatcttctgctacctggccaagtactggctgaagggctttgtggccttccaggccgccatcaatgctgccatcatcgaggtgaccaccaaccacagcgtgatggaggagctgaccagcgtcatcggcatcaacatgaagatcccccccttcatcagcaagggggagatcatgaatgagtggttccacttcacctgcctggtgtccttcagcagcttcatctactttgccagcctgaatgtggcccgggagcggggcaagttcaagaagctgatgacagtgatgggcctgcgggagagcgccttctggctgtcctggggcctgacctacatctgcttcatcttcatcatgagcatcttcatggccctggtgatcaccagcatccccatcgtgttccacacaggcttcatggtgatcttcaccctgtacagcctgtatggcctgagcctgattgccctggccttcctgatgtctgtgctgatcaggaagcccatgctggccggcctggccggcttcctgttcaccgtcttctggggctgcctgggcttcaccgtgctgtaccggcagctgcccctgagcctgggctgggtgctgagcctgctgagcccctttgccttcaccgctggcatggcccagatcacccacctggacaactacctgtctggagtcatcttcccagaccccagcggggacagctacaagatgattgccaccttcttcatcctggcctttgacaccctcttctacctgatcttcaccctgtactttgagcgggtgctgcctgacaaggatggccacggggacagccccctcttcttcctgaagagcagcttctggagcaagcaccagaacacccaccacgagatctttgaaaatgagatcaaccctgagcacagcagtgatgacagctttgagcctgtgtccccagagttccacggcaaggaggccatccgcatcagaaatgtcatcaaggagtacaacgggaagacaggcaaggtggaggccctgcagggcatcttctttgacatctatgagggccagatcacagccatcctgggccacaatggagctgggaagagcaccctgctgaacatcctgagcggcctgtctgtgtccacagagggcaagaagaactacaacggcatcagacatgccaagcacagccgccactactgctag

SEQ ID NO: 144545 - DNA, 279 bp, synthetic construct
  misc_feature 1..279: note = Description of Artificial Sequence: Synthetic coding sequence
  source 1..279: mol_type = other DNA
atgaacaagatggccctggccagcttcatgaagggccgcaccgtcatcggcaccccagatgaggagaccatggacatcgagctgcccaagaagtaccacgagatggtgggcgtcatcttcagtgacaccttctcctaccgcctgaagttcaactggggctaccgcatccctgtgatcaaggagcacagcgagtacacaggccacaacaagagcttctgcaatggaggagtggacatctcctactggaacaagtatgaggacaccaccttccacttctag

SEQ ID NO: 144546 - DNA, 1359 bp, synthetic construct
  misc_feature 1..1359: note = Description of Artificial Sequence: Synthetic coding sequence
  source 1..1359: mol_type = other DNA
atgaacaagatggccctggccagcttcatgaagggccgcaccgtcatcggcaccccagatgaggagaccatggacatcgagctgcccaagaagtaccacgagatggtgggcgtcatcttcagtgacaccttctcctaccgcctgaagttcaactggggctaccgcatccctgtgatcaaggagcacagcgagtacacagagcactgctgggccatgcatggagagatcttctgctacctggccaagtactggctgaagggctttgtggccttccaggccgccatcaatgctgccatcatcgaggtgaccaccaaccacagcgtgatggaggagctgaccagcgtcatcggcatcaacatgaagatcccccccttcatcagcaagggggagatcatgaatgagtggttccacttcacctgcctggtgtccttcagcagcttcatctactttgccagcctgaatgtggcccgggagcggggcaagttcaagaagctgatgacagtgatgggcctgcgggagagcgccttctggctgtcctggggcctgacctacatctgcttcatcttcatcatgagcatcttcatggccctggtgatcaccagcatccccatcgtgttccacacaggcttcatggtgatcttcaccctgtacagcctgtatggcctgagcctgattgccctggccttcctgatgtctgtgctgatcaggaagcccatgctggccggcctggccggcttcctgttcaccgtcttctggggctgcctgggcttcaccgtgctgtaccggcagctgcccctgagcctgggctgggtgctgagcctgctgagcccctttgccttcaccgctggcatggcccagatcacccacctggacaactacctgtctggagtcatcttcccagaccccagcggggacagctacaagatgattgccaccttcttcatcctggcctttgacaccctcttctacctgatcttcaccctgtactttgagcgggtgctgcctgacaaggatggccacggggacagccccctcttcttcctgaagagcagcttctggagcaagcaccagaacacccaccacgagatctttgaaaatgagatcaaccctgagcacagcagtgatgacagctttgagcctgtgtccccagagttccacggcaaggaggccatccgcatcagaaatgtcatcaaggagtacaacgggaagacaggcaaggtggaggccctgcagggcagcgaggagcggctgtgcccagctgcccaccggctgcgctgtggggagcggctgtgcccagctgcccaccacctgggctgtgaggagcggccctgcccagctgccacccccagcggcaactag

SEQ ID NO: 144547 - DNA, 7788 bp, synthetic construct
  misc_feature 1..7788: note = Description of Artificial Sequence: Synthetic coding sequence
  source 1..7788: mol_type = other DNA
atggccagcctcttccaccagctgcagatcctggtgtggaagaactggctgggcgtgaagaggcagcccctgtggaccctggtgctgatcctgtggcctgtgatcatcttcatcatcctggccatcaccaggaccaagttccccccaacagccaagcccacctgctacctggcccccaggaacctgcccagcacaggcttcttccccttcctgcagaccctgctgtgtgacacagacagcaagtgcaaggacaccccctacggcccccaggacctgctgcggaggaagggcattgatgatgccctcttcaaggacagcgagatcctgaggaagagcagcaacctggacaaggacagcagcctgtccttccagagcacccaggtgcctgagaggagacatgccagcctggccaccgtcttccccagccccagcagtgacctggagatccctggcacctacaccttcaacggcagccaggtgctggcccgcatcctgggcctggagaagctgctgaagcagaacagcaccagcgaggacatcagaagagagctgtgtgacagctacagcggctacatcgtggatgatgccttctcctggaccttcctgggcagaaatgtgttcaacaagttctgcctgagcaacatgaccctgctggagagcagcctgcaggagctgaacaagcagttcagccagctgagcagtgaccccaacaaccagaagatcgtgttccaggagatcgtgaggatgctgtccttcttcagccaggtgcaggagcagaaggctgtgtggcagctgctgagcagcttccccaacgtgttccagaatgacaccagcctgagcaacctgtttgatgtgctgaggaaggccaacagcgtgctgctggtggtgcagaaggtgtaccccaggtttgccaccaatgaaggcttccgcaccctgcagaagtctgtgaagcacctgctgtacaccctggacagccctgcccagggcgacagcgacaacatcacccacgtgtggaatgaagatgatggccagaccctgagccccagcagcctggccgcccagctgctgatcctggagaactttgaagatgccctgctgaacatcagcgccaacagcccctacatcccctacctggcctgtgtgagaaatgtgacagacagcctggcccggggcagccctgagaacctgcggctgctgcagagcaccatccgcttcaagaagagcttcctgagaaatggcagctatgaggactacttcccccctgtgcctgaggtgctgaagagcaagctgagccagctgaggaacctgacagagctgctgtgtgagagcgagaccttcagcctgattgagaagagctgccagctgagtgacatgagctttggcagcctgtgtgaggagagcgagtttgacctgcagctgctggaggccgctgagctgggcacagaaattgctgccagcctgctgtaccatgacaacgtcatcagcaagaaggtgcgggacctgctgactggagaccccagcaagatcaacctgaacatggaccagttcctggagcaggccctgcagatgaactacctggagaacatcacccagctgatccccatcatcgaggccatgctgcacgtgaacaacagcgcagatgccagcgagaagccaggccagctgctggagatgttcaagaatgtggaggagctgaaggaggacctgcggaggaccaccggcatgagcaacagaaccatcgacaagctgctggccatccccatcccagacaacagagctgagatcatcagccaggtgttctggctgcacagctgtgacaccaacatcaccacccccaagctggaggatgccatgaaggagttctgcaacctgagcctgtctgagaggagccggcagagctacctgattggcctgaccctgctgcactacctgaacatctacaacttcacctacaaggtgttcttccccaggaaggaccagaagcctgtggagaagatgatggagctgttcatccggctgaaggagatcctgaaccagatggccagcggcacccaccccctgctggacaagatgaggagcctgaagcagatgcacctgcccaggtctgtgcccctgacccaggccatgtaccgcagcaacaggatgaacaccccccagggcagcttcagcaccatcagccaggccctgtgcagccagggcatcaccacagagtacctgacagccatgctgcccagcagccagaggcccaagggcaaccacaccaaggacttcctgacctacaagctgaccaaggagcagatcgccagcaaatatggcatccccatcaacagcacccccttctgcttcagcctgtacaaggacatcatcaacatgcctgctggccctgtgatctgggccttcctgaagcccatgctgctgggccgcatcctgtatgccccctacaaccctgtgaccaaggccatcatggagaagagcaatgtgaccctgcggcagctggccgagctgcgggagaagagccaggagtggatggacaagagccccctcttcatgaacagcttccacctgctgaaccaggccatccccatgctgcagaacaccctgaggaacccctttgtgcaggtgtttgtgaagttctctgtgggcctggatgctgtggagctgctgaagcagattgatgagctggacatcctgcggctgaagctggagaacaacatcgacatcatcgaccagctgaacaccctgagcagcctgactgtgaacatcagcagctgtgtgctgtatgaccgcatccaggccgccaagaccattgatgagatggagcgggaggccaagaggctgtacaagagcaatgagctgtttggatctgtcatcttcaagctgcccagcaacagatcctggcaccggggctatgacagcggaaatgtgttcctgccccctgtgatcaagtacaccatccgcatgagcctgaagacagcccagaccaccaggagcctgcggaccaagatctgggcccctggcccccacaacagccccagccacaaccagatctacggccgggccttcatctacctgcaggacagcattgaaagagccatcatcgagctgcagacaggaagaaacagccaggagattgctgtgcaggtgcaggccatcccctacccctgcttcatgaaggacaacttcctgacctctgtgtcctacagcctgcccatcgtgctgatggtggcctgggtggtgttcatcgccgcctttgtgaagaagctggtgtatgagaaggacctgcggctgcacgagtacatgaagatgatgggcgtgaacagctgcagccacttctttgcctggctgattgagagcgtgggcttcctgctggtgaccatcgtcatcctgatcatcatcctgaagtttggaaacatcctgcccaagaccaacggcttcatcctcttcctgtacttcagtgactacagcttctctgtgattgccatgagctacctgatcagcgtcttcttcaacaacaccaacattgctgccctgattggcagcctcatctacatcatcgccttcttccccttcatcgtgctggtgacagtggagaatgagctgtcctatgtgctgaaggtgttcatgagcctgctgagccccacagccttctcctatgccagccagtacatcgcccgctatgaggagcagggcatcggcctgcagtgggagaacatgtacaccagccctgtgcaggatgacaccaccagctttggctggctgtgctgcctgatcctggccgacagcttcatctacttcctgattgcctggtacgtgagaaatgtgtttcctggcacctacggcatggccgccccctggtacttccccatcctgcccagctactggaaggagcgcttcggctgtgccgaggtgaagccagagaagagcaatggcctgatgttcaccaacatcatgatgcagaacaccaaccccagcgccagccctgagtacatgttcagcagcaacatcgagcctgagcccaaggacctgactgtgggcgtggccctgcatggagtgaccaagatctacggcagcaaggtggccgtggacaacctgaacctgaacttctatgagggccacatcaccagcctgctgggccccaacggggccggcaagaccaccaccatctccatgctgaccggcctgtttggagccagcgctggcaccatctttgtgtatggcaaggacatcaagacagacctgcacacagtgaggaagaacatgggcgtgtgcatgcagcatgatgtgctcttctcctacctgaccaccaaggagcacctgctgctgtatggcagcatcaaggtgccccactggaccaagaagcagctgcacgaggaggtgaagaggaccctgaaggacaccggcctgtacagccaccgccacaagagggtgggcaccctgagcggcggcatgaagaggaagctgagcatcagcatcgccctgattggaggcagccgggtggtgatcctggatgagcccagcactggagtggacccctgcagccgccgcagcatctgggatgtgatcagcaagaacaagacagcccggaccatcatcctgagcacccaccacctggatgaggccgaggtgctgagtgacagaattgccttcctggagcagggcggcctgcgctgctgcggcagccccttctacctgaaggaggcctttggagatggctaccacctgaccctgaccaagaagaagagccccaacctgaatgccaatgctgtgtgtgacaccatggctgtgacagccatgatccagagccacctgcctgaggcctacctgaaggaggacatcggcggggagctggtgtatgtgctgccccccttcagcaccaaggtgtctggggcctacctgagcctgctgcgggccctggacaatggcatgggagacctgaacatcggctgctacggcatcagtgacaccaccgtggaggaggtgttcctgaacctgaccaaggagagccagaagaacagcgccatgagcctggagcacctgacccagaagaagattggcaacagcaatgccaacggcatcagcaccccagatgacctgtctgtgagcagcagcaacttcacagacagagatgacaagatcctgaccagaggagagcggctggatggcttcggcctgctgctgaagaagatcatggccatcctgatcaagcgcttccaccacaccaggaggaactggaagggcctcatcgcccaggtgatcctgcccatcgtgtttgtgaccacagccatgggcctgggcaccctgaggaacagcagcaacagctacccagagatccagatcagccccagcctgtatggcaccagcgagcagacagccttctacgccaactaccaccccagcacagaggccctggtgtctgccatgtgggacttccctggcatcgacaacatgtgcctgaacaccagtgacctgcagtgcctgaacaaggacagcctggagaagtggaacaccagcggggagcccatcaccaactttggagtgtgcagctgcagtgaaaatgtgcaggagtgccccaagttcaactacagccccccccacaggaggacctacagcagccaggtgatctacaacctgaccggccagagggtggagaactacctgatcagcacagccaatgaatttgtgcagaagagatatggaggctggagctttggcctgcccctgaccaaggacctgcgctttgacatcaccggggtgcctgccaacagaaccctggccaaggtgtggtatgaccctgagggctaccacagcctgcctgcctacctgaacagcctgaacaacttcctgctgcgggtgaacatgagcaaatatgatgctgcccggcacggcatcatcatgtacagccacccctacccaggagtgcaggaccaggagcaggccaccatcagcagcctgattgacatcctggtggccctgagcatcctgatgggctacagcgtgaccacagccagctttgtgacctacgtggtgcgggagcaccagaccaaggccaagcagctgcagcacatctctggaattggagtgacctgctactgggtgaccaacttcatctatgacatggtgttctacctggtgcctgtggccttcagcatcggcatcatcgccatcttcaagctgcctgccttctacagcgagaacaacctgggcgctgtgtccctgctgctgctgctgtttggctacgccaccttctcctggatgtacctgctggccggcctcttccatgaaacaggcatggccttcatcacctacgtgtgtgtgaacctcttcttcggcatcaacagcatcgtgtccctgtctgtggtgtacttcctgagcaaggagaagcccaatgaccccaccctggagctgatcagcgagaccctgaagaggatcttcctgatcttcccccagttctgcttcggctacggcctgattgagctgagccagcagcagagcgtgctggacttcctgaaggcctacggcgtggagtacccaaatgagacctttgagatgaacaagctgggcgccatgtttgtggccctggtgtcccagggcaccatgttcttcagcctgcggctgctgatcaatgaaagcctcatcaagaagctgcggctcttcttcaggaagttcaacagcagccacgtgcgggagaccattgatgaagatgaagatgtgcgggcagagcggctgcgggtggagagcggggctgctgagtttgacctggtgcagctgtactgcctgaccaagacctaccagctgatccacaagaagatcatcgctgtgaacaacatcagcatcggcatcccagctggggagtgcttcggcctgctgggcgtgaatggagctgggaagaccaccatcttcaagatgctgaccggggacatcatccccagcagcggcaacatcctgatccggaacaagacaggcagcctgggccacgtggacagccacagcagcctggtgggctactgcccccaggaggatgccctggatgacctggtgacagtggaggagcacctgtacttctacgcccgggtgcacggcatccctgagaaggacatcaaggagaccgtgcacaagctgctgcggcggctgcacctgatgcccttcaaggaccgggccacctccatgtgcagctatggcaccaagaggaagctgagcacagccctggccctgattggcaagcccagcatcctgctgctggatgagcccagcagcggcatggaccccaagagcaagaggcacctgtggaagatcatcagcgaggaggtgcagaacaagtgcagcgtcatcctgaccagccacagcatggaggagtgtgaggccctgtgcacccggctggccatcatggtgaatggcaagttccagtgcatcggcagcctgcagcacatcaagagccgcttcggccggggcttcaccgtgaaggtgcacctgaagaacaacaaggtgaccatggagaccctgaccaagttcatgcagctgcacttccccaagacctacctgaaggaccagcacctgtccatgctggagtaccacgtgcctgtgacagctggaggagtggccaacatctttgacctgctggagaccaacaagacagccctgaacatcaccaacttcctggtgtcccagaccaccctggaggaggtgttcatcaactttgccaaggaccagaagagctatgaaacagctgacaccagcagccagggcagcaccatctctgtggacagccaggatgaccagatggagagctag

SEQ ID NO: 144548 - DNA, 6834 bp, synthetic construct
  misc_feature 1..6834: note = Description of Artificial Sequence: Synthetic coding sequence
  source 1..6834: mol_type = other DNA
atgttcacctacatcaagatcatcaccagcggggacagcgacaacatcacccacgtgtggaatgaagatgatggccagaccctgagccccagcagcctggccgcccagctgctgatcctggagaactttgaagatgccctgctgaacatcagcgccaacagcccctacatcccctacctggcctgtgtgagaaatgtgacagacagcctggcccggggcagccctgagaacctgcggctgctgcagagcaccatccgcttcaagaagagcttcctgagaaatggcagctatgaggactacttcccccctgtgcctgaggtgctgaagagcaagctgagccagctgaggaacctgacagagctgctgtgtgagagcgagaccttcagcctgattgagaagagctgccagctgagtgacatgagctttggcagcctgtgtgaggagagcgagtttgacctgcagctgctggaggccgctgagctgggcacagaaattgctgccagcctgctgtaccatgacaacgtcatcagcaagaaggtgcgggacctgctgactggagaccccagcaagatcaacctgaacatggaccagttcctggagcaggccctgcagatgaactacctggagaacatcacccagctgatccccatcatcgaggccatgctgcacgtgaacaacagcgcagatgccagcgagaagccaggccagctgctggagatgttcaagaatgtggaggagctgaaggaggacctgcggaggaccaccggcatgagcaacagaaccatcgacaagctgctggccatccccatcccagacaacagagctgagatcatcagccaggtgttctggctgcacagctgtgacaccaacatcaccacccccaagctggaggatgccatgaaggagttctgcaacctgagcctgtctgagaggagccggcagagctacctgattggcctgaccctgctgcactacctgaacatctacaacttcacctacaaggtgttcttccccaggaaggaccagaagcctgtggagaagatgatggagctgttcatccggctgaaggagatcctgaaccagatggccagcggcacccaccccctgctggacaagatgaggagcctgaagcagatgcacctgcccaggtctgtgcccctgacccaggccatgtaccgcagcaacaggatgaacaccccccagggcagcttcagcaccatcagccaggccctgtgcagccagggcatcaccacagagtacctgacagccatgctgcccagcagccagaggcccaagggcaaccacaccaaggacttcctgacctacaagctgaccaaggagcagatcgccagcaaatatggcatccccatcaacagcacccccttctgcttcagcctgtacaaggacatcatcaacatgcctgctggccctgtgatctgggccttcctgaagcccatgctgctgggccgcatcctgtatgccccctacaaccctgtgaccaaggccatcatggagaagagcaatgtgaccctgcggcagctggccgagctgcgggagaagagccaggagtggatggacaagagccccctcttcatgaacagcttccacctgctgaaccaggccatccccatgctgcagaacaccctgaggaacccctttgtgcaggtgtttgtgaagttctctgtgggcctggatgctgtggagctgctgaagcagattgatgagctggacatcctgcggctgaagctggagaacaacatcgacatcatcgaccagctgaacaccctgagcagcctgactgtgaacatcagcagctgtgtgctgtatgaccgcatccaggccgccaagaccattgatgagatggagcgggaggccaagaggctgtacaagagcaatgagctgtttggatctgtcatcttcaagctgcccagcaacagatcctggcaccggggctatgacagcggaaatgtgttcctgccccctgtgatcaagtacaccatccgcatgagcctgaagacagcccagaccaccaggagcctgcggaccaagatctgggcccctggcccccacaacagccccagccacaaccagatctacggccgggccttcatctacctgcaggacagcattgaaagagccatcatcgagctgcagacaggaagaaacagccaggagattgctgtgcaggtgcaggccatcccctacccctgcttcatgaaggacaacttcctgacctctgtgtcctacagcctgcccatcgtgctgatggtggcctgggtggtgttcatcgccgcctttgtgaagaagctggtgtatgagaaggacctgcggctgcacgagtacatgaagatgatgggcgtgaacagctgcagccacttctttgcctggctgattgagagcgtgggcttcctgctggtgaccatcgtcatcctgatcatcatcctgaagtttggaaacatcctgcccaagaccaacggcttcatcctcttcctgtacttcagtgactacagcttctctgtgattgccatgagctacctgatcagcgtcttcttcaacaacaccaacattgctgccctgattggcagcctcatctacatcatcgccttcttccccttcatcgtgctggtgacagtggagaatgagctgtcctatgtgctgaaggtgttcatgagcctgctgagccccacagccttctcctatgccagccagtacatcgcccgctatgaggagcagggcatcggcctgcagtgggagaacatgtacaccagccctgtgcaggatgacaccaccagctttggctggctgtgctgcctgatcctggccgacagcttcatctacttcctgattgcctggtacgtgagaaatgtgtttcctggcacctacggcatggccgccccctggtacttccccatcctgcccagctactggaaggagcgcttcggctgtgccgaggtgaagccagagaagagcaatggcctgatgttcaccaacatcatgatgcagaacaccaaccccagcgccagccctgagtacatgttcagcagcaacatcgagcctgagcccaaggacctgactgtgggcgtggccctgcatggagtgaccaagatctacggcagcaaggtggccgtggacaacctgaacctgaacttctatgagggccacatcaccagcctgctgggccccaacggggccggcaagaccaccaccatctccatgctgaccggcctgtttggagccagcgctggcaccatctttgtgtatggcaaggacatcaagacagacctgcacacagtgaggaagaacatgggcgtgtgcatgcagcatgatgtgctcttctcctacctgaccaccaaggagcacctgctgctgtatggcagcatcaaggtgccccactggaccaagaagcagctgcacgaggaggtgaagaggaccctgaaggacaccggcctgtacagccaccgccacaagagggtgggcaccctgagcggcggcatgaagaggaagctgagcatcagcatcgccctgattggaggcagccgggtggtgatcctggatgagcccagcactggagtggacccctgcagccgccgcagcatctgggatgtgatcagcaagaacaagacagcccggaccatcatcctgagcacccaccacctggatgaggccgaggtgctgagtgacagaattgccttcctggagcagggcggcctgcgctgctgcggcagccccttctacctgaaggaggcctttggagatggctaccacctgaccctgaccaagaagaagagccccaacctgaatgccaatgctgtgtgtgacaccatggctgtgacagccatgatccagagccacctgcctgaggcctacctgaaggaggacatcggcggggagctggtgtatgtgctgccccccttcagcaccaaggtgtctggggcctacctgagcctgctgcgggccctggacaatggcatgggagacctgaacatcggctgctacggcatcagtgacaccaccgtggaggaggtgttcctgaacctgaccaaggagagccagaagaacagcgccatgagcctggagcacctgacccagaagaagattggcaacagcaatgccaacggcatcagcaccccagatgacctgtctgtgagcagcagcaacttcacagacagagatgacaagatcctgaccagaggagagcggctggatggcttcggcctgctgctgaagaagatcatggccatcctgatcaagcgcttccaccacaccaggaggaactggaagggcctcatcgcccaggtgatcctgcccatcgtgtttgtgaccacagccatgggcctgggcaccctgaggaacagcagcaacagctacccagagatccagatcagccccagcctgtatggcaccagcgagcagacagccttctacgccaactaccaccccagcacagaggccctggtgtctgccatgtgggacttccctggcatcgacaacatgtgcctgaacaccagtgacctgcagtgcctgaacaaggacagcctggagaagtggaacaccagcggggagcccatcaccaactttggagtgtgcagctgcagtgaaaatgtgcaggagtgccccaagttcaactacagccccccccacaggaggacctacagcagccaggtgatctacaacctgaccggccagagggtggagaactacctgatcagcacagccaatgaatttgtgcagaagagatatggaggctggagctttggcctgcccctgaccaaggacctgcgctttgacatcaccggggtgcctgccaacagaaccctggccaaggtgtggtatgaccctgagggctaccacagcctgcctgcctacctgaacagcctgaacaacttcctgctgcgggtgaacatgagcaaatatgatgctgcccggcacggcatcatcatgtacagccacccctacccaggagtgcaggaccaggagcaggccaccatcagcagcctgattgacatcctggtggccctgagcatcctgatgggctacagcgtgaccacagccagctttgtgacctacgtggtgcgggagcaccagaccaaggccaagcagctgcagcacatctctggaattggagtgacctgctactgggtgaccaacttcatctatgacatggtgttctacctggtgcctgtggccttcagcatcggcatcatcgccatcttcaagctgcctgccttctacagcgagaacaacctgggcgctgtgtccctgctgctgctgctgtttggctacgccaccttctcctggatgtacctgctggccggcctcttccatgaaacaggcatggccttcatcacctacgtgtgtgtgaacctcttcttcggcatcaacagcatcgtgtccctgtctgtggtgtacttcctgagcaaggagaagcccaatgaccccaccctggagctgatcagcgagaccctgaagaggatcttcctgatcttcccccagttctgcttcggctacggcctgattgagctgagccagcagcagagcgtgctggacttcctgaaggcctacggcgtggagtacccaaatgagacctttgagatgaacaagctgggcgccatgtttgtggccctggtgtcccagggcaccatgttcttcagcctgcggctgctgatcaatgaaagcctcatcaagaagctgcggctcttcttcaggaagttcaacagcagccacgtgcgggagaccattgatgaagatgaagatgtgcgggcagagcggctgcgggtggagagcggggctgctgagtttgacctggtgcagctgtactgcctgaccaagacctaccagctgatccacaagaagatcatcgctgtgaacaacatcagcatcggcatcccagctggggagtgcttcggcctgctgggcgtgaatggagctgggaagaccaccatcttcaagatgctgaccggggacatcatccccagcagcggcaacatcctgatccggaacaagacaggcagcctgggccacgtggacagccacagcagcctggtgggctactgcccccaggaggatgccctggatgacctggtgacagtggaggagcacctgtacttctacgcccgggtgcacggcatccctgagaaggacatcaaggagaccgtgcacaagctgctgcggcggctgcacctgatgcccttcaaggaccgggccacctccatgtgcagctatggcaccaagaggaagctgagcacagccctggccctgattggcaagcccagcatcctgctgctggatgagcccagcagcggcatggaccccaagagcaagaggcacctgtggaagatcatcagcgaggaggtgcagaacaagtgcagcgtcatcctgaccagccacagcatggaggagtgtgaggccctgtgcacccggctggccatcatggtgaatggcaagttccagtgcatcggcagcctgcagcacatcaagagccgcttcggccggggcttcaccgtgaaggtgcacctgaagaacaacaaggtgaccatggagaccctgaccaagttcatgcagctgcacttccccaagacctacctgaaggaccagcacctgtccatgctggagtaccacgtgcctgtgacagctggaggagtggccaacatctttgacctgctggagaccaacaagacagccctgaacatcaccaacttcctggtgtcccagaccaccctggaggaggtgttcatcaactttgccaaggaccagaagagctatgaaacagctgacaccagcagccagggcagcaccatctctgtggacagccaggatgaccagatggagagctag

SEQ ID NO: 144549 - DNA, 15177 bp, synthetic construct
  misc_feature 1..15177: note = Description of Artificial Sequence: Synthetic coding sequence
  source 1..15177: mol_type = other DNA
atgggccacgccggctgccagttcaaggccctgctgtggaagaactggctgtgccgcctgagaaatcctgtgctcttcctggccgagttcttctggccctgcatcctgtttgtgatcctgactgtgctgcgcttccaggagcccccacgctacagagacatctgctacctgcagccccgggacctgcccagctgtggggtcatcccctttgtgcagagcctgctgtgcaacacaggcagccgctgcaggaacttctcctatgagggctccatggagcaccacttccggctgagccgcttccagacagctgctgaccccaagaaggtgaacaacctggccttcctgaaggagatccaggacctggccgaggagatccacggcatgatggacaaggccaagaacctgaagaggctgtgggtggagaggagcaacaccccagacagcagctatggcagcagcttcttcaccatggacctgaacaagacagaggaggtgatcctgaagctggagagcctgcaccagcagccccacatctgggacttcctgctgctgctgccccggctgcacaccagccatgaccacgtggaggatggcatggatgtggccgtgaacctgctgcagaccatcctgaacagcctcatcagcctggaggacctggactggctgcccctgaaccagaccttcagccaggtgtctgagctggtgctgaatgtgaccatcagcaccctgaccttcctgcagcagcacggcgtggccgtgacagagcctgtgtaccacctgtccatgcagaacatcgtgtgggacccccagaaggtgcagtatgacctgaagagccagtttggatttgatgacctgcacacagagcagatcctgaacagcagcgctgagctgaaggagatccccacagacaccagcctggagaagatggtgtgcagcgtgctgagcagcaccagtgaagatgaggccgagaagtggggccacgtgggcggctgccaccccaagtggagcgaggccaagaactacctggtgcatgctgtgtcctggctgcgggtgtaccagcaggtgtttgtgcagtggcagcagggcagcctgctgcagaagaccctgaccggcatgggccacagcctggaggccctgaggaaccagtttgaggaggagagcaagccctggaaggtggtggaggccctgcacacagccctgctgctgctgaatgacagcctgtctgcagatggccccaaggacaaccacaccttccccaagatcctgcagcacctgtggaagctgcagagcctgctgcagaacctgccccagtggccagccctgaagcgcttcctgcagctggatggagccctgagaaatgccatcgcccagaacctgcactttgtgcaggaggtgctgatctgcctggagaccagcgccaatgacttcaagtggtttgagctgaaccagctgaagctggagaaggatgtgttcttctgggagctgaagcagatgctggccaagaatgctgtgtgccccaacggccgcttcagcgagaaggaggtgttcctgcccccaggcaacagcagcatctggggcggcctgcagggcctgctgtgctactgcaacagcagcgagacctctgtgctgaacaagctgctgggctctgtggaggatgctgaccgcatcctgcaggaggtgatcacctggcacaagaacatgtctgtgctgatccctgaggagtacctggactggcaggagctggagatgcagctgtctgaggccagcctgagctgcaccaggctcttcctgctgctgggcgctgaccccagcccagaaaatgatgtgttcagcagtgactgcaagcaccagctggtgtccaccgtcatcttccacaccctggagaagacccagttcttcctggagcaggcctactactggaaggccttcaagaagttcatcaggaagacctgtgaggtggcccagtatgtgaacatgcaggagagcttccagaaccggctgctggccttccctgaggagagcccctgctttgaggagaacatggactggaagatgatcagtgacaactacttccagttcctgaacaacctgctgaagagccccacagccagcatcagccgggccctgaacttcaccaagcacctgctgatgatggagaagaagctgcacaccctggaggatgagcagatgaacttcctgctgagctttgtggagttctttgagaagctgctgctgcccaacctgtttgacagcagcatcgtgcccagcttccacagcctgcccagcctgacagaggacatcctgaacatcagcagcctgtggaccaaccacctgaagagcctgaagagggaccccagcgccacagatgcccagaagctgctggagtttggaaatgaggtgatctggaagatgcagaccctgggcagccactggatcaggaaggagcccaagaacctgctgcgcttcatcgagctgatcctgtttgagatcaaccccaagctgctggagctgtgggcctacggcatcagcaagggcaagagggccaagctggagaacttcttcaccctgctgaacttctctgtgcctgaaaatgagatcctgagcaccagcttcaacttcagccagctgttccacagcgactggcccaagagccctgccatgaacatcgactttgtgcggctgtctgaggccatcatcaccagcctgcatgaatttggcttcctggagcaggagcagatcagcgaggccctgaacacagtgtatgccatcagaaatgccagtgacctcttcagcgccctgtctgagccccagaagcaggaggtggacaagatcctgacccacatccacctgaatgtgttccaggacaaggacagcgccctgctgctgcagatctacagcagcttctaccgctacatctatgagctgctgaacatccagagccggggcagcagcctgaccttcctgacccagatcagcaagcacatcctggacatcatcaagcagttcaacttccagaacatcagcaaggcctttgccttcctgttcaagacagctgaggtgctgggcggcatcagcaatgtgtcctactgccagcagctgctgagcatcttcaacttcctggagctgcaggcccagagcttcatgagcacagagggccaggagctggaggtgatccacaccaccctgaccggcctgaagcagctgctgatcattgatgaggacttccgcatcagcctcttccagtacatgagccagttcttcaacagctctgtggaggacctgctggacaacaagtgcctgatcagtgacaacaagcacatcagctctgtgaactacagcaccagcgaggagagcagctttgtgttccccctggcccagatcttcagcaacctgagcgccaacgtgtctgtgttcaacaagttcatgagcatccactgcaccgtgtcctggctgcagatgtggacagagatctgggagaccatcagccagctgttcaagtttgacatgaatgtgttcaccagcctgcaccacggcttcacccagctgctggatgagctggaggatgatgtgaaggtgtccaagagctgccagggcatcctgcccacccacaacgtggcccggctcatcctgaacctcttcaagaatgtgacccaggccaatgacttccacaactgggaggacttcctggacctgcgggacttcctggtggccctgggcaatgccctggtgtctgtgaagaagctgaacctggagcaggtggagaagagcctcttcaccatggaggccgccctgcaccagctgaagaccttccccttcaatgaaagcaccagccgggagttcctgaacagcctgctggaggtgttcatcgagttcagcagcaccagcgagtacatcgtgaggaacctggacagcatcaatgacttcctgagcaacaacctgaccaactacggggagaagtttgagaacatcatcacagagctgcgggaggccatcgtgttcctgagaaatgtgtcccatgaccgggacctcttcagctgtgccgacatcttccagaatgtgacagagtgcatcctggaggatggcttcctgtatgtgaacaccagccagaggatgctgcgcatcctggacaccctgaacagcaccttcagcagcgagaacaccatcagcagcctgaagggctgcatcgtgtggctggatgtgatcaaccacctgtacctgctgagcaacagcagcttcagccagggccacctgcagaacatcctgggcaacttccgggacatcgagaacaagatgaacagcatcctgaagatcgtgacctgggtgctgaacatcaagaagcccctgtgcagcagcaatggcagccacatcaactgtgtgaacatctacctgaaggatgtgacagacttcctgaacatcgtgctgaccaccgtgtttgagaaggagaagaagcccaagtttgagatcctgctggccctgctgaatgacagcaccaagcaggtgaggatgagcatcaacaacctgaccacagactttgattttgccagccagagcaactggagatacttcacagagctgatcctgcggcccatcgagatgtctgatgagatccccaaccagttccagaacatctggctgcacctgatcaccctgggcaaggagttccagaagctggtgaagggcatctacttcaacatcctggagaacaacagcagcagcaagacagagaacctgctgaacatctttgccaccagccccaaggagaaggatgtgaacagcgtgggcaacagcatctaccacctggccagctacctggccttcagcctgagccatgacctgcagaacagccccaagatcatcatcagccctgagatcatgaaggccaccggcctgggcatccagctgatcagagatgtgttcaacagcctgatgcctgtggtgcaccacaccagcccccagaatgccggctacatgcaggccctgaagaaggtgacctctgtgatgaggaccctgaagaaggctgacatcgacctgctggtggaccagctggagcaggtgtctgtgaacctgatggacttcttcaagaacatcagctctgtgggcactggaaacctggtggtgaacctgctggtgggcctgatggagaagtttgctgacagcagccacagctggaatgtgaaccacctgctgcagctgagccgcctcttccccaaggatgtggtggatgctgtgattgatgtgtactacgtgctgccccatgctgtgcggctgctgcagggcgtgcctgggaagaacatcacagagggcctgaaggatgtgtacagcttcaccctgctgcacggcatcaccatcagcaacatcaccaaggaggactttgccatcgtcatcaagatcctgctggacaccatcgagctggtgtctgacaagccagacatcatcagcgaggccctggcctgcttccctgtggtgtggtgctggaaccacaccaacagcggcttccggcagaacagcaagattgacccctgcaatgtgcacggcctgatgagcagcagcttctacggcaaggtggccagcatcctggaccacttccacctgagcccccagggcgaggacagcccctgcagcaatgaaagcagcaggatggagatcaccaggaaggtggtgtgcatcatccacgagctggtggactggaacagcatcctgctggagctgtctgaggtgttccacgtgaacatcagcctggtgaagacagtgcagaagttctggcacaagatcctgccctttgtgcccccatccatcaaccagacccgggacagcatcagcgagctgtgccccagcggcagcatcaagcaggtggccctgcagatcatcgagaagctgaagaatgtgaacttcaccaaggtgaccagcggggagaacatcctggacaagctgagcagcctgaacaagatcctgaacatcaatgaagacacagagacctctgtgcagaacatcatcagcagcaacctggagaggacagtgcagctgatcagcgaggactggagcctggagaagagcacccacaacctgctgagcctcttcatgatgctgcagaatgccaacgtgacaggcagcagcctggaggccctgagcagcttcatcgagaagtctgagaccccctacaactttgaggagctgtggcccaagttccagcagatcatgaaggacctgacccaggacttccgcatccgccacctgctgtctgagatgaacaagggcatcaagagcatcaacagcatggccctgcagaagatcaccctgcagtttgcccacttcctggagatcctggacagccccagcctgaagaccctggagatcatcgaggacttcctgctggtgaccaagaactggctgcaggagtatgccaatgaagactacagcaggatgattgagaccctcttcatccctgtgaccaatgaaagcagcacagaggacatcgccctgctggccaaggccatcgccaccttctggggcagcctgaagaacatcagccgggccggcaactttgatgtggccttcctgacccacctgctgaaccaggagcagctgaccaacttctctgtggtgcagctgctgtttgagaacatcctgatcaacctgatcaacaacctggccggcaacagccaggaggccgcctggaacctgaatgacacagacctgcagatcatgaacttcatcaacctgatcctgaaccacatgcagagcgagaccagcaggaagacagtgctgagcctgcggagcatcgtggacttcacagagcagttcctgaagaccttcttcagcctcttcctgaaggaggacagcgagaacaagatcagcctgctgctgaagtacttccacaaggatgtgattgctgagatgagctttgtgcccaaggacaagatcctggagatcctgaagctggaccagttcctgaccctgatgatccaggaccggctgatgaacatcttcagcagcctgaaggagaccatctaccacctgatgaagagcagcttcatcctggacaacggggagttctactttgacacccaccagggcctgaagttcatgcaggacctcttcaatgccctgctgcgggagacctccatgaagaacaagacagagaacaacatcgacttcttcaccgtggtgtcccagctgttcttccacgtgaacaagtctgaggacctcttcaagctgaaccaggacctgggcagcgccctgcacctggtgcgggagtgcagcacagagatggcccggctgctggacaccatcctgcacagccccaacaaggacttctacgccctgtaccccaccctgcaggaggtgatcctggccaacctgacagacctgctcttcttcatcaacaacagcttccccctgaggaacagagccaccctggagatcaccaagaggctggtgggcgccatcagccgggccagcgaggagagccacgtgctgaagcccctgctggagatgagcggcaccctggtgatgctgctgaatgattctgctgacctgcgggacctggccacctccatggacagcatcgtgaagctgctgaagctggtgaagaaggtgtctgggaagatgagcaccgtcttcaagacccacttcatcagcaacaccaaggacagcgtgaagttctttgacaccctgtacagcatcatgcagcagagcgtgcagaacctggtgaaggagatcgccaccctgaagaagattgaccacttcacctttgagaagatcaatgacctgctggtgcccttcctggacctggcctttgagatgattggagtggagccctacatcagcagcaacagcgacatcttctccatgagccccagcatcctgagctacatgaaccagagcaaggacttcagtgacatcctggaggagattgctgagttcctgacctctgtgaagatgaacctggaggacatgaggagcctggccgtggccttcaacaatgagacccagaccttctccatggacagcgtgaacctgcgggaggagatcctgggctgcctggtgcccatcaacaacatcaccaaccagatggacttcctgtaccccaaccccatcagcacccacagcggcccccaggacatcaagtgggagatcatccacgaggtgatccccttcctggacaagatcctgagccagaacagcacagaaattggcagcttcctgaagatggtgatctgcctgaccctggaggccctgtggaagaacctgaagaaggacaactggaatgtgtccaatgtgctgatgaccttcacccagcaccccaacaacctgctgaagaccattgaaacagtgctggaggccagcagcggcatcaagagtgactatgaaggagacctgaacaagagcctgtactttgacacccccctgagccagaacatcacccaccaccagctggagaaggccatccacaacgtgctgagcagaattgccctgtggaggaagggcctgctcttcaacaacagcgagtggatcaccagcaccaggaccctcttccagcccctgtttgagatcttcatcaaggccaccaccgggaagaatgtgaccagcgagaaggaggagaggaccaagaaggagatgattgacttcccctacagcttcaagcccttcttctgcctggagaagtacctgggcggcctgtttgtgctgaccaagtactggcagcagatccccctgacagaccagagcgtggtggagatctgtgaggtgttccagcagacagtgaagcccagcgaggccatggagatgctgcagaaggtgaagatgatggtggtgcgggtgctgaccatcgtggccgagaaccccagctggaccaaggacatcctgtgtgccaccctgagctgcaagcagaatggcatccgccacctgatcctgagcgccatccagggcgtgaccctggcccaggaccacttccaggagattgagaagatctggagcagccccaaccagctgaactgtgagagcctgagcaagaacctgagcagcaccctggagagcttcaagagcagcctggagaatgccaccggccaggactgcaccagccagccccggctggagaccgtgcagcagcacctgtacatgctggccaagagcctggaggagacctggagcagcggcaaccccatcatgaccttcctgagcaacttcaccgtgacagaagatgtgaagatcaaggacctgatgaagaacatcaccaagctgacagaggagctgcggagcagcatccagatcagcaatgagaccatccacagcatcctggaggccaacatcagccacagcaaggtgctcttcagcgccctgactgtggccctgagcgggaaatgtgaccaggagatcctgcacctgctgctgaccttccccaagggggagaagtcctggattgctgctgaggagctgtgcagcctgcccggcagcaaggtgtacagcctgattgtgctgctgagcaggaacctggatgtgcgggccttcatctacaagaccctgatgcccagcgaggccaacggcctgctgaacagcctgctggacatcgtgagcagcctgagcgccctgctggccaaggcccagcacgtgtttgagtacctgcctgagttcctgcacaccttcaagatcacagccctgctggagaccctggacttccagcaggtgtcccagaatgtgcaggcccggagcagcgccttcggcagcttccagtttgtgatgaagatggtgtgcaaggaccaggccagcttcctgagtgacagcaacatgttcatcaacctgccccgggtgaaggagctgctggaggatgacaaggagaagttcaacatccctgaggacagcacccccttctgcctgaagctgtaccaggagatcctgcagctgcccaacggggccctggtgtggaccttcctgaagcccatcctgcacggcaagatcctgtacacccccaacaccccagagatcaacaaggtgatccagaaggccaactacaccttctacatcgtggacaagctgaagaccctgtctgagaccctgctggagatgagcagcctcttccagaggagcggcagcggccagatgttcaaccagctgcaggaggccctgaggaacaagtttgtgaggaactttgtggagaaccagctgcacattgatgtggacaagctgacagagaagctgcagacctatggaggcctgctggatgagatgttcaaccacgccggggccggccgcttccgcttcctgggcagcatcctggtgaacctgagcagctgtgtggccctgaaccgcttccaggccctgcagagcgtggacatcctggagaccaaggcccacgagctgctgcagcagaacagcttcctggccagcatcatcttcagcaacagcctgtttgacaagaacttccgctctgagagcgtgaagctgccccctcatgtgtcctacaccatccgcaccaacgtgctgtacagcgtgaggacagatgtggtgaagaaccccagctggaagttccacccccagaacctgcctgcagatggcttcaagtacaactacgtgtttgcccccctgcaggacatgattgagcgggccatcatcctggtgcagacaggccaggaggccctggagcctgctgcccagacccaggccgccccctacccctgccacaccagtgacctcttcctgaacaacgtgggcttcttcttccccctcatcatgatgctgacctggatggtgtctgtggcctccatggtgaggaagctggtgtatgagcaggagatccagatcgaggagtacatgaggatgatgggcgtgcaccctgtgatccacttcctggcctggttcctggagaacatggctgtgctgaccatcagcagcgccaccctggccatcgtgctgaagaccagcggcatctttgcccacagcaacaccttcatcgtgttcctgttcctgctggactttggcatgtctgtggtgatgctgagctacctgctgagcgccttcttcagccaggccaacacagctgccctgtgcaccagcctggtgtacatgatctccttcctgccctacatcgtgctgctggtgctgcacaaccagctgagctttgtgaaccagaccttcctgtgcctgctgagcaccacagccttcggccagggcgtcttcttcatcaccttcctggagggccaggagaccggcatccagtggaacaacatgtaccaggccctggagcagggcggcatgaccttcggctgggtgtgctggatgatcctgtttgacagcagcctgtacttcctgtgtggctggtacctgagcaacctgatccctggcaccttcggcctgaggaagccctggtacttccccttcaccgccagctactggaagtctgtgggcttcctggtggagaagaggcagtacttcctgagcagcagcctcttcttcttcaatgaaaattttgacaacaagggcagcagcctgcagaaccgggagggggagctggagggcagcgcccctggggtgaccctggtgtctgtgaccaaggagtatgagggccacaaggctgtggtgcaggacctgagcctgaccttctacagagaccagatcacagccctgctgggcaccaatggagctgggaagaccaccatcatctccatgctgaccggcctgcacccccccaccagcggcaccatcatcatcaacgggaagaacctgcagacagacctgagccgggtgaggatggagctgggcgtgtgcccccagcaggacatcctgctggacaacctgactgtgcgggagcacctgctgctgtttgccagcatcaaggccccccagtggaccaagaaggagctgcaccagcaggtgaaccagaccctgcaggatgtggacctgacccagcaccagcacaagcagacccgggccctgagcggcggcctgaagaggaagctgagcctgggcatcgccttcatgggcatgagcaggacagtggtgctggatgagcccaccagcggcgtggacccctgcagccgccacagcctgtgggacatcctgctgaagtaccgggagggccgcaccatcatcttcaccacccaccacctggatgaagctgaggccctgagtgacagagtggccgtgctgcagcacggccgcctgcgctgctgcggcccccccttctgcctgaaggaggcctacggccagggcctgcggctgaccctgacccggcagcccagcgtgctggaggcccatgacctgaaggacatggcctgtgtgaccagcctcatcaagatctacatcccccaggccttcctgaaggacagcagcggcagcgagctgacctacaccatccccaaggacacagacaaggcctgcctgaagggcctcttccaggccctggatgagaacctgcaccagctgcacctgaccggctacggcatcagtgacaccaccctggaggaggtgttcctgatgctgctgcaggacagcaacaagaagagccacatcgccctgggcacagagagcgagctgcagaaccaccggcccaccggccacctgagcggctactgcggcagcctggcccggcctgccaccgtgcagggcgtgcagctgctgcgggcccaggtggccgccatcctggcccggcggctgcggaggaccctgcgggccggcaagagcaccctggccgacctgctgctgcctgtgctgtttgtggccctggccatgggcctcttcatggtgcggcccctggccacagagtacccacccctgcggctgaccccaggccactaccagagagctgagacctacttcttcagcagtggaggagacaacctggacctgaccagggtgctgctgaggaagttccgggaccaggacctgccctgtgccgacctgaacccccggcagaagaacagcagctgctggaggacagaccccttcagccaccctgagttccaggacagctgtggctgcctgaagtgccccaacagaagtgccagcgccccctacctgaccaaccacctgggccacaccctgctgaacctgagcggcttcaacatggaggagtacctgctggcccccagcgagaagccccggctgggcggctggagctttggcctgaagatccccagcgaggccggcggggccaatggaaacatcagcaagccacccaccctggccaaggtgtggtacaaccagaagggcttccacagcctgcccagctacctgaaccacctgaacaacctgatcctgtggcagcacctgccccccaccgtggactggaggcagtatggcatcaccctgtacagccacccctatggaggagccctgctgaacaaggacaagatcctggagagcatccggcagtgtggggtggccctgtgcatcgtgctgggcttcagcatcctgagcgccagcatcggcagctctgtggtgcgggacagagtgattggagccaagaggctgcagcacatcagcggcctgggctacaggatgtactggttcaccaacttcctgtatgacatgctgttctacctggtgtctgtgtgcctgtgtgtggccgtcatcgtggccttccagctgacagccttcaccttcaggaagaacctggccgccacagccctgctgctgagcctgtttggctacgccaccctgccctggatgtacctgatgagccgcatcttcagcagcagtgatgtggccttcatctcctatgtgtccctgaacttcatcttcggcctgtgcaccatgctgatcaccatcatgccccggctgctggccatcatcagcaaggccaagaacctgcagaacatctatgatgtgctgaagtgggtgttcaccatcttcccccagttctgcctgggccagggcctggtggagctgtgctacaaccagatcaagtatgacctgacccacaactttggcatcgacagctatgtgagcccctttgagatgaacttcctgggctggatctttgtgcagctggccagccagggcaccgtgctgctgctgctgcgggtgctgctgcactgggacctgctgcgctggccccggggccacagcaccctgcagggcaccgtgaagagcagcaaggacacagatgtggagaaggaggagaagagggtgtttgagggccgcaccaacggggacatcctggtgctgtacaacctgagcaagcactaccgccgcttcttccagaacatcatcgctgtgcaggacatcagcctgggcatccccaagggggagtgcttcggcctgctgggcgtgaatggagctgggaagagcaccaccttcaagatgctgaatggagaggtgtccctgaccagcggccacgccatcatccgcacccccatgggagatgctgtggacctgagcagcgctggaacagctggggtgctgattggctactgcccccagcaggatgccctggatgagctgctgaccggctgggagcacctgtactactactgcagcctgcggggcatcccccggcagtgcatccctgaggtggccggggacctgatccggcggctgcacctggaggcccacgccgacaagcctgtggccacctacagcggcggcaccaagaggaagctgagcacagccctggccctggtgggcaagccagacatcctgctgctggatgagcccagcagcggcatggacccctgcagcaagcgctacctgtggcagaccatcatgaaggaggtgcgggagggctgtgccgctgtgctgaccagccacagcatggaggagtgtgaggccctgtgcacccggctggccatcatggtgaatggcagcttcaagtgcctgggcagcccccagcacatcaagaacagatttggagatggctacacagtgaaggtgtggctgtgcaaggaggccaaccagcactgcaccgtgtctgaccacctgaagctgtacttccctggcatccagttcaagggccagcacctgaacctgctggagtaccacgtgcccaagcgctggggctgcctggccgacctcttcaaggtgattgagaacaacaagaccttcctgaacatcaagcactacagcatcaaccagaccaccctggagcaggtgttcatcaactttgccagcgagcagcagcagaccctgcagagcaccctggaccccagcacagacagccaccacacccaccacctgcccatctag

SEQ ID NO: 144550 - DNA, 2367 bp, synthetic construct
  misc_feature 1..2367: note = Description of Artificial Sequence: Synthetic coding sequence
  source 1..2367: mol_type = other DNA
atgggcctcttcatggtgcggcccctggccacagagtacccacccctgcggctgaccccaggccactaccagagagctgagacctacttcttcaggaagaacagcagctgctggaggacagaccccttcagccaccctgagttccaggacagctgtggctgcctgaagtgccccaacagaagtgccagcgccccctacctgaccaaccacctgggccacaccctgctgaacctgagcggcttcaacatggaggagtacctgctggcccccagcgagaagccccggctgggcggctggagctttggcctgaagatccccagcgaggccggcggggccaatggaaacatcagcaagccacccaccctggccaaggtgtggtacaaccagaagggcttccacagcctgcccagctacctgaaccacctgaacaacctgatcctgtggcagcacctgccccccaccgtggactggaggcagtatggcatcaccctgtacagccacccctatggaggagccctgctgaacaaggacaagatcctggagagcatccggcagtgtggggtggccctgtgcatcgtgctgggcttcagcatcctgagcgccagcatcggcagctctgtggtgcgggacagagtgattggagccaagaggctgcagcacatcagcggcctgggctacaggatgtactggttcaccaacttcctgtatgacatgctgttctacctggtgtctgtgtgcctgtgtgtggccgtcatcgtggccttccagctgacagccttcaccttcaggaagaacctggccgccacagccctgctgctgagcctgtttggctacgccaccctgccctggatgtacctgatgagccgcatcttcagcagcagtgatgtggccttcatctcctatgtgtccctgaacttcatcttcggcctgtgcaccatgctgatcaccatcatgccccggctgctggccatcatcagcaaggccaagaacctgcagaacatctatgatgtgctgaagtgggtgttcaccatcttcccccagttctgcctgggccagggcctggtggagctgtgctacaaccagatcaagtatgacctgacccacaactttggcatcgacagctatgtgagcccctttgagatgaacttcctgggctggatctttgtgcagctggccagccagggcaccgtgctgctgctgctgcgggtgctgctgcactgggacctgctgcgctggccccggggccacagcaccctgcagggcaccgtgaagagcagcaaggacacagatgtggagaaggaggagaagagggtgtttgagggccgcaccaacggggacatcctggtgctgtacaacctgagcaagcactaccgccgcttcttccagaacatcatcgctgtgcaggacatcagcctgggcatccccaagggggagtgcttcggcctgctgggcgtgaatggagctgggaagagcaccaccttcaagatgctgaatggagaggtgtccctgaccagcggccacgccatcatccgcacccccatgggagatgctgtggacctgagcagcgctggaacagctggggtgctgattggctactgcccccagcaggatgccctggatgagctgctgaccggctgggagcacctgtactactactgcagcctgcggggcatcccccggcagtgcatccctgaggtggccggggacctgatccggcggctgcacctggaggcccacgccgacaagcctgtggccacctacagcggcggcaccaagaggaagctgagcacagccctggccctggtgggcaagccagacatcctgctgctggatgagcccagcagcggcatggacccctgcagcaagcgctacctgtggcagaccatcatgaaggaggtgcgggagggctgtgccgctgtgctgaccagccacagcatggaggagtgtgaggccctgtgcacccggctggccatcatggtgaatggcagcttcaagtgcctgggcagcccccagcacatcaagaacagatttggagatggctacacagtgaaggtgtggctgtgcaaggaggccaaccagcactgcaccgtgtctgaccacctgaagctgtacttccctggcatccagttcaagggccagcacctgaacctgctggagtaccacgtgcccaagcgctggggctgcctggccgacctcttcaaggtgattgagaacaacaagaccttcctgaacatcaagcactacagcatcaaccagaccaccctggagcaggtgttcatcaactttgccagcgagcagcagcagaccctgcagagcaccctggaccccagcacagacagccaccacacccaccacctgcccatctag

SEQ ID NO: 144551 - DNA, 7311 bp, synthetic construct
  misc_feature 1..7311: note = Description of Artificial Sequence: Synthetic coding sequence
  source 1..7311: mol_type = other DNA
atgggcttcctgcaccagctgcagctgctgctgtggaagaatgtgaccctgaagagaagaagcccctgggtgctggcctttgagatcttcatccccctggtgctcttcttcatcctgctgggcctgcggcagaagaagcccaccatctctgtgaaggaggtggccttctacacagctgcccccctgaccagcgctggcatcctgcctgtgatgcagagcctgtgcccagatggccagagagatgaatttggcttcctgcagtatgccaacagcacagtgacccagctgctggagcggctggacagagtggtggaggagggcaacctgtttgatcctgcccggcccagcctgggcagcgagctggaggccctgcggcagcacctggaggccctgtctgctggccctggcaccagcggcagccacctggacaggagcacagtgtcctccttcagcctggacagcgtggccaggaacccccaggagctgtggaggttcctgacccagaacctgagcctgcccaacagcacagcccaggccctgctggccgcccgggtggaccccccagaggtgtaccacctgctgtttggccccagcagcgccctggacagccagagcggcctgcacaagggccaggagccctggagccggctgggcggcaaccccctcttcaggatggaggagctgctgctggccccagccctgctggagcagctgacctgcaccccaggcagcggggagctgggccgcatcctgactgtgcctgagagccagaagggggccctgcagggctacagagatgctgtgtgcagcggccaggccgccgcccgggcccggcgcttcagcggcctgtctgctgagctgaggaaccagctggatgtggccaaggtgtcccagcagctgggcctggatgcccccaacggcagtgacagcagcccccaggcccccccaccccggcggctgcaggccctgctgggggacctgctggatgcccagaaggtgctgcaggatgtggatgtgctgagcgccctggccctgctgctgccccagggcgcctgcaccggccgcaccccaggccccccagccagcggggccggcggggccgccaatggaactggagctggagctgtgatgggccccaatgccacagctgaggagggcgcccccagcgctgctgccctggccaccccagacaccctgcagggccagtgcagcgcctttgtgcagctgtgggccggcctgcagcccatcctgtgtggcaacaacagaaccatcgagcctgaggccctgcggcggggcaacatgagcagcctgggcttcaccagcaaggagcagaggaacctgggcctgctggtgcacctgatgaccagcaaccccaagatcctgtatgccccagctggcagcgaggtggacagagtcatcctgaaggccaatgagacctttgcctttgtgggcaatgtgacccactacgcccaggtgtggctgaacatctctgctgagatccgctccttcctggagcagggccgcctgcagcagcacctgcgctggctgcagcagtatgtggccgagctgcggctgcaccctgaggccctgaacctgagcctggatgagctgcccccagccctgcggcaggacaacttcagcctgcccagcggcatggccctgctgcagcagctggacaccatcgacaatgctgcctgtggctggatccagttcatgagcaaggtgtctgtggacatcttcaagggcttccatgatgaggagagcatcgtgaactacaccctgaaccaggcctaccaggacaacgtgacagtgtttgccagcgtcatcttccagaccaggaaggatggcagcctgccccctcatgtgcactacaagatccggcagaacagcagcttcacagagaagaccaatgagatccggcgggcctactggaggcctggccccaacacaggaggccgcttctacttcctgtatggctttgtgtggatccaggacatgatggagcgggccatcatcgacacctttgtgggccatgatgtggtggagcccggcagctatgtgcagatgttcccctacccctgctacaccagagatgacttcctgtttgtgattgagcacatgatgcccctgtgcatggtgatctcctgggtgtacagcgtggccatgaccatccagcacatcgtggccgagaaggagcaccggctgaaggaggtgatgaagaccatgggcctgaacaatgctgtgcactgggtggcctggttcatcaccggctttgtgcagctgagcatctctgtgacagccctgacagccatcctgaagtatggccaggtgctgatgcacagccacgtggtgatcatctggctgttcctggccgtgtatgctgtggccaccatcatgttctgcttcctggtgtctgtgctgtacagcaaggccaagctggccagcgcctgtggcggcatcatctacttcctgtcctatgtgccctacatgtatgtggccatccgggaggaggtggcccatgacaagatcacagcctttgagaagtgcatcgccagcctgatgagcaccacagccttcggcctgggcagcaagtactttgccctgtatgaggtggccggcgtgggcatccagtggcacaccttcagccagagccctgtggagggagatgacttcaacctgctgctggccgtgaccatgctgatggtggatgctgtggtgtatggcatcctgacctggtacatcgaggccgtgcaccctggcatgtatggcctgccccggccctggtacttccccctgcagaagagctactggctgggcagcggccgcacagaggcctgggagtggagctggccctgggcccggaccccccggctgtctgtgatggaggaggaccaggcctgtgccatggagagccgccgctttgaggagacccggggcatggaggaggagcccacccacctgcccctggtggtgtgtgtggacaagctgaccaaggtgtacaaggatgacaagaagctggccctgaacaagctgagcctgaacctgtatgagaaccaggtggtgtccttcctgggccacaatggagctgggaagaccaccaccatgagcatcctgaccggcctcttcccccccaccagcggcagcgccaccatctacggccatgacatcagaacagagatggatgagatcaggaagaacctgggcatgtgcccccagcacaacgtgctgtttgaccggctgactgtggaggagcacctgtggttctacagccggctgaagtccatggcccaggaggagatcagaagagagatggacaagatgattgaggacctggagctgagcaacaagaggcacagcctggtgcagaccctgagcggcggcatgaagaggaagctgtctgtggccatcgcctttgtgggcggcagccgggccatcatcctggatgagcccacagctggggtggacccctatgcccggcgggccatctgggacctgatcctgaagtacaagccaggccgcaccatcctgctgagcacccaccacatggatgaagctgacctgctgggggaccgcatcgccatcatcagccacggcaagctgaagtgctgcggcagccccctcttcctgaagggcacctatggagatggctaccgcctgaccctggtgaagaggcctgctgagcccggcggcccccaggagcccggcctggccagcagccccccaggccgggcccccctgagcagctgcagcgagctgcaggtgtcccagttcatcaggaagcacgtggccagctgcctgctggtgtctgacaccagcacagagctgagctacatcctgcccagcgaggccgccaagaagggggcctttgagcggctcttccagcacctggagaggagcctggatgccctgcacctgagcagctttggcctgatggacaccaccctggaggaggtgttcctgaaggtgtctgaggaggaccagagcctggagaacagcgaggctgatgtgaaggagagcaggaaggatgtgctgcctggagctgagggccctgccagcggggagggccatgctggcaacctggcccgctgcagcgagctgacccagagccaggccagcctgcagagcgccagctctgtgggcagcgcccggggagatgaaggagctggctacacagatgtgtatggagactaccggcccctgtttgacaacccccaggaccctgacaacgtgtccctgcaggaggtggaggccgaggccctgagccgggtgggccagggcagcaggaagctggatggcggctggctgaaggtgcggcagttccacggcctgctggtgaagcgcttccactgtgcccggaggaacagcaaggccctcttcagccagatcctgctgcctgccttctttgtgtgtgtggccatgacagtggccctgtctgtgcctgagatcggggacctgccccccctggtgctgagccccagccagtaccacaactacacccagccccggggcaacttcatcccctatgccaatgaggagcggcgggagtaccgcctgcggctgagcccagatgccagcccccagcagctggtgtccaccttccggctgcccagcggcgtgggcgccacctgtgtgctgaagagccctgccaacggcagcctgggccccaccctgaacctgagcagtggagagagccggctgctggccgcccgcttctttgacagcatgtgcctggagagcttcacccagggcctgcccctgagcaactttgtgcccccaccacccagccctgcccccagcgacagccctgccagcccagatgaggacctgcaggcctggaatgtgtccctgcccccaacagctggccctgagatgtggaccagcgcccccagcctgccccggctggtgcgggagcctgtgcgctgcacctgcagcgcccagggcaccggcttcagctgccccagctctgtgggcggccaccccccccagatgagggtggtgactggagacatcctgacagacatcaccggccacaacgtgtctgagtacctgctcttcaccagtgaccgcttccggctgcacagatatggagccatcacctttggaaatgtgctgaagagcatcccagccagctttggcacccgggccccacccatggtgaggaagattgctgtgagaagagctgcccaggtgttctacaacaacaagggctaccacagcatgcccacctacctgaacagcctgaacaatgccatcctgcgggccaacctgcccaagagcaagggcaacccagctgcctacggcatcaccgtgaccaaccaccccatgaacaagaccagcgccagcctgagcctggactacctgctgcagggcacagatgtggtgattgccatcttcatcatcgtggccatgagctttgtgcctgccagctttgtggtgttcctggtggccgagaagagcaccaaggccaagcacctgcagtttgtgtctggctgcaaccccatcatctactggctggccaactacgtgtgggacatgctgaactacctggtgcctgccacctgctgcgtcatcatcctgtttgtgtttgacctgcctgcctacaccagccccaccaacttccctgctgtgctgagcctcttcctgctgtatggctggagcatcacccccatcatgtacccagccagcttctggtttgaggtgcccagcagcgcctacgtgttcctgattgtcatcaacctcttcatcggcatcacagccaccgtggccaccttcctgctgcagctgtttgaacatgacaaggacctgaaggtggtgaacagctacctgaagagctgcttcctgatcttccccaactacaacctgggccacggcctgatggagatggcctacaatgagtacatcaatgagtactatgccaagattggccagtttgacaagatgaagagcccctttgagtgggacatcgtgacccggggcctggtggccatggctgtggagggcgtggtgggcttcctgctgaccatcatgtgccagtacaacttcctgcggcggccccagaggatgcctgtgtccaccaagcctgtggaggatgatgtggatgtggccagcgagcggcagagggtgctgcggggagatgctgacaatgacatggtgaagattgagaacctgaccaaggtgtacaagagcaggaagattggccgcatcctggccgtggaccggctgtgcctgggcgtgcggcctggagagtgcttcggcctgctgggcgtgaatggagctgggaagaccagcaccttcaagatgctgactggagatgagagcaccaccggcggggaggcctttgtgaatggccacagcgtgctgaaggagctgctgcaggtgcagcagagcctgggctactgcccccagtgtgatgccctgtttgatgagctgacagcccgggagcacctgcagctgtacacccggctgcggggcatctcctggaaggatgaggcccgggtggtgaagtgggccctggagaagctggagctgaccaagtatgctgacaagccagctggcacctacagcggcggcaacaagaggaagctgagcacagccatcgccctgattggctacccagccttcatcttcctggatgagcccaccaccggcatggaccccaaggcccggcgcttcctgtggaacctgatcctggacctgatcaagacaggccgctctgtggtgctgaccagccacagcatggaggagtgtgaggccctgtgcacccggctggccatcatggtgaatggccgcctgcgctgcctgggcagcatccagcacctgaagaacagatttggagatggctacatgatcaccgtgaggaccaagagcagccagagcgtgaaggatgtggtgcgcttcttcaacagaaacttccctgaggccatgctgaaggagcggcaccacaccaaggtgcagtaccagctgaagtctgagcacatcagcctggcccaggtgttcagcaagatggagcaggtgtctggagtgctgggcatcgaggactacagcgtgtcccagaccaccctggacaacgtgtttgtgaactttgccaagaagcagagcgacaacctggagcagcaggagacagagccccccagcgccctgcagagccccctgggctgcctgctgagcctgctgcggcccaggtctgcccccacagagctgcgggccctggtggctgatgagcctgaggacctggacacagaagatgagggcctcatcagctttgaggaggagcgggcccagctgtccttcaacacagacaccctgtgctag

SEQ ID NO: 144552 - DNA, 7311 bp, synthetic construct
  misc_feature 1..7311: note = Description of Artificial Sequence: Synthetic coding sequence
  source 1..7311: mol_type = other DNA
atgggcttcctgcaccagctgcagctgctgctgtggaagaatgtgaccctgaagagaagaagcccctgggtgctggcctttgagatcttcatccccctggtgctcttcttcatcctgctgggcctgcggcagaagaagcccaccatctctgtgaaggaggtgtccttctacacagctgcccccctgaccagcgctggcatcctgcctgtgatgcagagcctgtgcccagatggccagagagatgaatttggcttcctgcagtatgccaacagcacagtgacccagctgctggagcggctggacagagtggtggaggagggcaacctgtttgatcctgcccggcccagcctgggcagcgagctggaggccctgcggcagcacctggaggccctgtctgctggccctggcaccagcggcagccacctggacaggagcacagtgtcctccttcagcctggacagcgtggccaggaacccccaggagctgtggaggttcctgacccagaacctgagcctgcccaacagcacagcccaggccctgctggccgcccgggtggaccccccagaggtgtaccacctgctgtttggccccagcagcgccctggacagccagagcggcctgcacaagggccaggagccctggagccggctgggcggcaaccccctcttcaggatggaggagctgctgctggccccagccctgctggagcagctgacctgcaccccaggcagcggggagctgggccgcatcctgactgtgcctgagagccagaagggggccctgcagggctacagagatgctgtgtgcagcggccaggccgccgcccgggcccggcgcttcagcggcctgtctgctgagctgaggaaccagctggatgtggccaaggtgtcccagcagctgggcctggatgcccccaacggcagtgacagcagcccccaggcccccccaccccggcggctgcaggccctgctgggggacctgctggatgcccagaaggtgctgcaggatgtggatgtgctgagcgccctggccctgctgctgccccagggcgcctgcaccggccgcaccccaggccccccagccagcggggccggcggggccgccaatggaactggagctggagctgtgatgggccccaatgccacagctgaggagggcgcccccagcgctgctgccctggccaccccagacaccctgcagggccagtgcagcgcctttgtgcagctgtgggccggcctgcagcccatcctgtgtggcaacaacagaaccatcgagcctgaggccctgcggcggggcaacatgagcagcctgggcttcaccagcaaggagcagaggaacctgggcctgctggtgcacctgatgaccagcaaccccaagatcctgtatgccccagctggcagcgaggtggacagagtcatcctgaaggccaatgagacctttgcctttgtgggcaatgtgacccactacgcccaggtgtggctgaacatctctgctgagatccgctccttcctggagcagggccgcctgcagcagcacctgcgctggctgcagcagtatgtggccgagctgcggctgcaccctgaggccctgaacctgagcctggatgagctgcccccagccctgcggcaggacaacttcagcctgcccagcggcatggccctgctgcagcagctggacaccatcgacaatgctgcctgtggctggatccagttcatgagcaaggtgtctgtggacatcttcaagggcttccatgatgaggagagcatcgtgaactacaccctgaaccaggcctaccaggacaacgtgacagtgtttgccagcgtcatcttccagaccaggaaggatggcagcctgccccctcatgtgcactacaagatccggcagaacagcagcttcacagagaagaccaatgagatccggcgggcctactggaggcctggccccaacacaggaggccgcttctacttcctgtatggctttgtgtggatccaggacatgatggagcgggccatcatcgacacctttgtgggccatgatgtggtggagcccggcagctatgtgcagatgttcccctacccctgctacaccagagatgacttcctgtttgtgattgagcacatgatgcccctgtgcatggtgatctcctgggtgtacagcgtggccatgaccatccagcacatcgtggccgagaaggagcaccggctgaaggaggtgatgaagaccatgggcctgaacaatgctgtgcactgggtggcctggttcatcaccggctttgtgcagctgagcatctctgtgacagccctgacagccatcctgaagtatggccaggtgctgatgcacagccacgtggtgatcatctggctgttcctggccgtgtatgctgtggccaccatcatgttctgcttcctggtgtctgtgctgtacagcaaggccaagctggccagcgcctgtggcggcatcatctacttcctgtcctatgtgccctacatgtatgtggccatccgggaggaggtggcccatgacaagatcacagcctttgagaagtgcatcgccagcctgatgagcaccacagccttcggcctgggcagcaagtactttgccctgtatgaggtggccggcgtgggcatccagtggcacaccttcagccagagccctgtggagggagatgacttcaacctgctgctggccgtgaccatgctgatggtggatgctgtggtgtatggcatcctgacctggtacatcgaggccgtgcaccctggcatgtatggcctgccccggccctggtacttccccctgcagaagagctactggctgggcagcggccgcacagaggcctgggagtggagctggccctgggcccggaccccccggctgtctgtgatggaggaggaccaggcctgtgccatggagagccgccgctttgaggagacccggggcatggaggaggagcccacccacctgcccctggtggtgtgtgtggacaagctgaccaaggtgtacaaggatgacaagaagctggccctgaacaagctgagcctgaacctgtatgagaaccaggtggtgtccttcctgggccacaatggagctgggaagaccaccaccatgagcatcctgaccggcctcttcccccccaccagcggcagcgccaccatctacggccatgacatcagaacagagatggatgagatcaggaagaacctgggcatgtgcccccagcacaacgtgctgtttgaccggctgactgtggaggagcacctgtggttctacagccggctgaagtccatggcccaggaggagatcagaagagagatggacaagatgattgaggacctggagctgagcaacaagaggcacagcctggtgcagaccctgagcggcggcatgaagaggaagctgtctgtggccatcgcctttgtgggcggcagccgggccatcatcctggatgagcccacagctggggtggacccctatgcccggcgggccatctgggacctgatcctgaagtacaagccaggccgcaccatcctgctgagcacccaccacatggatgaagctgacctgctgggggaccgcatcgccatcatcagccacggcaagctgaagtgctgcggcagccccctcttcctgaagggcacctatggagatggctaccgcctgaccctggtgaagaggcctgctgagcccggcggcccccaggagcccggcctggccagcagccccccaggccgggcccccctgagcagctgcagcgagctgcaggtgtcccagttcatcaggaagcacgtggccagctgcctgctggtgtctgacaccagcacagagctgagctacatcctgcccagcgaggccgccaagaagggggcctttgagcggctcttccagcacctggagaggagcctggatgccctgcacctgagcagctttggcctgatggacaccaccctggaggaggtgttcctgaaggtgtctgaggaggaccagagcctggagaacagcgaggctgatgtgaaggagagcaggaaggatgtgctgcctggagctgagggccctgccagcggggagggccatgctggcaacctggcccgctgcagcgagctgacccagagccaggccagcctgcagagcgccagctctgtgggcagcgcccggggagatgaaggagctggctacacagatgtgtatggagactaccggcccctgtttgacaacccccaggaccctgacaacgtgtccctgcaggaggtggaggccgaggccctgagccgggtgggccagggcagcaggaagctggatggcggctggctgaaggtgcggcagttccacggcctgctggtgaagcgcttccactgtgcccggaggaacagcaaggccctcttcagccagatcctgctgcctgccttctttgtgtgtgtggccatgacagtggccctgtctgtgcctgagatcggggacctgccccccctggtgctgagccccagccagtaccacaactacacccagccccggggcaacttcatcccctatgccaatgaggagcggcgggagtaccgcctgcggctgagcccagatgccagcccccagcagctggtgtccaccttccggctgcccagcggcgtgggcgccacctgtgtgctgaagagccctgccaacggcagcctgggccccaccctgaacctgagcagtggagagagccggctgctggccgcccgcttctttgacagcatgtgcctggagagcttcacccagggcctgcccctgagcaactttgtgcccccaccacccagccctgcccccagcgacagccctgccagcccagatgaggacctgcaggcctggaatgtgtccctgcccccaacagctggccctgagatgtggaccagcgcccccagcctgccccggctggtgcgggagcctgtgcgctgcacctgcagcgcccagggcaccggcttcagctgccccagctctgtgggcggccaccccccccagatgagggtggtgactggagacatcctgacagacatcaccggccacaacgtgtctgagtacctgctcttcaccagtgaccgcttccggctgcacagatatggagccatcacctttggaaatgtgctgaagagcatcccagccagctttggcacccgggccccacccatggtgaggaagattgctgtgagaagagctgcccaggtgttctacaacaacaagggctaccacagcatgcccacctacctgaacagcctgaacaatgccatcctgcgggccaacctgcccaagagcaagggcaacccagctgcctacggcatcaccgtgaccaaccaccccatgaacaagaccagcgccagcctgagcctggactacctgctgcagggcacagatgtggtgattgccatcttcatcatcgtggccatgagctttgtgcctgccagctttgtggtgttcctggtggccgagaagagcaccaaggccaagcacctgcagtttgtgtctggctgcaaccccatcatctactggctggccaactacgtgtgggacatgctgaactacctggtgcctgccacctgctgcgtcatcatcctgtttgtgtttgacctgcctgcctacaccagccccaccaacttccctgctgtgctgagcctcttcctgctgtatggctggagcatcacccccatcatgtacccagccagcttctggtttgaggtgcccagcagcgcctacgtgttcctgattgtcatcaacctcttcatcggcatcacagccaccgtggccaccttcctgctgcagctgtttgaacatgacaaggacctgaaggtggtgaacagctacctgaagagctgcttcctgatcttccccaactacaacctgggccacggcctgatggagatggcctacaatgagtacatcaatgagtactatgccaagattggccagtttgacaagatgaagagcccctttgagtgggacatcgtgacccggggcctggtggccatggctgtggagggcgtggtgggcttcctgctgaccatcatgtgccagtacaacttcctgcggcggccccagaggatgcctgtgtccaccaagcctgtggaggatgatgtggatgtggccagcgagcggcagagggtgctgcggggagatgctgacaatgacatggtgaagattgagaacctgaccaaggtgtacaagagcaggaagattggccgcatcctggccgtggaccggctgtgcctgggcgtgcggcctggagagtgcttcggcctgctgggcgtgaatggagctgggaagaccagcaccttcaagatgctgactggagatgagagcaccaccggcggggaggcctttgtgaatggccacagcgtgctgaaggagctgctgcaggtgcagcagagcctgggctactgcccccagtgtgatgccctgtttgatgagctgacagcccgggagcacctgcagctgtacacccggctgcggggcatctcctggaaggatgaggcccgggtggtgaagtgggccctggagaagctggagctgaccaagtatgctgacaagccagctggcacctacagcggcggcaacaagaggaagctgagcacagccatcgccctgattggctacccagccttcatcttcctggatgagcccaccaccggcatggaccccaaggcccggcgcttcctgtggaacctgatcctggacctgatcaagacaggccgctctgtggtgctgaccagccacagcatggaggagtgtgaggccctgtgcacccggctggccatcatggtgaatggccgcctgcgctgcctgggcagcatccagcacctgaagaacagatttggagatggctacatgatcaccgtgaggaccaagagcagccagagcgtgaaggatgtggtgcgcttcttcaacagaaacttccctgaggccatgctgaaggagcggcaccacaccaaggtgcagtaccagctgaagtctgagcacatcagcctggcccaggtgttcagcaagatggagcaggtgtctggagtgctgggcatcgaggactacagcgtgtcccagaccaccctggacaacgtgtttgtgaactttgccaagaagcagagcgacaacctggagcagcaggagacagagccccccagcgccctgcagagccccctgggctgcctgctgagcctgctgcggcccaggtctgcccccacagagctgcgggccctggtggctgatgagcctgaggacctggacacagaagatgagggcctcatcagctttgaggaggagcgggcccagctgtccttcaacacagacaccctgtgctag

SEQ ID NO: 144553 - DNA, 7401 bp, synthetic construct
  misc_feature 1..7401: note = Description of Artificial Sequence: Synthetic coding sequence
  source 1..7401: mol_type = other DNA
atgggcaggaagaccagccgggtgcagcagggcccccccaggagccctgcctgcagcgcccatggagagaggtcctggggcctggagttcccccccttccgctggctgctgggcattgctggccgcacccacctggccgccctgccccccttccagtgggtgctggcctttgagatcttcatccccctggtgctcttcttcatcctgctgggcctgcggcagaagaagcccaccatctctgtgaaggaggtggccttctacacagctgcccccctgaccagcgctggcatcctgcctgtgatgcagagcctgtgcccagatggccagagagatgaatttggcttcctgcagtatgccaacagcacagtgacccagctgctggagcggctggacagagtggtggaggagggcaacctgtttgatcctgcccggcccagcctgggcagcgagctggaggccctgcggcagcacctggaggccctgtctgctggccctggcaccagcggcagccacctggacaggagcacagtgtcctccttcagcctggacagcgtggccaggaacccccaggagctgtggaggttcctgacccagaacctgagcctgcccaacagcacagcccaggccctgctggccgcccgggtggaccccccagaggtgtaccacctgctgtttggccccagcagcgccctggacagccagagcggcctgcacaagggccaggagccctggagccggctgggcggcaaccccctcttcaggatggaggagctgctgctggccccagccctgctggagcagctgacctgcaccccaggcagcggggagctgggccgcatcctgactgtgcctgagagccagaagggggccctgcagggctacagagatgctgtgtgcagcggccaggccgccgcccgggcccggcgcttcagcggcctgtctgctgagctgaggaaccagctggatgtggccaaggtgtcccagcagctgggcctggatgcccccaacggcagtgacagcagcccccaggcccccccaccccggcggctgcaggccctgctgggggacctgctggatgcccagaaggtgctgcaggatgtggatgtgctgagcgccctggccctgctgctgccccagggcgcctgcaccggccgcaccccaggccccccagccagcggggccggcggggccgccaatggaactggagctggagctgtgatgggccccaatgccacagctgaggagggcgcccccagcgctgctgccctggccaccccagacaccctgcagggccagtgcagcgcctttgtgcagctgtgggccggcctgcagcccatcctgtgtggcaacaacagaaccatcgagcctgaggccctgcggcggggcaacatgagcagcctgggcttcaccagcaaggagcagaggaacctgggcctgctggtgcacctgatgaccagcaaccccaagatcctgtatgccccagctggcagcgaggtggacagagtcatcctgaaggccaatgagacctttgcctttgtgggcaatgtgacccactacgcccaggtgtggctgaacatctctgctgagatccgctccttcctggagcagggccgcctgcagcagcacctgcgctggctgcagcagtatgtggccgagctgcggctgcaccctgaggccctgaacctgagcctggatgagctgcccccagccctgcggcaggacaacttcagcctgcccagcggcatggccctgctgcagcagctggacaccatcgacaatgctgcctgtggctggatccagttcatgagcaaggtgtctgtggacatcttcaagggcttccatgatgaggagagcatcgtgaactacaccctgaaccaggcctaccaggacaacgtgacagtgtttgccagcgtcatcttccagaccaggaaggatggcagcctgccccctcatgtgcactacaagatccggcagaacagcagcttcacagagaagaccaatgagatccggcgggcctactggaggcctggccccaacacaggaggccgcttctacttcctgtatggctttgtgtggatccaggacatgatggagcgggccatcatcgacacctttgtgggccatgatgtggtggagcccggcagctatgtgcagatgttcccctacccctgctacaccagagatgacttcctgtttgtgattgagcacatgatgcccctgtgcatggtgatctcctgggtgtacagcgtggccatgaccatccagcacatcgtggccgagaaggagcaccggctgaaggaggtgatgaagaccatgggcctgaacaatgctgtgcactgggtggcctggttcatcaccggctttgtgcagctgagcatctctgtgacagccctgacagccatcctgaagtatggccaggtgctgatgcacagccacgtggtgatcatctggctgttcctggccgtgtatgctgtggccaccatcatgttctgcttcctggtgtctgtgctgtacagcaaggccaagctggccagcgcctgtggcggcatcatctacttcctgtcctatgtgccctacatgtatgtggccatccgggaggaggtggcccatgacaagatcacagcctttgagaagtgcatcgccagcctgatgagcaccacagccttcggcctgggcagcaagtactttgccctgtatgaggtggccggcgtgggcatccagtggcacaccttcagccagagccctgtggagggagatgacttcaacctgctgctggccgtgaccatgctgatggtggatgctgtggtgtatggcatcctgacctggtacatcgaggccgtgcaccctggcatgtatggcctgccccggccctggtacttccccctgcagaagagctactggctgggcagcggccgcacagaggcctgggagtggagctggccctgggcccggaccccccggctgtctgtgatggaggaggaccaggcctgtgccatggagagccgccgctttgaggagacccggggcatggaggaggagcccacccacctgcccctggtggtgtgtgtggacaagctgaccaaggtgtacaaggatgacaagaagctggccctgaacaagctgagcctgaacctgtatgagaaccaggtggtgtccttcctgggccacaatggagctgggaagaccaccaccatgagcatcctgaccggcctcttcccccccaccagcggcagcgccaccatctacggccatgacatcagaacagagatggatgagatcaggaagaacctgggcatgtgcccccagcacaacgtgctgtttgaccggctgactgtggaggagcacctgtggttctacagccggctgaagtccatggcccaggaggagatcagaagagagatggacaagatgattgaggacctggagctgagcaacaagaggcacagcctggtgcagaccctgagcggcggcatgaagaggaagctgtctgtggccatcgcctttgtgggcggcagccgggccatcatcctggatgagcccacagctggggtggacccctatgcccggcgggccatctgggacctgatcctgaagtacaagccaggccgcaccatcctgctgagcacccaccacatggatgaagctgacctgctgggggaccgcatcgccatcatcagccacggcaagctgaagtgctgcggcagccccctcttcctgaagggcacctatggagatggctaccgcctgaccctggtgaagaggcctgctgagcccggcggcccccaggagcccggcctggccagcagccccccaggccgggcccccctgagcagctgcagcgagctgcaggtgtcccagttcatcaggaagcacgtggccagctgcctgctggtgtctgacaccagcacagagctgagctacatcctgcccagcgaggccgccaagaagggggcctttgagcggctcttccagcacctggagaggagcctggatgccctgcacctgagcagctttggcctgatggacaccaccctggaggaggtgttcctgaaggtgtctgaggaggaccagagcctggagaacagcgaggctgatgtgaaggagagcaggaaggatgtgctgcctggagctgagggccctgccagcggggagggccatgctggcaacctggcccgctgcagcgagctgacccagagccaggccagcctgcagagcgccagctctgtgggcagcgcccggggagatgaaggagctggctacacagatgtgtatggagactaccggcccctgtttgacaacccccaggaccctgacaacgtgtccctgcaggaggtggaggccgaggccctgagccgggtgggccagggcagcaggaagctggatggcggctggctgaaggtgcggcagttccacggcctgctggtgaagcgcttccactgtgcccggaggaacagcaaggccctcttcagccagatcctgctgcctgccttctttgtgtgtgtggccatgacagtggccctgtctgtgcctgagatcggggacctgccccccctggtgctgagccccagccagtaccacaactacacccagccccggggcaacttcatcccctatgccaatgaggagcggcgggagtaccgcctgcggctgagcccagatgccagcccccagcagctggtgtccaccttccggctgcccagcggcgtgggcgccacctgtgtgctgaagagccctgccaacggcagcctgggccccaccctgaacctgagcagtggagagagccggctgctggccgcccgcttctttgacagcatgtgcctggagagcttcacccagggcctgcccctgagcaactttgtgcccccaccacccagccctgcccccagcgacagccctgccagcccagatgaggacctgcaggcctggaatgtgtccctgcccccaacagctggccctgagatgtggaccagcgcccccagcctgccccggctggtgcgggagcctgtgcgctgcacctgcagcgcccagggcaccggcttcagctgccccagctctgtgggcggccaccccccccagatgagggtggtgactggagacatcctgacagacatcaccggccacaacgtgtctgagtacctgctcttcaccagtgaccgcttccggctgcacagatatggagccatcacctttggaaatgtgctgaagagcatcccagccagctttggcacccgggccccacccatggtgaggaagattgctgtgagaagagctgcccaggtgttctacaacaacaagggctaccacagcatgcccacctacctgaacagcctgaacaatgccatcctgcgggccaacctgcccaagagcaagggcaacccagctgcctacggcatcaccgtgaccaaccaccccatgaacaagaccagcgccagcctgagcctggactacctgctgcagggcacagatgtggtgattgccatcttcatcatcgtggccatgagctttgtgcctgccagctttgtggtgttcctggtggccgagaagagcaccaaggccaagcacctgcagtttgtgtctggctgcaaccccatcatctactggctggccaactacgtgtgggacatgctgaactacctggtgcctgccacctgctgcgtcatcatcctgtttgtgtttgacctgcctgcctacaccagccccaccaacttccctgctgtgctgagcctcttcctgctgtatggctggagcatcacccccatcatgtacccagccagcttctggtttgaggtgcccagcagcgcctacgtgttcctgattgtcatcaacctcttcatcggcatcacagccaccgtggccaccttcctgctgcagctgtttgaacatgacaaggacctgaaggtggtgaacagctacctgaagagctgcttcctgatcttccccaactacaacctgggccacggcctgatggagatggcctacaatgagtacatcaatgagtactatgccaagattggccagtttgacaagatgaagagcccctttgagtgggacatcgtgacccggggcctggtggccatggctgtggagggcgtggtgggcttcctgctgaccatcatgtgccagtacaacttcctgcggcggccccagaggatgcctgtgtccaccaagcctgtggaggatgatgtggatgtggccagcgagcggcagagggtgctgcggggagatgctgacaatgacatggtgaagattgagaacctgaccaaggtgtacaagagcaggaagattggccgcatcctggccgtggaccggctgtgcctgggcgtgcggcctggagagtgcttcggcctgctgggcgtgaatggagctgggaagaccagcaccttcaagatgctgactggagatgagagcaccaccggcggggaggcctttgtgaatggccacagcgtgctgaaggagctgctgcaggtgcagcagagcctgggctactgcccccagtgtgatgccctgtttgatgagctgacagcccgggagcacctgcagctgtacacccggctgcggggcatctcctggaaggatgaggcccgggtggtgaagtgggccctggagaagctggagctgaccaagtatgctgacaagccagctggcacctacagcggcggcaacaagaggaagctgagcacagccatcgccctgattggctacccagccttcatcttcctggatgagcccaccaccggcatggaccccaaggcccggcgcttcctgtggaacctgatcctggacctgatcaagacaggccgctctgtggtgctgaccagccacagcatggaggagtgtgaggccctgtgcacccggctggccatcatggtgaatggccgcctgcgctgcctgggcagcatccagcacctgaagaacagatttggagatggctacatgatcaccgtgaggaccaagagcagccagagcgtgaaggatgtggtgcgcttcttcaacagaaacttccctgaggccatgctgaaggagcggcaccacaccaaggtgcagtaccagctgaagtctgagcacatcagcctggcccaggtgttcagcaagatggagcaggtgtctggagtgctgggcatcgaggactacagcgtgtcccagaccaccctggacaacgtgtttgtgaactttgccaagaagcagagcgacaacctggagcagcaggagacagagccccccagcgccctgcagagccccctgggctgcctgctgagcctgctgcggcccaggtctgcccccacagagctgcgggccctggtggctgatgagcctgaggacctggacacagaagatgagggcctcatcagctttgaggaggagcgggcccagctgtccttcaacacagacaccctgtgctag

SEQ ID NO: 144554 - DNA, 7308 bp, synthetic construct
  misc_feature 1..7308: note = Description of Artificial Sequence: Synthetic coding sequence
  source 1..7308: mol_type = other DNA
atgggcttcctgcaccagctgcagctgctgctgtggaagaatgtgaccctgaagagaagaagcccctgggtgctggcctttgagatcttcatccccctggtgctcttcttcatcctgctgggcctgcggcagaagaagcccaccatctctgtgaaggaggccttctacacagctgcccccctgaccagcgctggcatcctgcctgtgatgcagagcctgtgcccagatggccagagagatgaatttggcttcctgcagtatgccaacagcacagtgacccagctgctggagcggctggacagagtggtggaggagggcaacctgtttgatcctgcccggcccagcctgggcagcgagctggaggccctgcggcagcacctggaggccctgtctgctggccctggcaccagcggcagccacctggacaggagcacagtgagcagcttcagcctggacagcgtggccaggaacccccaggagctgtggaggttcctgacccagaacctgagcctgcccaacagcacagcccaggccctgctggccgcccgggtggaccccccagaggtgtaccacctgctgtttggccccagcagcgccctggacagccagagcggcctgcacaagggccaggagccctggagccggctgggcggcaaccccctcttcaggatggaggagctgctgctggccccagccctgctggagcagctgacctgcaccccaggcagcggggagctgggccgcatcctgactgtgcctgagagccagaagggggccctgcagggctacagagatgctgtgtgcagcggccaggccgccgcccgggcccggcgcttcagcggcctgtctgctgagctgaggaaccagctggatgtggccaaggtgtcccagcagctgggcctggatgccccaaatggaagtgacagcagcccccaggcccccccaccccggcggctgcaggccctgctgggggacctgctggatgcccagaaggtgctgcaggatgtggatgtgctgagcgccctggccctgctgctgccccagggcgcctgcaccggccgcaccccaggccccccagccagcggggccggcggggccgccaacggcaccggggccggggctgtgatgggccccaatgccacagctgaggagggcgcccccagcgctgctgccctggccaccccagacaccctgcagggccagtgcagcgcctttgtgcagctgtgggccggcctgcagcccatcctgtgtggcaacaacagaaccatcgagcctgaggccctgcggcggggcaacatgagcagcctgggcttcaccagcaaggagcagaggaacctgggcctgctggtgcacctgatgaccagcaaccccaagatcctgtatgccccagctggcagcgaggtggacagagtcatcctgaaggccaatgagacctttgcctttgtgggcaatgtgacccactacgcccaggtgtggctgaacatctctgctgagatccgctccttcctggagcagggccgcctgcagcagcacctgcgctggctgcagcagtatgtggccgagctgcggctgcaccctgaggccctgaacctgagcctggatgagctgcccccagccctgcggcaggacaacttcagcctgcccagcggcatggccctgctgcagcagctggacaccatcgacaatgctgcctgtggctggatccagttcatgagcaaggtgtctgtggacatcttcaagggcttccatgatgaggagagcatcgtgaactacaccctgaaccaggcctaccaggacaacgtgacagtgtttgccagcgtcatcttccagaccaggaaggatggcagcctgcccccccacgtgcactacaagatccggcagaacagcagcttcacagagaagaccaatgagatcagaagagcctactggaggcctggccccaacacaggaggccgcttctacttcctgtatggctttgtgtggatccaggacatgatggagcgggccatcatcgacacctttgtgggccatgatgtggtggagcccggcagctatgtgcagatgttcccctacccctgctacaccagagatgacttcctgtttgtgattgagcacatgatgcccctgtgcatggtgatctcctgggtgtacagcgtggccatgaccatccagcacatcgtggccgagaaggagcaccggctgaaggaggtgatgaagaccatgggcctgaacaatgctgtgcactgggtggcctggttcatcactggatttgtgcagctgagcatctctgtgacagccctgacagccatcctgaagtatggccaggtgctgatgcacagccacgtggtgatcatctggctgttcctggccgtgtatgctgtggccaccatcatgttctgcttcctggtgtctgtgctgtacagcaaggccaagctggccagcgcctgtggcggcatcatctacttcctgtcctatgtgccctacatgtatgtggccatccgggaggaggtggcccatgacaagatcacagcctttgagaagtgcatcgccagcctgatgagcaccacagccttcggcctgggcagcaagtactttgccctgtatgaggtggccggcgtgggcatccagtggcacaccttcagccagagccctgtggagggagatgacttcaacctgctgctggccgtgaccatgctgatggtggatgctgtggtgtatggcatcctgacctggtacattgaagctgtgcaccctggcatgtatggcctgccccggccctggtacttccccctgcagaagagctactggctgggcagcggccgcacagaggcctgggagtggagctggccctgggcccggaccccccggctgtctgtgatggaggaggaccaggcctgtgccatggagagcagaagatttgaggagacccggggcatggaggaggagcccacccacctgcccctggtggtgtgtgtggacaagctgaccaaggtgtacaaggatgacaagaagctggccctgaacaagctgagcctgaacctgtatgagaaccaggtggtgtccttcctgggccacaacggggccggcaagaccaccaccatgagcatcctgaccggcctcttcccccccaccagcggcagcgccaccatctacggccatgacatcagaacagagatggatgagatcaggaagaacctgggcatgtgcccccagcacaacgtgctgtttgaccggctgactgtggaggagcacctgtggttctacagccggctgaagtccatggcccaggaggagatccggcgggagatggacaagatgattgaggacctggagctgagcaacaagaggcacagcctggtgcagaccctgagcggcggcatgaagaggaagctgtctgtggccatcgcctttgtgggcggcagccgggccatcatcctggatgagcccacagctggggtggacccctatgcccggcgggccatctgggacctgatcctgaagtacaagccaggccgcaccatcctgctgagcacccaccacatggatgaggccgacctgctgggggacagaattgccatcatcagccacggcaagctgaagtgctgcggcagccccctcttcctgaagggcacctatggagatggctaccgcctgaccctggtgaagaggcctgctgagcccggcggcccccaggagcccggcctggccagcagccccccaggccgggcccccctgagcagctgcagcgagctgcaggtgtcccagttcatcaggaagcacgtggccagctgcctgctggtgtctgacaccagcacagagctgagctacatcctgcccagcgaggccgccaagaagggggcctttgagcggctcttccagcacctggagaggagcctggatgccctgcacctgagcagctttggcctgatggacaccaccctggaggaggtgttcctgaaggtgtctgaggaggaccagagcctggagaacagcgaggctgatgtgaaggagagcaggaaggatgtgctgcccggggctgagggccctgccagcggggagggccacgccggcaacctggcccgctgcagcgagctgacccagagccaggccagcctgcagagcgccagctctgtgggcagcgcccggggagatgagggcgccggctacacagatgtgtatggagactaccggcccctgtttgacaacccccaggaccctgacaacgtgtccctgcaggaggtggaggccgaggccctgagccgggtgggccagggcagcaggaagctggatggcggctggctgaaggtgcggcagttccacggcctgctggtgaagcgcttccactgtgcccggaggaacagcaaggccctcttcagccagatcctgctgcctgccttctttgtgtgtgtggccatgacagtggccctgtctgtgcctgagattggagacctgccccccctggtgctgagccccagccagtaccacaactacacccagccccggggcaacttcatcccctatgccaatgaggagcggcgggagtaccgcctgcggctgagcccagatgccagcccccagcagctggtgtccaccttccggctgcccagcggcgtgggcgccacctgtgtgctgaagagccctgccaacggcagcctgggccccaccctgaacctgagcagcggggagagccggctgctggccgcccgcttctttgacagcatgtgcctggagagcttcacccagggcctgcccctgagcaactttgtgcccccaccacccagccctgcccccagcgacagccctgccagcccagatgaggacctgcaggcctggaatgtgtccctgcccccaacagctggccctgagatgtggaccagcgcccccagcctgccccggctggtgcgggagcctgtgcgctgcacctgcagcgcccagggcaccggcttcagctgccccagctctgtgggcggccaccccccccagatgagggtggtgactggagacatcctgacagacatcaccggccacaacgtgtctgagtacctgctcttcaccagtgaccgcttccggctgcaccgctacggggccatcacctttggaaatgtgctgaagagcatcccagccagctttggcacccgggccccacccatggtgaggaagattgctgtgcggcgggccgcccaggtgttctacaacaacaagggctaccacagcatgcccacctacctgaacagcctgaacaatgccatcctgcgggccaacctgcccaagagcaaaggaaatcctgctgcctacggcatcaccgtgaccaaccaccccatgaacaagaccagcgccagcctgagcctggactacctgctgcagggcacagatgtggtgattgccatcttcatcatcgtggccatgagctttgtgcctgccagctttgtggtgttcctggtggccgagaagagcaccaaggccaagcacctgcagtttgtgtctggctgcaaccccatcatctactggctggccaactacgtgtgggacatgctgaactacctggtgcctgccacctgctgcgtcatcatcctgtttgtgtttgacctgcctgcctacaccagccccaccaacttccctgctgtgctgagcctcttcctgctgtatggctggagcatcacccccatcatgtacccagccagcttctggtttgaggtgcccagcagcgcctacgtgttcctgattgtcatcaacctcttcatcggcatcacagccaccgtggccaccttcctgctgcagctgtttgaacatgacaaggacctgaaggtggtgaacagctacctgaagagctgcttcctgatcttccccaactacaacctgggccacggcctgatggagatggcctacaatgagtacatcaatgagtactatgccaagattggccagtttgacaagatgaagagcccctttgagtgggacatcgtgacccggggcctggtggccatggctgtggagggcgtggtgggcttcctgctgaccatcatgtgccagtacaacttcctgcggcggccccagaggatgcctgtgtccaccaagcctgtggaggatgatgtggatgtggccagcgagcggcagagggtgctgcggggagatgctgacaatgacatggtgaagattgagaacctgaccaaggtgtacaagagcaggaagattggccgcatcctggccgtggaccggctgtgcctgggcgtgcggcctggagaatgttttggcctgctgggcgtgaatggagctgggaagaccagcaccttcaagatgctgactggagatgagagcaccactggaggagaggcctttgtgaatggccacagcgtgctgaaggagctgctgcaggtgcagcagagcctgggctactgcccccagtgtgatgccctgtttgatgagctgacagcccgggagcacctgcagctgtacacccggctgcggggcatctcctggaaggatgaggcccgggtggtgaagtgggccctggagaagctggagctgaccaagtatgctgacaagccagctggcacctacagcggcggcaacaagaggaagctgagcacagccatcgccctgattggctacccagccttcatcttcctggatgagcccaccaccggcatggaccccaaggcccggcgcttcctgtggaacctgatcctggacctgatcaagacaggccgctctgtggtgctgaccagccacagcatggaggagtgtgaggccctgtgcacccggctggccatcatggtgaatggccgcctgcgctgcctgggcagcatccagcacctgaagaacagatttggagatggctacatgatcaccgtgaggaccaagagcagccagagcgtgaaggatgtggtgcgcttcttcaacagaaacttccctgaggccatgctgaaggagcggcaccacaccaaggtgcagtaccagctgaagtctgagcacatcagcctggcccaggtgttcagcaagatggagcaggtgtctggagtgctgggcatcgaggactacagcgtgtcccagaccaccctggacaacgtgtttgtgaactttgccaagaagcagagcgacaacctggagcagcaggagacagagcccccatctgccctgcagagccccctgggctgcctgctgagcctgctgcggcccaggtctgcccccacagagctgcgggccctggtggctgatgagcctgaggacctggacacagaagatgagggcctcatcagctttgaggaggagcgggcccagctgtccttcaacacagacaccctgtgctag

SEQ ID NO: 144555 - DNA, 591 bp, synthetic construct
  misc_feature 1..591: note = Description of Artificial Sequence: Synthetic coding sequence
  source 1..591: mol_type = other DNA
atgctgactggagatgagagcaccactggaggagaggcctttgtgaatggccacagcgtgctgaaggagctgctgcaggtgcagcagagcctgggctactgcccccagtgtgatgccctgtttgatgagctgacagcccgggagcacctgcagctgtacacccggctgcggggcatctcctggaaggatgaggcccgggtggtgaagtgggccctggagaagctggagctgaccaagtatgctgacaagccagctggcacctacagcggcggcaacaagaggaagctgagcacagccatcgccctgattggctacccagccttcatcttcctggatgagcccaccaccggcatggaccccaaggcccggcgcttcctgtggaacctgatcctggacctgatcaagacaggccgctctgtggtgctgaccagccacagcatggaggagtgtgaggccctgtgcacccggctggccatcatggagaggagccctgctgtgcccggccagcacccagcccctgaggagcctgtgtggcgctggctgcatgaccacggggctgaccaggagcagccagaatgtgagggccgctag

SEQ ID NO: 144556 - DNA, 5115 bp, synthetic construct
  misc_feature 1..5115: note = Description of Artificial Sequence: Synthetic coding sequence
  source 1..5115: mol_type = other DNA
atggctgtgctgcggcagctggccctgctgctgtggaagaactacaccctgcagaagaggaaggtgctggtgacagtgctggagctgttcctgcccctgctcttcagcggcatcctgatctggctgcggctgaagatccagagtgaaaatgtgcccaatgccaccatctacccaggccagagcatccaggagctgcccctcttcttcaccttccccccacctggggacacctgggagctggcctacatccccagccacagtgatgctgccaagacagtgacagagaccgtgcggcgggccctggtgatcaacatgagggtgcggggcttccccagcgagaaggactttgaggactacatccgctatgacaactgcagcagctctgtgctggccgctgtggtgtttgagcaccccttcaaccacagcaaggagcccctgcccctggccgtgaagtaccacctgcgcttctcctacaccaggaggaactacatgtggacccagacaggcagcttcttcctgaaggagacagagggctggcacaccaccagcctcttccccctcttccccaaccctggcccccgggagcccaccagcccagatggaggagagcccggctacatccgggagggcttcctggccgtgcagcacgctgtggaccgggccatcatggagtaccacgcagatgctgccacccggcagctgttccagaggctgactgtgaccatcaagcgcttcccctacccacccttcatcgctgaccccttcctggtggccatccagtaccagctgcccctgctgctgctgctgtccttcacctacacagccctgaccatcgcccgggctgtggtgcaggagaaggagcggcggctgaaggagtacatgaggatgatgggcctgagctcctggctgcactggagcgcctggttcctgctcttcttcctgttcctgctgattgctgccagcttcatgaccctgctcttctgtgtgaaggtgaagcccaacgtggccgtgctgagcagaagtgaccccagcctggtgctggccttcctgctgtgctttgccatcagcaccatctccttctccttcatggtgtccaccttcttcagcaaggccaacatggctgctgcctttggaggcttcctgtacttcttcacctacatcccctacttctttgtggccccccgctacaactggatgaccctgagccagaagctgtgcagctgcctgctgagcaatgtggccatggccatgggcgcccagctgattggcaagtttgaggccaagggcatgggcatccagtggagggacctgctgagccctgtgaatgtggatgatgacttctgcttcggccaggtgctgggcatgctgctgctggacagcgtgctgtatggcctggtgacctggtacatggaggccgtgtttcctggccagtttggagtgccccagccctggtacttcttcatcatgcccagctactggtgtgggaagcccagggctgtggccggcaaggaggaggaggacagcgaccctgagaaggccctgagaaatgagtactttgaagctgagcctgaggacctggtggccggcatcaagatcaagcacctgagcaaggtgttccgggtgggcaacaaggacagagctgctgtgcgggacctgaacctgaacctgtatgagggccagatcaccgtgctgctgggccacaacggggccggcaagaccaccaccctgtccatgctgaccggcctcttcccccccaccagcggccgggcctacatcagcggctatgagatcagccaggacatggtgcagatcaggaagagcctgggcctgtgcccccagcacgacatcctgtttgacaacctgactgtggccgagcacctgtacttctacgcccagctgaagggcctgagccggcagaagtgcccagaggaggtgaagcagatgctgcacatcatcggcctggaggacaagtggaacagccgcagccgcttcctgagcggcggcatgaggaggaagctgagcattggaattgccctgattgctggcagcaaggtgctgatcctggatgagcccaccagcggcatggatgccatcagccggcgggccatctgggacctgctgcagaggcagaagagtgacaggaccatcgtgctgaccacccacttcatggatgaggccgacctgctgggggacagaattgccatcatggccaagggggagctgcagtgctgcggcagcagcctcttcctgaagcagaagtacggggccggctaccacatgaccctggtgaaggagccccactgcaaccctgaggacatcagccagctggtgcaccaccacgtgcccaatgccaccctggagagcagcgctggagctgagctgtccttcatcctgccccgggagagcacccacagatttgagggcctgtttgccaagctggagaagaagcagaaggagctgggcatcgccagctttggagccagcatcaccaccatggaggaggtgttcctgcgggtgggcaagctggtggacagctccatggacatccaggccatccagctgcctgccctgcagtaccagcatgaaagaagagccagtgactgggccgtggacagcaacctgtgtggggccatggaccccagtgatggcatcggggccctgattgaggaggagaggacagctgtgaagctgaacacaggcctggccctgcactgccagcagttctgggccatgttcctgaagaaggccgcctacagctggagggagtggaagatggtggccgcccaggtgctggtgcccctgacctgtgtgaccctggccctgctggccatcaactacagcagcgagctgtttgatgaccccatgctgcggctgaccctgggggagtatggccgcacagtggtgcccttctctgtgcccggcaccagccagctgggccagcagctgtctgagcacctgaaggatgccctgcaggccgagggccaggagccccgggaggtgctgggggacctggaggagttcctgatcttccgggcctctgtggagggcggcggcttcaatgaacgctgcctggtggccgccagcttcagagatgtgggggagaggacagtggtgaatgccctcttcaacaaccaggcctaccacagccctgccacagccctggccgtggtggacaacctgctcttcaagctgctgtgtggcccccacgccagcatcgtggtgagcaacttcccccagcccaggtctgccctgcaggccgccaaggaccagttcaatgaaggaaggaagggctttgacatcgccctgaacctgctgtttgccatggccttcctggccagcaccttcagcatcctggccgtgtctgaaagagctgtgcaggccaagcacgtgcagtttgtgtctggagtgcacgtggccagcttctggctgagcgccctgctgtgggacctgatctccttcctgatccccagcctgctgctgctggtggtgttcaaggcctttgatgtgcgggccttcaccagagatggccacatggctgacaccctgctgctgctgctgctgtatggctgggccatcatccccctgatgtacctgatgaacttcttcttcctgggcgccgccacagcctacacccggctgaccatcttcaacatcctgagcggcatcgccaccttcctgatggtgaccatcatgaggatcccagctgtgaagctggaggagctgagcaagaccctggaccacgtgttcctggtgctgcccaaccactgcctgggcatggctgtgtcctccttctatgagaactatgagacccggcgctactgcaccagcagcgaggtggccgcccactactgcaagaagtacaacatccagtaccaggagaacttctacgcctggagcgcccctggggtgggccgctttgtggcctccatggccgccagcggctgtgcctacctgatcctgctcttcctgattgagaccaacctgctgcagaggctgcggggcatcctgtgtgccctgcggcggcggaggaccctgacagagctgtacaccaggatgcctgtgctgcctgaggaccaggatgtggctgatgagaggacccgcatcctggcccccagcccagacagcctgctgcacacccccctcatcatcaaggagctgagcaaggtgtatgagcagagggtgcccctgctggccgtggaccggctgagcctggccgtgcagaagggggagtgcttcggcctgctgggcttcaacggggccggcaagaccaccaccttcaagatgctgaccggggaggagagcctgaccagcggagatgcctttgtgggcggccaccgcatcagcagtgatgtgggcaaggtgcggcagagaattggctactgcccccagtttgatgccctgctggaccacatgacaggccgggagatgctggtgatgtatgcccggctgcggggcatccctgagcggcacatcggggcctgtgtggagaacaccctgcggggcctgctgctggagccccacgccaacaagctggtgaggacctacagcggcggcaacaagaggaagctgagcactggaattgccctgattggagagcctgctgtgatcttcctggatgagcccagcacaggcatggaccctgtggcccggcggctgctgtgggacacagtggcccgggcccgggagagcggcaaggccatcatcatcaccagccacagcatggaggagtgtgaggccctgtgcacccggctggccatcatggtgcagggccagttcaagtgcctgggcagcccccagcacctgaagagcaagtttggaagtggctacagcctgcgggccaaggtgcagagcgagggccagcaggaggccctggaggagttcaaggcctttgtggacctgaccttccctggctctgtgctggaggatgagcaccagggcatggtgcactaccacctgcccggccgggacctgtcctgggccaaggtgtttggcatcctggagaaggccaaggagaagtatggagtggatgactacagcgtgtcccagatcagcctggagcaggtgttcctgagctttgcccacctgcagcccccaacagctgaggagggccgctag

SEQ ID NO: 144557 - DNA, 5127 bp, synthetic construct
  misc_feature 1..5127: note = Description of Artificial Sequence: Synthetic coding sequence
  source 1..5127: mol_type = other DNA
acagcccccccacccagccccagcctgcccctgcaggacagagctgccaccagcgcccacctggccctcttcaccctgtccttccagagcaccttcctgctcttccctgctggctgcagcgcctacctgaacctgctgcggccccccaccagcctggccgccctgggcgtgcccttcagcaagaccatggctgtgctgcggcagctggccctgctgctgtggaagaactacaccctgcagaagaggaaggtgctggtgacagtgctggagctgttcctgcccctgctcttcagcggcatcctgatctggctgcggctgaagatccagagtgaaaatgtgcccaatgccaccatctacccaggccagagcatccaggagctgcccctcttcttcaccttccccccacctggggacacctgggagctggcctacatccccagccacagtgatgctgccaagacagtgacagagaccgtgcggcgggccctggtgatcaacatgagggtgcggggcttccccagcgagaaggactttgaggactacatccgctatgacaactgcagcagctctgtgctggccgctgtggtgtttgagcaccccttcaaccacagcaaggagcccctgcccctggccgtgaagtaccacctgcgcttctcctacaccaggaggaactacatgtggacccagacaggcagcttcttcctgaaggagacagagggctggcacaccaccagcctcttccccctcttccccaaccctggcccccgggagcccaccagcccagatggaggagagcccggctacatccgggagggcttcctggccgtgcagcacgctgtggaccgggccatcatggagtaccacgcagatgctgccacccggcagctgttccagaggctgactgtgaccatcaagcgcttcccctacccacccttcatcgctgaccccttcctggtggccatccagtaccagctgcccctgctgctgctgctgtccttcacctacacagccctgaccatcgcccgggctgtggtgcaggagaaggagcggcggctgaaggagtacatgaggatgatgggcctgagctcctggctgcactggagcgcctggttcctgctcttcttcctgttcctgctgattgctgccagcttcatgaccctgctcttctgtgtgaaggtgaagcccaacgtggccgtgctgagcagaagtgaccccagcctggtgctggccttcctgctgtgctttgccatcagcaccatctccttctccttcatggtgtccaccttcttcagcaagggcatgggcatccagtggagggacctgctgagccctgtgaatgtggatgatgacttctgcttcggccaggtgctgggcatgctgctgctggacagcgtgctgtatggcctggtgacctggtacatggaggccgtgtttcctggccagtttggagtgccccagccctggtacttcttcatcatgcccagctactggtgtgggaagcccagggctgtggccggcaaggaggaggaggacagcgaccctgagaaggccctgagaaatgagtactttgaagctgagcctgaggacctggtggccggcatcaagatcaagcacctgagcaaggtgttccgggtgggcaacaaggacagagctgctgtgcgggacctgaacctgaacctgtatgagggccagatcaccgtgctgctgggccacaacggggccggcaagaccaccaccctgtccatgctgaccggcctcttcccccccaccagcggccgggcctacatcagcggctatgagatcagccaggacatggtgcagatcaggaagagcctgggcctgtgcccccagcacgacatcctgtttgacaacctgactgtggccgagcacctgtacttctacgcccagctgaagggcctgagccggcagaagtgcccagaggaggtgaagcagatgctgcacatcatcggcctggaggacaagtggaacagccgcagccgcttcctgagcggcggcatgaggaggaagctgagcattggaattgccctgattgctggcagcaaggtgctgatcctggatgagcccaccagcggcatggatgccatcagccggcgggccatctgggacctgctgcagaggcagaagagtgacaggaccatcgtgctgaccacccacttcatggatgaggccgacctgctgggggacagaattgccatcatggccaagggggagctgcagtgctgcggcagcagcctcttcctgaagcagaagtacggggccggctaccacatgaccctggtgaaggagccccactgcaaccctgaggacatcagccagctggtgcaccaccacgtgcccaatgccaccctggagagcagcgctggagctgagctgtccttcatcctgccccgggagagcacccacagatttgagggcctgtttgccaagctggagaagaagcagaaggagctgggcatcgccagctttggagccagcatcaccaccatggaggaggtgttcctgcgggtgggcaagctggtggacagctccatggacatccaggccatccagctgcctgccctgcagtaccagcatgaaagaagagccagtgactgggccgtggacagcaacctgtgtggggccatggaccccagtgatggcatcggggccctgattgaggaggagaggacagctgtgaagctgaacacaggcctggccctgcactgccagcagttctgggccatgttcctgaagaaggccgcctacagctggagggagtggaagatggtggccgcccaggtgctggtgcccctgacctgtgtgaccctggccctgctggccatcaactacagcagcgagctgtttgatgaccccatgctgcggctgaccctgggggagtatggccgcacagtggtgcccttctctgtgcccggcaccagccagctgggccagcagctgtctgagcacctgaaggatgccctgcaggccgagggccaggagccccgggaggtgctgggggacctggaggagttcctgatcttccgggcctctgtggagggcggcggcttcaatgaacgctgcctggtggccgccagcttcagagatgtgggggagaggacagtggtgaatgccctcttcaacaaccaggcctaccacagccctgccacagccctggccgtggtggacaacctgctcttcaagctgctgtgtggcccccacgccagcatcgtggtgagcaacttcccccagcccaggtctgccctgcaggccgccaaggaccagttcaatgaaggaaggaagggctttgacatcgccctgaacctgctgtttgccatggccttcctggccagcaccttcagcatcctggccgtgtctgaaagagctgtgcaggccaagcacgtgcagtttgtgtctggagtgcacgtggccagcttctggctgagcgccctgctgtgggacctgatctccttcctgatccccagcctgctgctgctggtggtgttcaaggcctttgatgtgcgggccttcaccagagatggccacatggctgacaccctgctgctgctgctgctgtatggctgggccatcatccccctgatgtacctgatgaacttcttcttcctgggcgccgccacagcctacacccggctgaccatcttcaacatcctgagcggcatcgccaccttcctgatggtgaccatcatgaggatcccagctgtgaagctggaggagctgagcaagaccctggaccacgtgttcctggtgctgcccaaccactgcctgggcatggctgtgtcctccttctatgagaactatgagacccggcgctactgcaccagcagcgaggtggccgcccactactgcaagaagtacaacatccagtaccaggagaacttctacgcctggagcgcccctggggtgggccgctttgtggcctccatggccgccagcggctgtgcctacctgatcctgctcttcctgattgagaccaacctgctgcagaggctgcggggcatcctgtgtgccctgcggcggcggaggaccctgacagagctgtacaccaggatgcctgtgctgcctgaggaccaggatgtggctgatgagaggacccgcatcctggcccccagcccagacagcctgctgcacacccccctcatcatcaaggagctgagcaaggtgtatgagcagagggtgcccctgctggccgtggaccggctgagcctggccgtgcagaagggggagtgcttcggcctgctgggcttcaacggggccggcaagaccaccaccttcaagatgctgaccggggaggagagcctgaccagcggagatgcctttgtgggcggccaccgcatcagcagtgatgtgggcaaggtgcggcagagaattggctactgcccccagtttgatgccctgctggaccacatgacaggccgggagatgctggtgatgtatgcccggctgcggggcatccctgagcggcacatcggggcctgtgtggagaacaccctgcggggcctgctgctggagccccacgccaacaagctggtgaggacctacagcggcggcaacaagaggaagctgagcactggaattgccctgattggagagcctgctgtgatcttcctggatgagcccagcacaggcatggaccctgtggcccggcggctgctgtgggacacagtggcccgggcccgggagagcggcaaggccatcatcatcaccagccacagcatggaggagtgtgaggccctgtgcacccggctggccatcatggtgcagggccagttcaagtgcctgggcagcccccagcacctgaagagcaagtttggaagtggctacagcctgcgggccaaggtgcagagcgagggccagcaggaggccctggaggagttcaaggcctttgtggacctgaccttccctggctctgtgctggaggatgagcaccagggcatggtgcactaccacctgcccggccgggacctgtcctgggccaaggtgtttggcatcctggagaaggccaaggagaagtatggagtggatgactacagcgtgtcccagatcagcctggagcaggtgttcctgagctttgcccacctgcagcccccaacagctgaggagggccgctag

SEQ ID NO: 144558 - DNA, 6822 bp, synthetic construct
  misc_feature 1..6822: note = Description of Artificial Sequence: Synthetic coding sequence
  source 1..6822: mol_type = other DNA
atgggctttgtgcggcagatccagctgctgctgtggaagaactggaccctgaggaagaggcagaagatccgctttgtggtggagctggtgtggcccctgagcctcttcctggtgctgatctggctgagaaatgccaaccccctgtacagccaccacgagtgccacttccccaacaaggccatgcccagcgctggcatgctgccctggctgcagggcatcttctgcaatgtgaacaacccctgcttccagagccccaccccaggagagagccctggcatcgtgagcaactacaacaacagcatcctggcccgggtgtacagagacttccaggagctgctgatgaatgcccctgagagccagcacctgggccgcatctggacagagctgcacatcctgagccagttcatggacaccctgcggacccaccctgagagaattgctggccggggcatccgcatccgggacatcctgaaggatgaggagaccctgaccctcttcctgatcaagaacatcggcctgagtgacagcgtggtgtacctgctgatcaacagccaggtgcggcctgagcagtttgcccatggagtgcctgacctggccctgaaggacatcgcctgcagcgaggccctgctggagcgcttcatcatcttcagccagaggagaggagccaagacagtgcgctatgccctgtgcagcctgagccagggcaccctgcagtggattgaggacaccctgtatgccaacgtggacttcttcaagctgttccgggtgctgcccaccctgctggacagccgcagccagggcatcaacctgcgctcctggggcggcatcctgagtgacatgagcccccgcatccaggagttcatccaccggcccagcatgcaggacctgctgtgggtgacccggcccctgatgcagaatggaggccctgagaccttcaccaagctgatgggcatcctgagtgacctgctgtgtggctacccagagggcggcggcagccgggtgctgtccttcaactggtatgaggacaacaactacaaggccttcctgggcatcgacagcaccaggaaggaccccatctacagctatgacaggaggaccaccagcttctgcaatgccctgatccagagcctggagagcaaccccctgaccaagatcgcctggagggctgccaagcccctgctgatgggcaagatcctgtacaccccagacagccctgctgcccggcgcatcctgaagaatgccaacagcacctttgaggagctggagcacgtgaggaagctggtgaaggcctgggaggaggtgggcccccagatctggtacttctttgacaacagcacccagatgaacatgatccgggacaccctgggcaaccccaccgtgaaggacttcctgaaccggcagctgggggaggagggcatcacagctgaggccatcctgaacttcctgtacaagggcccccgggagagccaggctgatgacatggccaactttgactggagggacatcttcaacatcacagacaggaccctgcggctggtgaaccagtacctggagtgcctggtgctggacaagtttgagagctacaatgatgagacccagctgacccagagggccctgagcctgctggaggagaacatgttctgggccggcgtggtgtttcctgacatgtacccctggaccagcagcctgcccccccacgtgaagtacaagatccgcatggacattgatgtggtggagaagaccaacaagatcaaggaccgctactgggacagcggccccagggctgaccctgtggaggacttccgctacatctggggcggctttgcctacctgcaggacatggtggagcagggcatcaccaggagccaggtgcaggccgaggcccctgtgggcatctacctgcagcagatgccctacccctgctttgtggatgacagcttcatgatcatcctgaaccgctgcttccccatcttcatggtgctggcctggatctacagcgtgtccatgacagtgaagagcatcgtgctggagaaggagctgcggctgaaggagaccctgaagaaccagggcgtgtccaatgctgtgatctggtgcacctggttcctggacagcttcagcatcatgtccatgagcatcttcctgctgaccatcttcatcatgcacggccgcatcctgcactacagcgaccccttcatcctcttcctgttcctgctggccttcagcacagccaccatcatgctgtgcttcctgctgagcaccttcttcagcaaggccagcctggccgccgcctgcagcggggtcatctacttcaccctgtacctgccccacatcctgtgctttgcctggcaggacaggatgacagctgagctgaagaaggctgtgtccctgctgagccctgtggccttcggcttcggcacagagtacctggtgcgctttgaggagcagggcctgggcctgcagtggagcaacatcggcaacagccccacagaaggagatgagttctccttcctgctgtccatgcagatgatgctgctggatgctgctgtgtatggcctgctggcctggtacctggaccaggtgtttcctggggactatggcacccccctgccctggtacttcctgctgcaggagagctactggctgggcggggagggctgcagcacccgggaggagcgggccctggagaagacagagcccctgacagaggagacagaagatcctgagcaccctgagggcatccatgacagcttctttgagcgggagcaccctggctgggtgcctggggtgtgtgtgaagaacctggtgaagatctttgagccctgtggccggcctgctgtggaccggctgaacatcaccttctatgagaaccagatcacagccttcctgggccacaatggagctgggaagaccaccaccctgagcatcctgaccggcctgctgccccccaccagcggcaccgtgctggtgggcggccgggacatcgagaccagcctggatgctgtgcggcagagcctgggcatgtgcccccagcacaacatcctcttccaccacctgactgtggccgagcacatgctgttctacgcccagctgaagggcaagagccaggaggaggcccagctggagatggaggccatgctggaggacaccggcctgcaccacaagagaaatgaggaggcccaggacctgagcggcggcatgcagaggaagctgtctgtggccatcgcctttgtgggagatgccaaggtggtgatcctggatgagcccaccagcggcgtggacccctacagcagaagaagcatctgggacctgctgctgaagtacagaagtggccgcaccatcatcatgagcacccaccacatggatgaagctgacctgctgggggaccgcatcgccatcatcgcccagggccgcctgtactgcagcggcacccccctcttcctgaagaactgctttggaacaggcctgtacctgaccctggtgaggaagatgaagaacatccagagccagaggaaaggaagtgagggcacctgcagctgcagcagcaagggcttcagcaccacctgcccagcccacgtggatgacctgaccccagagcaggtgctggatggagatgtgaatgagctgatggatgtggtgctgcaccacgtgcctgaggccaagctggtggagtgcatcggccaggagctgatcttcctgctgcccaacaagaacttcaagcaccgggcctatgccagcctcttccgggagctggaggagaccctggccgacctgggcctgagcagctttggcatcagtgacacccccctggaggagatcttcctgaaggtgacagaggacagcgacagcggccccctgtttgctggaggagcccagcagaagagagaaaatgtgaaccccaggcacccctgcctgggcccccgggagaaggccggccagaccccccaggacagcaatgtgtgcagccctggggccccagctgcccaccctgagggccagcccccacctgagcctgagtgccccggcccccagctgaacacaggcacccagctggtgctgcagcacgtgcaggccctgctggtgaagcgcttccagcacaccatccgcagccacaaggacttcctggcccagatcgtgctgcctgccacctttgtgttcctggccctgatgctgagcatcgtcatccccccatttggagagtacccagccctgaccctgcacccctggatctacggccagcagtacaccttcttctccatggatgagcccggcagcgagcagttcaccgtgctggctgatgtgctgctgaacaagccaggcttcggcaaccgctgcctgaaggagggctggctgcctgagtacccctgtggcaacagcaccccctggaagaccccatctgtgagccccaacatcacccagctgttccagaagcagaagtggacccaggtgaaccccagccccagctgccgctgcagcacccgggagaagctgaccatgctgcctgaatgtcctgagggcgctgggggcctgcccccaccccagaggacccagaggagcacagagatcctgcaggacctgacagacaggaacatcagtgacttcctggtgaagacctacccagccctgatccgcagcagcctgaagagcaagttctgggtgaatgagcagagatatggaggcatcagcatcggcggcaagctgcctgtggtgcccatcaccggggaggccctggtgggcttcctgagtgacctgggccgcatcatgaatgtgtctgggggccccatcacccgggaggccagcaaggagatcccagacttcctgaagcacctggagacagaggacaacatcaaggtgtggttcaacaacaagggctggcacgccctggtgtccttcctgaatgtggcccacaatgccatcctgcgggccagcctgcccaaggacaggagccctgaggagtatggcatcaccgtcatcagccagcccctgaacctgaccaaggagcagctgtctgagatcaccgtgctgaccacctctgtggatgctgtggtggccatctgtgtgatcttctccatgagctttgtgcctgccagctttgtgctgtacctgatccaggagcgggtgaacaagagcaagcacctgcagttcatcagcggcgtgagccccaccacctactgggtgaccaacttcctgtgggacatcatgaactacagcgtgtctgctggcctggtggtgggcatcttcatcggcttccagaagaaggcctacaccagccctgagaacctgcctgccctggtggccctgctgctgctgtatggctgggccgtcatccccatgatgtacccagccagcttcctgtttgatgtgcccagcacagcctacgtggccctgagctgtgccaacctcttcatcggcatcaacagcagcgccatcaccttcatcctggagctgtttgagaacaacagaaccctgctgcgcttcaatgctgtgctgaggaagctgctgattgtgttcccccacttctgcctgggccggggcctgattgacctggccctgagccaggccgtgacagatgtgtatgccaggtttggagaggagcacagcgccaaccccttccactgggacctgattggcaagaacctgtttgccatggtggtggagggcgtggtgtacttcctgctgaccctgctggtgcagaggcacttcttcctgagccagtggattgctgagcccaccaaggagcccatcgtggatgaagatgatgatgtggccgaggagcggcagaggatcatcaccggcggcaacaagacagacatcctgcggctgcacgagctgaccaagatctacccaggcaccagcagccctgctgtggaccggctgtgtgtgggcgtgcggcctggagagtgcttcggcctgctgggcgtgaatggagctgggaagaccaccaccttcaagatgctgaccggggacaccaccgtgaccagcggagatgccaccgtggccggcaagagcatcctgaccaacatcagcgaggtgcaccagaacatgggctactgcccccagtttgatgccattgatgagctgctgaccggccgggagcacctgtacctgtatgcccggctgcggggcgtgcctgctgaggagattgagaaggtggccaactggagcatcaagagcctgggcctgactgtgtatgctgactgcctggccggcacctacagcggcggcaacaagaggaagctgagcacagccatcgccctgattggctgcccccccctggtgctgctggatgagcccaccaccggcatggacccccaggcccggaggatgctgtggaatgtgattgtgtccatcatccgggagggccgggctgtggtgctgaccagccacagcatggaggagtgtgaggccctgtgcacccggctggccatcatggtgaagggggccttccgctgcatgggcaccatccagcacctgaagagcaagtttggagatggctacatcgtgaccatgaagatcaagagccccaaggatgacctgctgcctgacctgaaccctgtggagcagttcttccagggcaacttccctggctctgtgcagcgggagcggcactacaacatgctgcagttccaggtgagcagcagcagcctggcccgcatcttccagctgctgctgagccacaaggacagcctgctgattgaggagtacagcgtgacccagaccaccctggaccaggtgtttgtgaactttgccaagcagcagacagagagccatgacctgcccctgcaccccagggctgctggggccagccggcaggcccaggactag

SEQ ID NO: 144559 - DNA, 2940 bp, synthetic construct
  misc_feature 1..2940: note = Description of Artificial Sequence: Synthetic coding sequence
  source 1..2940: mol_type = other DNA
atgggctttgtgcggcagatccagctgctgctgtggaagaactggaccctgaggaagaggcagaagatccgctttgtggtggagctggtgtggcccctgagcctcttcctggtgctgatctggctgagaaatgccaaccccctgtacagccaccacgagtgccacttccccaacaaggccatgcccagcgctggcatgctgccctggctgcagggcatcttctgcaatgtgaacaacccctgcttccagagccccaccccaggagagagccctggcatcgtgagcaactacaacaacagcatcctggcccgggtgtacagagacttccaggagctgctgatgaatgcccctgagagccagcacctgggccgcatctggacagagctgcacatcctgagccagttcatggacaccctgcggacccaccctgagagaattgctggccggggcatccgcatccgggacatcctgaaggatgaggagaccctgaccctcttcctgatcaagaacatcggcctgagtgacagcgtggtgtacctgctgatcaacagccaggtgcggcctgagcagtttgcccatggagtgcctgacctggccctgaaggacatcgcctgcagcgaggccctgctggagcgcttcatcatcttcagccagaggagaggagccaagacagtgcgctatgccctgtgcagcctgagccagggcaccctgcagtggattgaggacaccctgtatgccaacgtggacttcttcaagctgttccgggtgctgcccaccctgctggacagccgcagccagggcatcaacctgcgctcctggggcggcatcctgagtgacatgagcccccgcatccaggagttcatccaccggcccagcatgcaggacctgctgtgggtgacccggcccctgatgcagaatggaggccctgagaccttcaccaagctgatgggcatcctgagtgacctgctgtgtggctacccagagggcggcggcagccgggtgctgtccttcaactggtatgaggacaacaactacaaggccttcctgggcatcgacagcaccaggaaggaccccatctacagctatgacaggaggaccaccagcttctgcaatgccctgatccagagcctggagagcaaccccctgaccaagatcgcctggagggctgccaagcccctgctgatgggcaagatcctgtacaccccagacagccctgctgcccggcgcatcctgaagaatgccaacagcacctttgaggagctggagcacgtgaggaagctggtgaaggcctgggaggaggtgggcccccagatctggtacttctttgacaacagcacccagatgaacatgatccgggacaccctgggcaaccccaccgtgaaggacttcctgaaccggcagctgggggaggagggcatcacagctgaggccatcctgaacttcctgtacaagggcccccgggagagccaggctgatgacatggccaactttgactggagggacatcttcaacatcacagacaggaccctgcggctggtgaaccagtacctggagtgcctggtgctggacaagtttgagagctacaatgatgagacccagctgacccagagggccctgagcctgctggaggagaacatgttctgggccggcgtggtgtttcctgacatgtacccctggaccagcagcctgcccccccacgtgaagtacaagatccgcatggacattgatgtggtggagaagaccaacaagatcaaggaccgctactgggacagcggccccagggctgaccctgtggaggacttccgctacatctggggcggctttgcctacctgcaggacatggtggagcagggcatcaccaggagccaggtgcaggccgaggcccctgtgggcatctacctgcagcagatgccctacccctgctttgtggatgacagcttcatgatcatcctgaaccgctgcttccccatcttcatggtgctggcctggatctacagcgtgtccatgacagtgaagagcatcgtgctggagaaggagctgcggctgaaggagaccctgaagaaccagggcgtgtccaatgctgtgatctggtgcacctggttcctggacagcttcagcatcatgtccatgagcatcttcctgctgaccatcttcatcatgagcctgctgagccctgtggccttcggcttcggcacagagtacctggtgcgctttgaggagcagggcctgggcctgcagtggagcaacatcggcaacagccccacagaaggagatgagttctccttcctgctgtccatgcagatgatgctgctggatgctgctgtgtatggcctgctggcctggtacctggaccaggtgtttcctggggactatggcacccccctgccctggtacttcctgctgcaggagagctactggctgggcggggagggctgcagcacccgggaggagcgggccctggagaagacagagcccctgacagaggagacagaagatcctgagcaccctgagggcatccatgacagcttctttgagcgggagcaccctggctgggtgcctggggtgtgtgtgaagaacctggtgaagatctttgagccctgtggccggcctgctgtggaccggctgaacatcaccttctatgagaaccagatcacagccttcctgggccacaatggagctgggaagaccaccaccttctctgctggggcccccctgagcagcaagggccctgagcggcacctgctgcggggggagcacggccccccctggttccccaaggagcagcagaccaggaccagccagggcgccgccaacccccgggacaccgtcttcaagagctttggagagccccaggagggcaccacagcctgcaccccctgtgatggcatgttcagcagagctgtgcagtgtgagtggaatgtgggccctgtgcccttctag

SEQ ID NO: 144560 - DNA, 1179 bp, synthetic construct
  misc_feature 1..1179: note = Description of Artificial Sequence: Synthetic coding sequence
  source 1..1179: mol_type = other DNA
atggtggtggagggcgtggtgtacttcctgctgaccctgctggtgcagaggcacttcttcctgagccagtggattgctgagcccaccaaggagcccatcgtggatgaagatgatgatgtggccgaggagcggcagaggatcatcactggaggcaacaagacagacatcctgcggctgcacgagctgaccaagatctacccaggcaccagcagccctgctgtggaccggctgtgtgtgggcgtgcggcctggagaatgttttggcctgctgggcgtgaatggagctgggaagaccaccaccttcaagatgctgactggagacaccaccgtgaccagcggagatgccaccgtggccggcaagagcatcctgaccaacatcagcgaggtgcaccagaacatgggctactgcccccagtttgatgccattgatgagctgctgaccggccgggagcacctgtacctgtatgcccggctgcggggcgtgcctgctgaggagattgagaaggtggccaactggagcatcaagagcctgggcctgactgtgtatgctgactgcctggccggcacctacagcggcggcaacaagaggaagctgagcacagccatcgccctgattggctgcccccccctggtgctgctggatgagcccaccaccggcatggacccccaggcccggaggatgctgtggaatgtcatcgtgtccatcatccgggagggccgggctgtggtgctgaccagccacagcatggaggagtgtgaggccctgtgcacccggctggccatcatggtgaagggggccttccgctgcatgggcaccatccagcacctgaagagcaagtttggagatggctacatcgtgaccatgaagatcaagagccccaaggatgacctgctgcctgacctgaaccctgtggagcagttcttccagggcaacttccctggctctgtgcagcgggagcggcactacaacatgctgcagttccaggtgagcagcagcagcctggcccgcatcttccagctgctgctgagccacaaggacagcctgctgattgaggagtacagcgtgacccagaccaccctggaccaggtgtttgtgaactttgccaagcagcagacagagagccatgacctgcccctgcaccccagggctgctggggccagccggcaggcccaggactag

SEQ ID NO: 144561 - DNA, 1632 bp, synthetic construct
  misc_feature 1..1632: note = Description of Artificial Sequence: Synthetic coding sequence
  source 1..1632: mol_type = other DNA
atgatgatgaactacagcgtgtctgctggcctggtggtgggcatcttcatcggcttccagaagaaggcctacaccagccctgagaacctgcctgccctggtggccctgctgctgctgtatggctgggccgtcatccccatgatgtacccagccagcttcctgtttgatgtgcccagcacagcctacgtggccctgagctgtgccaacctcttcatcggcatcaacagcagcgccatcaccttcatcctggagctgtttgagaacaacagaaccctgctgcgcttcaatgctgtgctgaggaagctgctgattgtgttcccccacttctgcctgggccggggcctgattgacctggccctgagccaggccgtgacagatgtgtatgccaggtttggagaggagcacagcgccaaccccttccactgggacctgattggcaagaacctgtttgccatggtggtggagggcgtggtgtacttcctgctgaccctgctggtgcagaggcacttcttcctgagccagtggattgctgagcccaccaaggagcccatcgtggatgaagatgatgatgtggccgaggagcggcagaggatcatcaccggcggcaacaagacagacatcctgcggctgcacgagctgaccaagatctacccaggcaccagcagccctgctgtggaccggctgtgtgtgggcgtgcggcctggagagtgcttcggcctgctgggcgtgaatggagctgggaagaccaccaccttcaagatgctgaccggggacaccaccgtgaccagcggagatgccaccgtggccggcaagagcatcctgaccaacatcagcgaggtgcaccagaacatgggctactgcccccagtttgatgccattgatgagctgctgaccggccgggagcacctgtacctgtatgcccggctgcggggcgtgcctgctgaggagattgagaaggtggccaactggagcatcaagagcctgggcctgactgtgtatgctgactgcctggccggcacctacagcggcggcaacaagaggaagctgagcacagccatcgccctgattggctgcccccccctggtgctgctggatgagcccaccaccggcatggacccccaggcccggaggatgctgtggaatgtgattgtgtccatcatccgggagggccgggctgtggtgctgaccagccacagcatggaggagtgtgaggccctgtgcacccggctggccatcatggtgaagggggccttccgctgcatgggcaccatccagcacctgaagagcaagtttggagatggctacatcgtgaccatgaagatcaagagccccaaggatgacctgctgcctgacctgaaccctgtggagcagttcttccagggcaacttccctggctctgtgcagcgggagcggcactacaacatgctgcagttccaggtgagcagcagcagcctggcccgcatcttccagctgctgctgagccacaaggacagcctgctgattgaggagtacagcgtgacccagaccaccctggaccaggtgtttgtgaactttgccaagcagcagacagagagccatgacctgcccctgcaccccagggctgctggggccagccggcaggcccaggactag

SEQ ID NO: 144562 - DNA, 3198 bp, synthetic construct
  misc_feature 1..3198: note = Description of Artificial Sequence: Synthetic coding sequence
  source 1..3198: mol_type = other DNA
atggatgtggtgctgcaccacgtgcctgaggccaagctggtggagtgcatcggccaggagctgatcttcctgctgcccaacaagaacttcaagcaccgggcctatgccagcctcttccgggagctggaggagaccctggccgacctgggcctgagcagctttggcatcagtgacacccccctggaggagatcttcctgaaggtgacagaggacagcgacagcggccccctgtttgctggaggagcccagcagaagagagaaaatgtgaaccccaggcacccctgcctgggcccccgggagaaggccggccagaccccccaggacagcaatgtgtgcagccctggggccccagctgcccaccctgagggccagcccccacctgagcctgagtgccccggcccccagctgaacacaggcacccagctggtgctgcagcacgtgcaggccctgctggtgaagcgcttccagcacaccatccgcagccacaaggacttcctggcccagatcgtgctgcctgccacctttgtgttcctggccctgatgctgagcatcgtcatccccccatttggagagtacccagccctgaccctgcacccctggatctacggccagcagtacaccttcttctccatggatgagcccggcagcgagcagttcaccgtgctggctgatgtgctgctgaacaagccaggcttcggcaaccgctgcctgaaggagggctggctgcctgagtacccctgtggcaacagcaccccctggaagaccccatctgtgagccccaacatcacccagctgttccagaagcagaagtggacccaggtgaaccccagccccagctgccgctgcagcacccgggagaagctgaccatgctgcctgaatgtcctgagggcgctgggggcctgcccccaccccagaggacccagaggagcacagagatcctgcaggacctgacagacaggaacatcagtgacttcctggtgaagacctacccagccctgatccgcagcagcctgaagagcaagttctgggtgaatgagcagagatatggaggcatcagcatcggcggcaagctgcctgtggtgcccatcaccggggaggccctggtgggcttcctgagtgacctgggccgcatcatgaatgtgtctgggggccccatcacccgggaggccagcaaggagatcccagacttcctgaagcacctggagacagaggacaacatcaaggtgtggttcaacaacaagggctggcacgccctggtgtccttcctgaatgtggcccacaatgccatcctgcgggccagcctgcccaaggacaggagccctgaggagtatggcatcaccgtcatcagccagcccctgaacctgaccaaggagcagctgtctgagatcaccgtgctgaccacctctgtggatgctgtggtggccatctgtgtgatcttctccatgagctttgtgcctgccagctttgtgctgtacctgatccaggagcgggtgaacaagagcaagcacctgcagttcatcagcggcgtgagccccaccacctactgggtgaccaacttcctgtgggacatcatgaactacagcgtgtctgctggcctggtggtgggcatcttcatcggcttccagaagaaggcctacaccagccctgagaacctgcctgccctggtggccctgctgctgctgtatggctgggccgtcatccccatgatgtacccagccagcttcctgtttgatgtgcccagcacagcctacgtggccctgagctgtgccaacctcttcatcggcatcaacagcagcgccatcaccttcatcctggagctgtttgagaacaacagaaccctgctgcgcttcaatgctgtgctgaggaagctgctgattgtgttcccccacttctgcctgggccggggcctgattgacctggccctgagccaggccgtgacagatgtgtatgccaggtttggagaggagcacagcgccaaccccttccactgggacctgattggcaagaacctgtttgccatggtggtggagggcgtggtgtacttcctgctgaccctgctggtgcagaggcacttcttcctgagccagtggattgctgagcccaccaaggagcccatcgtggatgaagatgatgatgtggccgaggagcggcagaggatcatcaccggcggcaacaagacagacatcctgcggctgcacgagctgaccaagatctacccaggcaccagcagccctgctgtggaccggctgtgtgtgggcgtgcggcctggagagtgcttcggcctgctgggcgtgaatggagctgggaagaccaccaccttcaagatgctgaccggggacaccaccgtgaccagcggagatgccaccgtggccggcaagagcatcctgaccaacatcagcgaggtgcaccagaacatgggctactgcccccagtttgatgccattgatgagctgctgaccggccgggagcacctgtacctgtatgcccggctgcggggcgtgcctgctgaggagattgagaaggtggccaactggagcatcaagagcctgggcctgactgtgtatgctgactgcctggccggcacctacagcggcggcaacaagaggaagctgagcacagccatcgccctgattggctgcccccccctggtgctgctggatgagcccaccaccggcatggacccccaggcccggaggatgctgtggaatgtgattgtgtccatcatccgggagggccgggctgtggtgctgaccagccacagcatggaggagtgtgaggccctgtgcacccggctggccatcatggtgaagggggccttccgctgcatgggcaccatccagcacctgaagagcaagtttggagatggctacatcgtgaccatgaagatcaagagccccaaggatgacctgctgcctgacctgaaccctgtggagcagttcttccagggcaacttccctggctctgtgcagcgggagcggcactacaacatgctgcagttccaggtgagcagcagcagcctggcccgcatcttccagctgctgctgagccacaaggacagcctgctgattgaggagtacagcgtgacccagaccaccctggaccaggtgtttgtgaactttgccaagcagcagacagagagccatgacctgcccctgcaccccagggctgctggggccagccggcaggcccaggactag

SEQ ID NO: 144563 - DNA, 4929 bp, synthetic construct
  misc_feature 1..4929: note = Description of Artificial Sequence: Synthetic coding sequence
  source 1..4929: mol_type = other DNA
atgagcacagccatccgggaggtgggcgtgtggaggcagaccaggaccctgctgctgaagaactacctgatcaagtgcaggaccaagaagagctctgtgcaggagatcctcttccccctcttcttcctgttctggctgatcctgatctccatgatgcaccccaacaagaagtatgaggaggtgcccaacatcgagctgaaccccatggacaagttcaccctgagcaacctgatcctgggctacacccctgtgaccaacatcaccagcagcatcatgcagaaggtgtccacagaccacctgcctgatgtgatcatcacagaggagtacaccaatgagaaggagatgctgaccagcagcctgagcaagcccagcaactttgtgggcgtggtgttcaaggacagcatgtcctatgagctgcgcttcttcccagacatgatccctgtgagcagcatctacatggacagcagagctggctgcagcaagagctgtgaggccgcccagtactggagcagcggcttcaccgtgctgcaggccagcattgatgctgccatcatccagctgaagaccaacgtgtccctgtggaaggagctggagagcaccaaggccgtcatcatgggagaaacagctgtggtggagattgacaccttcccccggggcgtcatcctgatctacctggtgattgccttcagccccttcggctacttcctggccatccacatcgtggccgagaaggagaagaagatcaaggagttcctgaagatcatgggcctgcatgacacagccttctggctgtcctgggtgctgctgtacaccagcctcatcttcctgatgagcctgctgatggccgtcatcgccacagccagcctgctcttcccccagagcagcagcatcgtcatcttcctgctcttcttcctgtatggcctgagcagcgtcttctttgccctgatgctgacccccctcttcaagaagagcaagcacgtgggcatcgtggagttctttgtgacagtggccttcggcttcatcggcctgatgatcatcctgattgagagcttccccaagagcctggtgtggctgttcagccccttctgccactgcacctttgtgattggaattgcccaggtgatgcacctggaggacttcaatgaaggagccagcttcagcaacctgacagctggcccctaccccctcatcatcaccatcatcatgctgaccctgaacagcatcttctacgtgctgctggccgtgtacctggaccaggtgattcctggagaatttggcctgcggcgcagcagcctgtacttcctgaagcccagctactggagcaagagcaagagaaattatgaggagctgtctgagggcaatgtgaatggaaacatctccttcagcgagatcatcgagcctgtgagcagcgagtttgtgggcaaggaggccatccgcatcagcggcatccagaagacctacaggaagaagggggagaatgtggaggccctgaggaacctgagctttgacatctatgagggccagatcacagccctgctgggccacagcggcaccgggaagagcaccctgatgaacatcctgtgtggcctgtgccccccatctgatggctttgccagcatctacggccaccgggtgtctgaaattgatgagatgtttgaggccaggaagatgattggcatctgcccccagctggacatccactttgatgtgctgactgtggaggagaacctgagcatcctggccagcatcaagggcatcccagccaacaacatcatccaggaggtgcagaaggtgctgctggacctggacatgcagaccatcaaggacaaccaggccaagaagctgagcggcggccagaagaggaagctgagcctgggcattgctgtgctgggcaaccccaagatcctgctgctggatgagcccacagctggcatggacccctgcagccgccacatcgtgtggaacctgctgaagtacaggaaggccaacagagtgaccgtcttcagcacccacttcatggatgaggccgacatcctggccgacaggaaggccgtcatcagccagggcatgctgaagtgtgtgggcagctccatgttcctgaagagcaagtggggcatcggctaccgcctgtccatgtacatcgacaagtactgtgccacagagagcctgagcagcctggtgaagcagcacatccctggggccaccctgctgcagcagaatgaccagcagctggtgtacagcctgcccttcaaggacatggacaagttcagcggcctcttcagcgccctggacagccacagcaacctgggcgtcatctcctatggagtgtccatgaccaccctggaggatgtgttcctgaagctggaggtggaggccgagattgaccaggccgactacagcgtcttcacccagcagcccctggaggaggagatggacagcaagagctttgatgagatggagcagagcctgctgatcctgtctgagaccaaggccgccctggtgtccaccatgagcctgtggaagcagcagatgtacaccatcgccaagttccacttcttcaccctgaagcgggagagcaagtctgtgcgctctgtgctgctgctgctgctgatcttcttcaccgtgcagatcttcatgttcctggtgcaccacagcttcaagaatgctgtggtgcccatcaagctggtgcctgacctgtacttcctgaagccaggggacaagccccacaagtacaagaccagcctgctgctgcagaacagcgctgacagcgacatcagtgacctgatctccttcttcaccagccagaacatcatggtgaccatgatcaatgacagcgactatgtgtctgtggccccccacagcgctgccctgaatgtgatgcacagcgagaaggactatgtgtttgctgctgtgttcaacagcaccatggtgtacagcctgcccatcctggtgaacatcatcagcaactactacctgtaccacctgaatgtgacagagaccatccagatctggagcacccccttcttccaggagatcacagacatcgtgttcaagattgagctgtacttccaggccgccctgctgggcatcatcgtgacagccatgccaccctactttgccatggagaatgctgagaaccacaagatcaaggcctacacccagctgaagctgagcggcctgctgcccagcgcctactggattggccaggccgtggtggacatccccctcttcttcatcatcctgatcctgatgctgggcagcctgctggccttccactacggcctgtacttctacacagtgaagttcctggccgtggtgttctgcctgattggctacgtgcccagcgtcatcctcttcacctacatcgccagcttcaccttcaagaagatcctgaacaccaaggagttctggagcttcatctacagcgtggccgccctggcctgcatcgccatcacagagatcaccttcttcatgggctacaccatcgccaccatcctgcactacgccttctgcatcatcatccccatctaccccctgctgggctgcctgatctccttcatcaagatctcctggaagaatgtgaggaagaatgtggacacctacaacccctgggaccggctgtctgtggccgtcatcagcccctacctgcagtgtgtgctgtggatcttcctgctgcagtactatgagaagaagtatggaggccgcagcatcaggaaggaccccttcttcaggaacctgagcaccaagagcaagaacaggaagctgcctgagcccccagacaatgaagatgaagatgaagatgtgaaggccgagcggctgaaggtgaaggagctgatgggctgccagtgctgtgaggagaagcccagcatcatggtgagcaacctgcacaaggagtatgatgacaagaaggacttcctgctgagcaggaaggtgaagaaggtggccaccaagtacatctccttctgtgtgaagaagggggagatcctgggcctgctgggccccaatggagctgggaagagcaccatcatcaacatcctggtgggggacatcgagcccaccagcggccaggtgttcctgggggactacagcagcgagaccagtgaagatgatgacagcctgaagtgcatgggctactgcccccagatcaaccccctgtggccagacaccaccctgcaggagcactttgagatctacggggctgtgaagggcatgtctgccagtgacatgaaggaggtgatcagccgcatcacccacgccctggacctgaaggagcacctgcagaagacagtgaagaagctgcctgctggcatcaagaggaagctgtgctttgccctgtccatgctgggcaacccccagatcaccctgctggatgagcccagcacaggcatggaccccaaggccaagcagcacatgtggagggccatcagaacagccttcaagaacaggaagagagctgccatcctgaccacccactacatggaggaggccgaggccgtgtgtgacagagtggccatcatggtgtctggccagctgcgctgcatcggcaccgtgcagcacctgaagagcaagtttgggaagggctacttcctggagatcaagctgaaggactggattgagaacctggaggtggaccggctgcagcgggagatccagtacatcttccccaatgccagccggcaggagagcttcagcagcatcctggcctacaagatccccaaggaggatgtgcagagcctgagccagagcttcttcaagctggaggaggccaagcacgcctttgccatcgaggagtacagcttcagccaggccaccctggagcaggtgtttgtggagctgaccaaggagcaggaggaggaggacaacagctgtggcaccctgaacagcaccctgtggtgggagaggacccaggaggacagagtggtgttctag

SEQ ID NO: 144564 - DNA, 4932 bp, synthetic construct
  misc_feature 1..4932: note = Description of Artificial Sequence: Synthetic coding sequence
  source 1..4932: mol_type = other DNA
atgagcacagccatccgggaggtgggcgtgtggaggcagaccaggaccctgctgctgaagaactacctgatcaagtgcaggaccaagaagagctctgtgcaggagatcctcttccccctcttcttcctgttctggctgatcctgatctccatgatgcaccccaacaagaagtatgaggaggtgcccaacatcgagctgaaccccatggacaagttcaccctgagcaacctgatcctgggctacacccctgtgaccaacatcaccagcagcatcatgcagaaggtgtccacagaccacctgcctgatgtgatcatcacagaggagtacaccaatgagaaggagatgctgaccagcagcctgagcaagcccagcaactttgtgggcgtggtgttcaaggacagcatgtcctatgagctgcgcttcttcccagacatgatccctgtgagcagcatctacatggacagcagagctggctgcagcaagagctgtgaggccgcccagtactggagcagcggcttcaccgtgctgcaggccagcattgatgctgccatcatccagctgaagaccaacgtgtccctgtggaaggagctggagagcaccaaggccgtcatcatgggagaaacagctgtggtggagattgacaccttcccccggggcgtcatcctgatctacctggtgattgccttcagccccttcggctacttcctggccatccacatcgtggccgagaaggagaagaagatcaaggagttcctgaagatcatgggcctgcatgacacagccttctggctgtcctgggtgctgctgtacaccagcctcatcttcctgatgagcctgctgatggccgtcatcgccacagccagcctgctcttcccccagagcagcagcatcgtcatcttcctgctcttcttcctgtatggcctgagcagcgtcttctttgccctgatgctgacccccctcttcaagaagagcaagcacgtgggcatcgtggagttctttgtgacagtggccttcggcttcatcggcctgatgatcatcctgattgagagcttccccaagagcctggtgtggctgttcagccccttctgccactgcacctttgtgattggaattgcccaggtgatgcacctggaggacttcaatgaaggagccagcttcagcaacctgacagctggcccctaccccctcatcatcaccatcatcatgctgaccctgaacagcatcttctacgtgctgctggccgtgtacctggaccaggtgattcctggagaatttggcctgcggcgcagcagcctgtacttcctgaagcccagctactggagcaagagcaagagaaattatgaggagctgtctgagggcaatgtgaatggaaacatctccttcagcgagatcatcgagcctgtgagcagcgagtttgtgggcaaggaggccatccgcatcagcggcatccagaagacctacaggaagaagggggagaatgtggaggccctgaggaacctgagctttgacatctatgagggccagatcacagccctgctgggccacagcggcaccgggaagagcaccctgatgaacatcctgtgtggcctgtgccccccatctgatggctttgccagcatctacggccaccgggtgtctgaaattgatgagatgtttgaggccaggaagatgattggcatctgcccccagctggacatccactttgatgtgctgactgtggaggagaacctgagcatcctggccagcatcaagggcatcccagccaacaacatcatccaggaggtgcagaaggtgctgctggacctggacatgcagaccatcaaggacaaccaggccaagaagctgagcggcggccagaagaggaagctgagcctgggcattgctgtgctgggcaaccccaagatcctgctgctggatgagcccacagctggcatggacccctgcagccgccacatcgtgtggaacctgctgaagtacaggaaggccaacagagtgaccgtcttcagcacccacttcatggatgaggccgacatcctggccgacaggaaggccgtcatcagccagggcatgctgaagtgtgtgggcagctccatgttcctgaagagcaagtggggcatcggctaccgcctgtccatgtacatcgacaagtactgtgccacagagagcctgagcagcctggtgaagcagcacatccctggggccaccctgctgcagcagaatgaccagcagctggtgtacagcctgcccttcaaggacatggacaagttcagcggcctcttcagcgccctggacagccacagcaacctgggcgtcatctcctatggagtgtccatgaccaccctggaggatgtgttcctgaagctggaggtggaggccgagattgaccaggccgactacagcgtcttcacccagcagcccctggaggaggagatggacagcaagagctttgatgagatggagcagagcctgctgatcctgtctgagaccaaggccgccctggtgtccaccatgagcctgtggaagcagcagatgtacaccatcgccaagttccacttcttcaccctgaagcgggagagcaagtctgtgcgctctgtgctgctgctgctgctgatcttcttcaccgtgcagatcttcatgttcctggtgcaccacagcttcaagaatgctgtggtgcccatcaagctggtgcctgacctgtacttcctgaagccaggggacaagccccacaagtacaagaccagcctgctgctgcagaacagcgctgctgacagcgacatcagtgacctgatctccttcttcaccagccagaacatcatggtgaccatgatcaatgacagcgactatgtgtctgtggccccccacagcgctgccctgaatgtgatgcacagcgagaaggactatgtgtttgctgctgtgttcaacagcaccatggtgtacagcctgcccatcctggtgaacatcatcagcaactactacctgtaccacctgaatgtgacagagaccatccagatctggagcacccccttcttccaggagatcacagacatcgtgttcaagattgagctgtacttccaggccgccctgctgggcatcatcgtgacagccatgccaccctactttgccatggagaatgctgagaaccacaagatcaaggcctacacccagctgaagctgagcggcctgctgcccagcgcctactggattggccaggccgtggtggacatccccctcttcttcatcatcctgatcctgatgctgggcagcctgctggccttccactacggcctgtacttctacacagtgaagttcctggccgtggtgttctgcctgattggctacgtgcccagcgtcatcctcttcacctacatcgccagcttcaccttcaagaagatcctgaacaccaaggagttctggagcttcatctacagcgtggccgccctggcctgcatcgccatcacagagatcaccttcttcatgggctacaccatcgccaccatcctgcactacgccttctgcatcatcatccccatctaccccctgctgggctgcctgatctccttcatcaagatctcctggaagaatgtgaggaagaatgtggacacctacaacccctgggaccggctgtctgtggccgtcatcagcccctacctgcagtgtgtgctgtggatcttcctgctgcagtactatgagaagaagtatggaggccgcagcatcaggaaggaccccttcttcaggaacctgagcaccaagagcaagaacaggaagctgcctgagcccccagacaatgaagatgaagatgaagatgtgaaggccgagcggctgaaggtgaaggagctgatgggctgccagtgctgtgaggagaagcccagcatcatggtgagcaacctgcacaaggagtatgatgacaagaaggacttcctgctgagcaggaaggtgaagaaggtggccaccaagtacatctccttctgtgtgaagaagggggagatcctgggcctgctgggccccaacggggccggcaagagcaccatcatcaacatcctggtgggggacatcgagcccaccagcggccaggtgttcctgggggactacagcagcgagaccagtgaagatgatgacagcctgaagtgcatgggctactgcccccagatcaaccccctgtggccagacaccaccctgcaggagcactttgagatctatggagctgtgaagggcatgtctgccagtgacatgaaggaggtgatcagccgcatcacccacgccctggacctgaaggagcacctgcagaagacagtgaagaagctgcctgctggcatcaagaggaagctgtgctttgccctgtccatgctgggcaacccccagatcaccctgctggatgagcccagcacaggcatggaccccaaggccaagcagcacatgtggagggccatcagaacagccttcaagaacaggaagagagctgccatcctgaccacccactacatggaggaggccgaggccgtgtgtgacagagtggccatcatggtgtctggccagctgcgctgcattggaacagtgcagcacctgaagagcaagtttgggaagggctacttcctggagatcaagctgaaggactggattgagaacctggaggtggaccggctgcagcgggagatccagtacatcttccccaatgccagccggcaggagagcttcagcagcatcctggcctacaagatccccaaggaggatgtgcagagcctgagccagagcttcttcaagctggaggaggccaagcacgcctttgccatcgaggagtacagcttcagccaggccaccctggagcaggtgtttgtggagctgaccaaggagcaggaggaggaggacaacagctgtggcaccctgaacagcaccctgtggtgggagaggacccaggaggacagagtggtgttctag

SEQ ID NO: 144565 - DNA, 4854 bp, synthetic construct
  misc_feature 1..4854: note = Description of Artificial Sequence: Synthetic coding sequence
  source 1..4854: mol_type = other DNA
atgaacatgaagcagaagtctgtgtaccagcagaccaaggccctgctgtgcaagaacttcctgaagaagtggaggatgaagcgggagagcctgctggagtggggcctgagcatcctgctgggcctgtgcatcgccctcttcagcagctccatgagaaatgtgcagtttcctggcatggccccccagaacctgggccgggtggacaagttcaacagcagcagcctgatggtggtgtacacccccatcagcaacctgacccagcagatcatgaacaagacagccctggcccccctgctgaagggcacctctgtgattggagcccccaacaagacccacatggatgagatcctgctggagaacctgccctatgccatgggcatcatcttcaatgagaccttctcctacaagctgatcttcttccagggctacaacagccccctgtggaaggaggacttcagcgcccactgctgggatggctacggggagttcagctgcaccctgaccaagtactggaacagaggatttgtggccctgcagacagccatcaacacagccatcatcgagatcaccaccaaccaccctgtgatggaggagctgatgtctgtgacagccatcaccatgaagaccctgcccttcatcaccaagaacctgctgcacaatgagatgttcatcctcttcttcctgctgcacttcagccccctggtgtacttcatcagcctgaatgtgaccaaggagaggaagaagagcaagaacctgatgaagatgatgggcctgcaggacagcgccttctggctgtcctggggcctcatctatgccggcttcatcttcatcatcagcatctttgtgaccatcatcatcaccttcacccagatcatcgtgatgacaggcttcatggtgatcttcatcctcttcttcctgtatggcctgagcctggtggccctggtgttcctgatgtctgtgctgctgaagaaggctgtgctgaccaacctggtggtgttcctgctgaccctcttctggggctgcctgggcttcaccgtcttctatgagcagctgcccagcagcctggagtggatcctgaacatctgcagcccctttgccttcaccaccggcatgatccagatcatcaagctggactacaacctgaatggagtcatcttcccagaccccagcggggacagctacaccatgattgccaccttctccatgctgctgctggatggcctcatctacctgctgctggccctgtactttgacaagatcctgccctatggagatgagcggcactacagccccctcttcttcctgaacagcagcagctgcttccagcaccagaggaccaatgccaaggtgattgagaaggagattgatgctgagcaccccagtgatgactactttgagcctgtggcccctgagttccagggcaaggaggccatccgcatcagaaatgtgaagaaggagtacaagggcaagagcggcaaggtggaggccctgaagggcctgctgtttgacatctatgagggccagatcacagccatcctgggccacagcggggccggcaagagcagcctgctgaacatcctgaatggcctgtctgtgcccacagagggctctgtgaccatctacaacaagaacctgtctgagatgcaggacctggaggagatcaggaagatcaccggggtgtgcccccagttcaacgtgcagtttgacatcctgactgtgaaggagaacctgagcctgtttgccaagatcaagggcatccacctgaaggaggtggagcaggaggtgcagaggatcctgctggagctggacatgcagaacatccaggacaacctggccaagcacctgtctgagggccagaagaggaagctgaccttcggcatcaccatcctgggggacccccagatcctgctgctggatgagcccaccaccggcctggaccccttcagccgggaccaggtgtggagcctgctgcgggagcggcgggctgaccacgtgatcctcttcagcacccagagcatggatgaggccgacatcctggccgacaggaaggtgatcatgagcaatggccgcctgaagtgtgccggcagctccatgttcctgaagaggcgctggggcctgggctaccacctgagcctgcacagaaatgagatctgcaaccctgagcagatcaccagcttcatcacccaccacatcccagatgccaagctgaagacagagaacaaggagaagctggtgtacaccctgcccctggagaggaccaacaccttcccagacctcttcagtgacctggacaagtgcagcgaccagggcgtgacaggctatgacatctccatgagcaccctgaatgaggtgttcatgaagctggagggccagagcaccatcgagcaggactttgagcaggtggagatgatccgggacagcgagagcctgaatgagatggagctggcccacagcagcttcagcgagatgcagacagctgtgtctgacatgggcctgtggaggatgcaggtgtttgccatggcccggctgcgcttcctgaagctgaagaggcagaccaaggtgctgctgaccctgctgctggtgtttggcatcgccatcttccccctcatcgtggagaacatcatgtatgccatgctgaatgagaagattgactgggagttcaagaatgagctgtacttcctgagccctggccagctgccccaggagcccaggaccagcctgctgatcatcaacaacacagagagcaacatcgaggacttcatcaagagcctgaagcaccagaacatcctgctggaggtggatgactttgaaaatagaaatggaacagatggcctgagctacaacggggccatcatcgtgtctgggaagcagaaggactaccgcttctctgtggtgtgcaacaccaagaggctgcactgcttccccatcctgatgaacatcatcagcaatggcctgctgcagatgttcaaccacacccagcacatcagaattgagagcagccccttccccctgagccacatcggcctgtggacaggcctgcctgatggcagcttcttcctgttcctggtgctgtgcagcatcagcccctacatcaccatgggcagcatcagtgactacaagaagaatgccaagagccagctgtggatcagcggcctgtacaccagcgcctactggtgtggccaggccctggtggatgtgtccttcttcatcctgatcctgctgctgatgtacctgatcttctacatcgagaacatgcagtacctgctgatcaccagccagatcgtgtttgccctggtgattgtgaccccaggctacgccgccagcctggtgttcttcatctacatgatctccttcatcttcaggaagaggaggaagaacagcggcctgtggagcttctacttcttctttgccagcaccatcatgttcagcatcaccctcatcaaccactttgacctgagcatcctgatcaccaccatggtgctggtgcccagctacaccctgctgggcttcaagaccttcctggaggtgcgggaccaggagcactaccgggagttccctgaggccaactttgagctgagcgccacagacttcctggtgtgcttcatcccctacttccagaccctgctgtttgtgtttgtgctgcgctgcatggagctgaagtgtgggaagaagaggatgaggaaggaccccgtcttccgcatcagcccccagagcagagatgccaagcccaaccctgaggagcccattgatgaagatgaggacatccagacagagcgcatcagaacagccacagccctgaccaccagcatcctggatgagaagcctgtgatcatcgccagctgcctgcacaaggagtatgccggccagaagaagagctgcttcagcaagaggaagaagaagattgctgccaggaacatctccttctgtgtgcaggagggggagatcctgggcctgctgggccccaacggggccggcaagagcagcagcatccgcatgatcagcggcatcaccaagcccacagctggggaggtggagctgaagggctgcagctctgtgctgggccacctgggctactgcccccaggagaatgtgctgtggcccatgctgaccctgcgggagcacctggaggtgtatgctgctgtgaagggcctgaggaaggcagatgcccggctggccatcgcccggctggtgtctgccttcaagctgcacgagcagctgaatgtgcctgtgcagaagctgacagctggcatcaccaggaagctgtgctttgtgctgagcctgctgggcaacagccctgtgctgctgctggatgagcccagcactggaattgaccccaccggccagcagcagatgtggcaggccatccaggccgtggtgaagaacacagagcggggcgtgctgctgaccacccacaacctggccgaggccgaggccctgtgtgacagagtggccatcatggtgtctggccgcctgcgctgcatcggcagcatccagcacctgaagaacaagctgggcaaggactacatcctggagctgaaggtgaaggagaccagccaggtgaccctggtgcacacagagatcctgaagctgttcccccaggccgccggccaggagcgctacagcagcctgctgacctacaagctgcctgtggctgatgtgtaccccctgagccagaccttccacaagctggaggccgtgaagcacaacttcaacctggaggagtacagcctgagccagtgcaccctggagaaggtgttcctggagctgagcaaggagcaggaggtgggcaactttgatgaggagattgacaccaccatgcgctggaagctgctgccccacagtgatgagccctag

SEQ ID NO: 144566 - DNA, 1434 bp, synthetic construct
  misc_feature 1..1434: note = Description of Artificial Sequence: Synthetic coding sequence
  source 1..1434: mol_type = other DNA
atgttcagcatcaccctcatcaaccactttgacctgagcatcctgatcaccaccatggtgctggtgcccagctacaccctgctgggcttcaagaccttcctggaggtgcgggaccaggagcactaccgggagttccctgaggccaactttgagctgagcgccacagacttcctggtgtgcttcatcccctacttccagaccctgctgtttgtgtttgtgctgcgctgcatggagctgaagtgtgggaagaagaggatgaggaaggaccccgtcttccgcatcagcccccagagcagagatgccaagcccaaccctgaggagcccattgatgaagatgaggacatccagacagagcgcatcagaacagccacagccctgaccaccagcatcctggatgagaagcctgtgatcatcgccagctgcctgcacaaggagtatgccggccagaagaagagctgcttcagcaagaggaagaagaagattgctgccaggaacatctccttctgtgtgcaggagggggagatcctgggcctgctgggccccaacggggccggcaagagcagcagcatccgcatgatcagcggcatcaccaagcccacagctggggaggtggagctgaagggctgcagctctgtgctgggccacctgggctactgcccccaggagaatgtgctgtggcccatgctgaccctgcgggagcacctggaggtgtatgctgctgtgaagggcctgaggaaggcagatgcccggctggccatcgcccggctggtgtctgccttcaagctgcacgagcagctgaatgtgcctgtgcagaagctgacagctggcatcaccaggaagctgtgctttgtgctgagcctgctgggcaacagccctgtgctgctgctggatgagcccagcactggaattgaccccaccggccagcagcagatgtggcaggccatccaggccgtggtgaagaacacagagcggggcgtgctgctgaccacccacaacctggccgaggccgaggccctgtgtgacagagtggccatcatggtgtctggccgcctgcgctgcatcggcagcatccagcacctgaagaacaagctgggcaaggactacatcctggagctgaaggtgaaggagaccagccaggtgaccctggtgcacacagagatcctgaagctgttcccccaggccgccggccaggagcgctacagcagcctgctgacctacaagctgcctgtggctgatgtgtaccccctgagccagaccttccacaagctggaggccgtgaagcacaacttcaacctggaggagtacagcctgagccagtgcaccctggagaaggtgttcctggagctgagcaaggagcaggaggtgggcaactttgatgaggagattgacaccaccatgcgctggaagctgctgccccacagtgatgagccctag

SEQ ID NO: 144567 - DNA, 6441 bp, synthetic construct
  misc_feature 1..6441: note = Description of Artificial Sequence: Synthetic coding sequence
  source 1..6441: mol_type = other DNA
atggccttctggacccagctgatgctgctgctgtggaagaacttcatgtacagaagacggcagcctgtgcagctgctggtggagctgctgtggcccctcttcctgttcttcatcctggtggccgtgcgccacagccacccccccctggagcaccacgagtgccacttccccaacaagcccctgcccagcgctggcaccgtgccctggctgcagggcctcatctgcaatgtgaacaacacctgcttcccccagctgaccccaggagaggagcccggccgcctgagcaacttcaatgacagcctggtgtcccggctgctggctgatgccaggacagtgctgggcggggccagcgcccacaggaccctggccggcctgggcaagctgattgccaccctgcgggccgcccggagcacagcccagccccagcccaccaagcagagccccctggagccccccatgctggatgtggccgagctgctgaccagcctgctgaggacagagagcctgggcctggccctgggccaggcccaggagcccctgcacagcctgctggaggccgctgaggacctggcccaggagctgctggccctgcggagcctggtggagctgcgggccctgctgcagaggccccggggcaccagcggccccctggagctgctgtctgaggccctgtgcagcgtgcggggccccagcagcacagtgggccccagcctgaactggtatgaggccagtgacctgatggagctggtgggccaggagcctgagagcgccctgcctgacagcagcctgagccctgcctgcagcgagctgattggagccctggacagccaccccctgagccggctgctgtggaggcggctgaagcccctcatcctgggcaagctgctgtttgccccagacacccccttcaccaggaagctgatggcccaggtgaacagaacatttgaggagctgaccctgctgagagatgtgcgggaggtgtgggagatgctgggcccccgcatcttcaccttcatgaatgacagcagcaatgtggccatgctgcagaggctgctgcagatgcaggatgagggccggcggcagcccaggcctgggggccgggaccacatggaggccctgcgctccttcctggaccccggcagcggcggctacagctggcaggatgcccatgctgatgtgggccacctggtgggcaccctgggccgggtgacagaatgtctgagcctggacaagctggaggccgcccccagcgaggccgccctggtgtcccgggccctgcagctgctggccgagcaccgcttctgggccggcgtggtgttcctgggccctgaggacagcagtgaccccacagagcaccccaccccagacctgggccctggccacgtgcgcatcaagatccgcatggacattgatgtggtgaccaggaccaacaagatccgggaccgcttctgggaccccggccctgctgctgaccccctgacagacctgcgctacgtgtggggcggctttgtgtacctgcaggacctggtggagagagctgctgtgcgggtgctgagcggggccaaccccagggctggcctgtacctgcagcagatgccctacccctgctacgtggatgatgtgttcctgcgggtgctgagccgcagcctgcccctcttcctgaccctggcctggatctacagcgtgaccctgactgtgaaggctgtggtgcgggagaaggagacccggctgcgggacaccatgagggccatgggcctgagcagagctgtgctgtggctgggctggttcctgagctgcctgggccccttcctgctgtctgctgccctgctggtgctggtgctgaagctgggggacatcctgccctacagccaccctggggtggtgttcctgttcctggccgcctttgctgtggccaccgtgacccagagcttcctgctgagcgccttcttcagccgggccaacctggccgccgcctgtggcggcctggcctacttcagcctgtacctgccctacgtgctgtgtgtggcctggagggaccggctgcctgctgggggccgggtggccgccagcctgctgagccctgtggcctttggatttggctgtgagagcctggccctgctggaggagcagggcgagggcgcccagtggcacaacgtgggcacccggcccacagcagatgtgttcagcctggcccaggtgtctggcctgctgctgctggatgctgccctgtatggcctggccacctggtacctggaggccgtgtgccccggccagtatggcatccctgagccctggaacttccccttccgccgcagctactggtgtggccccaggcctcccaagagccctgccccctgccccacccccctggaccccaaggtgctggtggaggaggcccctcctggcctgagccctggggtgtctgtgcgcagcctggagaagcgcttccctggcagcccccagcctgccctgcggggcctgagcctggacttctaccagggccacatcacagccttcctgggccacaatggagctgggaagaccaccaccctgagcatcctgagcggcctcttccccccatctgggggcagcgccttcatcctgggccatgatgtgcgcagctccatggccgccatccggccccacctgggcgtgtgcccccagtacaacgtgctgtttgacatgctgactgtggatgaacatgtgtggttctacggccgcctgaagggcctgtctgctgctgtggtgggccctgagcaggaccggctgctgcaggatgtgggcctggtgtccaagcagagcgtgcagaccaggcacctgagcggcggcatgcagaggaagctgtctgtggccatcgcctttgtgggcggcagccaggtggtgatcctggatgagcccacagctggggtggaccctgccagcagaagaggcatctgggagctgctgctgaagtaccgggagggccgcaccctcatcctgagcacccaccacctggatgaagctgagctgctgggggacagagtggccgtggtggccggcggccgcctgtgctgctgcggcagccccctcttcctgcggcggcacctgggcagcggctactacctgaccctggtgaaggcccggctgcccctgaccaccaatgagaaggctgacacagacatggagggctctgtggacacccggcaggagaagaagaatggcagccagggcagccgggtgggcaccccccagctgctggccctggtgcagcactgggtgcctggggcccggctggtggaggagctgccccatgagctggtgctggtgctgccctacaccggggcccatgatggcagctttgccaccctcttccgggagctggacacccggctggccgagctgcggctgaccggctacggcatcagtgacaccagcctggaggagatcttcctgaaggtggtggaggagtgtgccgctgacacagacatggaggatggcagctgtggccagcacctgtgcacaggaattgctggcctggatgtgaccctgcggctgaagatgccaccccaggagacagccctggagaatggagagcctgctggcagcgcccctgagacagaccagggcagcggcccagatgctgtgggccgggtgcagggctgggccctgacccggcagcagctgcaggccctgctgctgaagcgcttcctgctggcccggcgcagccggcggggcctgtttgcccagatcgtgctgcctgccctgtttgtgggcctggccctggtgttcagcctgattgtgcccccatttggccactacccagccctgcggctgagccccaccatgtacggggcccaggtgtccttcttctctgaagatgcccctggggaccccggccgggcccggctgctggaggccctgctgcaggaggccggcctggaggagccccctgtgcagcacagcagccaccgcttcagcgcccctgaggtgcctgctgaggtggccaaggtgctggccagcggcaactggaccccagagagccccagccctgcctgccagtgcagcaggcctggggcccggcggctgctgcctgactgcccagctgctgctgggggccccccaccaccccaggccgtgactggaagtggagaggtggtgcagaacctgactggaagaaacctgagtgacttcctggtgaagacctacccccggctggtgcggcagggcctgaagaccaagaagtgggtgaatgaggtgcgctatggaggcttcagcctgggcggccgggaccccggcctgcccagcggccaggagctgggccgctctgtggaggagctgtgggccctgctgagccccctgcctggaggagccctggacagagtgctgaagaacctgacagcctgggcccacagcctggatgcccaggacagcctgaagatctggttcaacaacaagggctggcacagcatggtggcctttgtgaacagagccagcaatgccatcctgcgggcccacctgcccccaggccctgcccggcatgcccacagcatcaccaccctgaaccaccccctgaacctgaccaaggagcagctgtctgagggcgccctgatggccagctctgtggatgtgctggtgtccatctgtgtggtgtttgccatgagctttgtgcctgccagcttcaccctggtgctgattgaggagcgggtgacccgggccaagcacctgcagctgatgggcggcctgagccccaccctgtactggctgggcaacttcctgtgggacatgtgcaactacctggtgcctgcctgcatcgtggtgctgatcttcctggccttccagcagagggcctacgtggccccagccaacctgcctgccctgctgctgctgctgctgctgtatggctggagcatcacccccctgatgtacccagccagcttcttcttctctgtgcccagcacagcctacgtggtgctgacctgcatcaacctcttcatcggcatcaatggctccatggccacctttgtgctggagctgttcagtgaccagaagctgcaggaggtgagccgcatcctgaagcaggtgttcctgatcttcccccacttctgcctgggccggggcctgattgacatggtgaggaaccaggccatggctgatgcctttgagcggctgggggaccggcagttccagagccccctgcgctgggaggtggtgggcaagaacctgctggccatggtgatccagggccccctcttcctgctcttcaccctgctgctgcagcacaggagccagctgctgccccagccccgggtgcgcagcctgcccctgctgggggaggaggatgaagatgtggcccgggagcgggagcgggtggtgcagggcgccacccagggagatgtgctggtgctgaggaacctgaccaaggtgtaccggggccagaggatgcctgctgtggaccggctgtgcctgggcatccccccaggagaatgttttggcctgctgggcgtgaatggagctgggaagaccagcaccttcaggatggtgactggagacaccctggccagcagaggagaggccgtgctggccggccacagcgtggcccgggagcccagcgctgcccacctgtccatgggctactgcccccagagtgatgccatctttgagctgctgaccggccgggagcacctggagctgctggcccggctgcggggcgtgcctgaggcccaggtggcccagacagctggcagcggcctggcccggctgggcctgtcctggtatgctgacaggcctgctggcacctacagcggcggcaacaagaggaagctggccacagccctggccctggtgggggaccctgctgtggtgttcctggatgagcccaccaccggcatggaccccagcgcccggcgcttcctgtggaacagcctgctggccgtggtgcgggagggccgctctgtgatgctgaccagccacagcatggaggagtgtgaggccctgtgcagccggctggccatcatggtgaatggccgcttccgctgcctgggcagcccccagcacctgaagggccgctttgctgctggccacaccctgaccctgcgggtgcctgctgcccggagccagcctgctgctgcctttgtggccgctgagttccctggagctgagctgcgggaggcccatggaggccgcctgcgcttccagctgcccccaggcggccgctgtgccctggcccgggtgtttggagagctggccgtgcatggagctgagcacggcgtggaggacttctctgtgtcccagaccatgctggaggaggtgttcctgtacttcagcaaggaccagggcaaggatgaggacacagaggagcagaaggaggccggcgtgggcgtggaccctgcccctggcctgcagcaccccaagagggtgtcccagttcctggatgaccccagcacagctgagaccgtgctgtag

SEQ ID NO: 144568 - DNA, 6441 bp, synthetic construct; identical to SEQ ID NO: 144567
  misc_feature 1..6441: note = Description of Artificial Sequence: Synthetic coding sequence
  source 1..6441: mol_type = other DNA

SEQ ID NO: 144569 - DNA, 495 bp, synthetic construct
  misc_feature 1..495: note = Description of Artificial Sequence: Synthetic coding sequence
  source 1..495: mol_type = other DNA
atggccttctggacccagctgatgctgctgctgtggaagaacttcatgtacagaagacggcagcctgtgcagctgctggtggagctgctgtggcccctcttcctgttcttcatcctggtggccgtgcgccacagccacccccccctggagcaccacgagtgccacttccccaacaagcccctgcccagcgctggcaccgtgccctggctgcagggcctcatctgcaatgtgaacaacacctgcttcccccagctgaccccaggagaggagcccggccgcctgagcaacttcaatgacagcctggtgtcccggctgctggctgatgccaggacagtgctgggcggggccagcgcccacaggaccctggccggcctgggcaagctgattgccaccctgcgggccgcccggagcacagcccagccccagcccaccaagcagagccccctggagccccccatgctggatgtggccgagctgctgaccagcctgctgtag

SEQ ID NO: 144570 - DNA, 4746 bp, synthetic construct
  misc_feature 1..4746: note = Description of Artificial Sequence: Synthetic coding sequence
  source 1..4746: mol_type = other DNA
atgaggaagaggaagatctctgtgtgccagcagacctgggccctgctgtgcaagaacttcctgaagaagtggaggatgaagcgggagagcctgatggagtggctgaacagcctgctgctgctgctgtgcctgtacatctacccccacagccaccaggtgaatgacttcagcagcctgctgaccatggacctgggccgggtggacaccttcaatgaaagccgcttctctgtggtgtacacccctgtgaccaacaccacccagcagatcatgaacaaggtggccagcacccccttcctggccggcaaggaggtgctgggcctgcctgatgaggagagcatcaaggagttcaccgccaactacccagaggagatcgtgcgggtgaccttcaccaacacctacagctaccacctgaagttcctgctgggccacggcatgcctgccaagaaggagcacaaggaccacacagcccactgctatgagaccaatgaagatgtgtactgtgaggtgtctgtgttctggaaggagggctttgtggccctgcaggccgccatcaatgctgccatcatcgagatcaccaccaaccacagcgtgatggaggagctgatgtctgtgacaggcaagaacatgaagatgcacagcttcatcggccagagcggggtcatcacagacctgtacctgttcagctgcatcatctccttcagcagcttcatctactatgcctctgtgaatgtgacccgggagaggaagaggatgaaggccctgatgaccatgatgggcctgcgggacagcgccttctggctgtcctggggcctgctgtatgccggcttcatcttcatcatggccctcttcctggccctggtgatccgcagcacccagttcatcatcctgagcggcttcatggtggtgttcagcctcttcctgctgtatggcctgagcctggtggccctggccttcctgatgagcatcctggtgaagaagagcttcctgaccggcctggtggtgttcctgctgaccgtcttctggggctgcctgggcttcaccagcctgtaccgccacctgcctgccagcctggagtggatcctgagcctgctgagcccctttgccttcatgctgggcatggcccagctgctgcacctggactatgacctgaacagcaatgccttcccccaccccagtgatggcagcaacctgattgtggccaccaacttcatgctggcctttgacacctgcctgtacctggccctggccatctactttgagaagatcctgcccaatgaatatggccaccggcggcccccactcttcttcctgaagagcagcttctggagccagacccagaagacagaccacgtggccctggaggatgagatggatgctgaccccagcttccatgacagctttgagcaggcccctcctgagttccagggcaaggaggccatccgcatcagaaatgtgaccaaggagtacaagggcaagccagacaagattgaggccctgaaggacctggtgtttgacatctatgagggccagatcacagccatcctgggccacagcggggccggcaagagcaccctgctgaacatcctgagcggcctgtctgtgcccaccaagggctctgtgaccatctacaacaacaagctgtctgagatggctgacctggagaacctgagcaagctgactggagtgtgcccccagagcaatgtgcagtttgacttcctgactgtgcgggagaacctgcggctgtttgccaagatcaagggcatcctgccccaggaggtggacaaggagatcttcctgctggatgagcccacagctggcctggaccccttcagccgccaccaggtgtggaacctgctgaaggagaggaagacagacagagtcatcctcttcagcacccagttcatggatgaggccgacatcctggccgacaggaaggtgttcctgagccagggcaagctgaagtgtgccggcagcagcctcttcctgaagaagaagtggggcatcggctaccacctgagcctgcagctgaatgagatctgtgtggaggagaacatcaccagcctggtgaagcagcacatcccagatgccaagctgagcgccaagtctgagggcaagctgatctacaccctgcccctggagaggaccaacaagtttcctgagctgtacaaggacctggacagctacccagacctgggcatcgagaactacggcgtgtccatgaccaccctgaatgaggtgttcctgaagctggagggcaagagcaccatcaatgaaagtgacatcgccatcctgggggaggtgcaggccgagaaggcagatgacacagagcggctggtggagatggagcaggtgctgagcagcctgaacaagatgaggaagaccatcggcggcgtggccctgtggaggcagcagatctgtgccatcgcccgggtgcggctgctgaagctgaagcatgagaggaaggccctgctggccctgctgctgatcctgatggccggcttctgccccctgctggtggagtacaccatggtgaagatctaccagaacagctacacctgggagctgagcccccacctgtacttcctggcccctggccagcagccccatgaccccctgacccagctgctgatcatcaacaagacaggagccagcattgatgacttcatccagagcgtggagcaccagaacatcgccctggaggtggatgccttcggcaccagaaatggaacagatgaccccagctacaacggggccatcaccgtgtgctgcaatgagaagaactacagcttcagcctggcctgcaatgccaagaggctgaactgcttccctgtgctgatggacatcgtgtccaatggcctgctgggcatggtgaagcccagcgtgcacatcagaacagagaggagcaccttcctggagaatggccaggacaaccccatcggcttcctggcctacatcatgttctggctggtgctgaccagcagctgccccccctacatcgccatgagcagcattgatgactacaagaacagagcccggagccagctgcgcatcagcggcctgagccccagcgcctactggtttggccaggccctggtggatgtgtccctgtacttcctggtgtttgtgttcatctacctgatgagctacatcagcaactttgaggacatgctgctgaccatcatccacatcatccagatcccctgtgctgtgggctacagcttcagcctcatcttcatgacctacgtgatctccttcatcttcagaaaaggaaggaagaacagcggcatctggagcttctgcttctacgtggtgacagtgttttctgtggccggctttgccttcagcatctttgaaagtgacatccccttcatcttcaccttcctgatccccccagccaccatgattggctgcctcttcctgagcagccacctgctcttcagcagcctcttcagcgaggagaggatggatgtgcagcccttcctggtgttcctgatccccttcctgcacttcatcatcttcctgttcaccctgcgctgcctggagtggaagtttgggaagaagtccatgaggaaggaccccttcttccgcatcagccccaggagcagtgatgtgtgccagaaccctgaggagcctgagggggaggatgaagatgtgcagatggagcgggtgaggacagccaatgccctgaacagcaccaactttgatgagaagcctgtgatcatcgccagctgcctgaggaaggagtatgctgggaagaggaagggctgcttcagcaagaggaagaacaagatcgccaccagaaatgtgtccttctgtgtgaggaaaggagaggtgctgggcctgctgggccacaatggagctgggaagagcaccagcatcaaggtgatcactggagacaccaagcccacagctggccaggtgctgctgaagggcagcggcggcggagatgccctggagttcctgggctactgcccccaggagaatgccctgtggcccaacctgactgtgcggcagcacctggaggtgtatgctgctgtgaagggcctgaggaaaggagatgctgaggtggccatcacccggctggtggatgccctgaagctgcaggaccagctgaagagccctgtgaagaccctgtctgagggcatcaagaggaagctgtgctttgtgctgagcatcctgggcaaccccagcgtggtgctgctggatgagcccagcacaggcatggaccctgagggccagcagcagatgtggcaggccatccgggccaccttcaggaacacagagcggggggccctgctgaccacccactacatggccgaggccgaggccgtgtgtgacagagtggccatcatggtgtctggccgcctgcgctgcatcggcagcatccagcacctgaagagcaagtttgggaaggactacctgctggagatgaaggtgaagaacctggcccaggtggagcccctgcacgccgagatcctgcggctcttcccccaggccgcccggcaggagcgctacagcagcctgatggtgtacaagctgcctgtggaggatgtgcagcccctggcccaggccttcttcaagctggagaaggtgaagcagagctttgacctggaggagtacagcctgagccagagcaccctggagcaggtgttcctggagctgagcaaggagcaggagctgggggactttgaagaagattttgaccccagcgtgaagtggaagctgctgccccaggaggagccctag

SEQ ID NO: 144571 - DNA, 801 bp, synthetic construct
  misc_feature 1..801: note = Description of Artificial Sequence: Synthetic coding sequence
  source 1..801: mol_type = other DNA
atgaggaagaggaagatctctgtgtgccagcagacctgggccctgctgtgcaagaacttcctgaagaagtggaggatgaagcgggagagcctgatggagtggctgaacagcctgctgctgctgctgtgcctgtacatctacccccacagccaccaggtgaatgacttcagcagcctgctgaccatggacctgggccgggtggacaccttcaatgaaagccgcttctctgtggtgtacacccctgtgaccaacaccacccagcagatcatgaacaaggtggccagcacccccttcctggccggcaaggaggtgctgggcctgcctgatgaggagagcatcaaggagttcaccgccaactacccagaggagatcgtgcgggtgaccttcaccaacacctacagctaccacctgaagttcctgctgggccacggcatgcctgccaagaaggagcacaaggaccacacagcccactgctatgagaccaatgaagatgtgtactgtgaggtgtctgtgttctggaaggagggctttgtggccctgcaggccgccatcaatgctgccatcatcgagatcaccaccaaccacagcgtgatggaggagctgatgtctgtgacaggcaagaacatgaagatgcacagcttcatcggccagagcggggtcatcacagacctgtacctgttcagctgcatcatctccttcagcagcttcatctactatgcctctgtgaatgtgacccgggagaggaagaggatgaaggccctgatgaccatgatgggcctgcgggacagcgccttctggtag

SEQ ID NO: 144572 - DNA, 4866 bp, synthetic construct
  misc_feature 1..4866: note = Description of Artificial Sequence: Synthetic coding sequence
  source 1..4866: mol_type = other DNA
atgaggaagaggaagatctctgtgtgccagcagacctgggccctgctgtgcaagaacttcctgaagaagtggaggatgaagcgggagagcctgatggagtggctgaacagcctgctgctgctgctgtgcctgtacatctacccccacagccaccaggtgaatgacttcagcagcctgctgaccatggacctgggccgggtggacaccttcaatgaaagccgcttctctgtggtgtacacccctgtgaccaacaccacccagcagatcatgaacaaggtggccagcacccccttcctggccggcaaggaggtgctgggcctgcctgatgaggagagcatcaaggagttcaccgccaactacccagaggagatcgtgcgggtgaccttcaccaacacctacagctaccacctgaagttcctgctgggccacggcatgcctgccaagaaggagcacaaggaccacacagcccactgctatgagaccaatgaagatgtgtactgtgaggtgtctgtgttctggaaggagggctttgtggccctgcaggccgccatcaatgctgccatcatcgagatcaccaccaaccacagcgtgatggaggagctgatgtctgtgacaggcaagaacatgaagatgcacagcttcatcggccagagcggggtcatcacagacctgtacctgttcagctgcatcatctccttcagcagcttcatctactatgcctctgtgaatgtgacccgggagaggaagaggatgaaggccctgatgaccatgatgggcctgcgggacagcgccttctggctgtcctggggcctgctgtatgccggcttcatcttcatcatggccctcttcctggccctggtgatccgcagcacccagttcatcatcctgagcggcttcatggtggtgttcagcctcttcctgctgtatggcctgagcctggtggccctggccttcctgatgagcatcctggtgaagaagagcttcctgaccggcctggtggtgttcctgctgaccgtcttctggggctgcctgggcttcaccagcctgtaccgccacctgcctgccagcctggagtggatcctgagcctgctgagcccctttgccttcatgctgggcatggcccagctgctgcacctggactatgacctgaacagcaatgccttcccccaccccagtgatggcagcaacctgattgtggccaccaacttcatgctggcctttgacacctgcctgtacctggccctggccatctactttgagaagatcctgcccaatgaatatggccaccggcggcccccactcttcttcctgaagagcagcttctggagccagacccagaagacagaccacgtggccctggaggatgagatggatgctgaccccagcttccatgacagctttgagcaggcccctcctgagttccagggcaaggaggccatccgcatcagaaatgtgaccaaggagtacaagggcaagccagacaagattgaggccctgaaggacctggtgtttgacatctatgagggccagatcacagccatcctgggccacagcggggccggcaagagcaccctgctgaacatcctgagcggcctgtctgtgcccaccaagggctctgtgaccatctacaacaacaagctgtctgagatggctgacctggagaacctgagcaagctgactggagtgtgcccccagagcaatgtgcagtttgacttcctgactgtgcgggagaacctgcggctgtttgccaagatcaagggcatcctgccccaggaggtggacaaggagatccagagggtgctgctggagctggagatgaagaacatccaggatgtgctggcccagaacctgagcggcggccagaagaggaagctgacctttggaattgccatcctgggggacccccagatcttcctgctggatgagcccacagctggcctggaccccttcagccgccaccaggtgtggaacctgctgaaggagaggaagacagacagagtcatcctcttcagcacccagttcatggatgaggccgacatcctggccgacaggaaggtgttcctgagccagggcaagctgaagtgtgccggcagcagcctcttcctgaagaagaagtggggcatcggctaccacctgagcctgcagctgaatgagatctgtgtggaggagaacatcaccagcctggtgaagcagcacatcccagatgccaagctgagcgccaagtctgagggcaagctgatctacaccctgcccctggagaggaccaacaagtttcctgagctgtacaaggacctggacagctacccagacctgggcatcgagaactacggcgtgtccatgaccaccctgaatgaggtgttcctgaagctggagggcaagagcaccatcaatgaaagtgacatcgccatcctgggggaggtgcaggccgagaaggcagatgacacagagcggctggtggagatggagcaggtgctgagcagcctgaacaagatgaggaagaccatcggcggcgtggccctgtggaggcagcagatctgtgccatcgcccgggtgcggctgctgaagctgaagcatgagaggaaggccctgctggccctgctgctgatcctgatggccggcttctgccccctgctggtggagtacaccatggtgaagatctaccagaacagctacacctgggagctgagcccccacctgtacttcctggcccctggccagcagccccatgaccccctgacccagctgctgatcatcaacaagacaggagccagcattgatgacttcatccagagcgtggagcaccagaacatcgccctggaggtggatgccttcggcaccagaaatggaacagatgaccccagctacaacggggccatcaccgtgtgctgcaatgagaagaactacagcttcagcctggcctgcaatgccaagaggctgaactgcttccctgtgctgatggacatcgtgtccaatggcctgctgggcatggtgaagcccagcgtgcacatcagaacagagaggagcaccttcctggagaatggccaggacaaccccatcggcttcctggcctacatcatgttctggctggtgctgaccagcagctgccccccctacatcgccatgagcagcattgatgactacaagaacagagcccggagccagctgcgcatcagcggcctgagccccagcgcctactggtttggccaggccctggtggatgtgtccctgtacttcctggtgtttgtgttcatctacctgatgagctacatcagcaactttgaggacatgctgctgaccatcatccacatcatccagatcccctgtgctgtgggctacagcttcagcctcatcttcatgacctacgtgatctccttcatcttcagaaaaggaaggaagaacagcggcatctggagcttctgcttctacgtggtgacagtgttttctgtggccggctttgccttcagcatctttgaaagtgacatccccttcatcttcaccttcctgatccccccagccaccatgattggctgcctcttcctgagcagccacctgctcttcagcagcctcttcagcgaggagaggatggatgtgcagcccttcctggtgttcctgatccccttcctgcacttcatcatcttcctgttcaccctgcgctgcctggagtggaagtttgggaagaagtccatgaggaaggaccccttcttccgcatcagccccaggagcagtgatgtgtgccagaaccctgaggagcctgagggggaggatgaagatgtgcagatggagcgggtgaggacagccaatgccctgaacagcaccaactttgatgagaagcctgtgatcatcgccagctgcctgaggaaggagtatgctgggaagaggaagggctgcttcagcaagaggaagaacaagatcgccaccagaaatgtgtccttctgtgtgaggaaaggagaggtgctgggcctgctgggccacaatggagctgggaagagcaccagcatcaaggtgatcactggagacaccaagcccacagctggccaggtgctgctgaagggcagcggcggcggagatgccctggagttcctgggctactgcccccaggagaatgccctgtggcccaacctgactgtgcggcagcacctggaggtgtatgctgctgtgaagggcctgaggaaaggagatgctgaggtggccatcacccggctggtggatgccctgaagctgcaggaccagctgaagagccctgtgaagaccctgtctgagggcatcaagaggaagctgtgctttgtgctgagcatcctgggcaaccccagcgtggtgctgctggatgagcccagcacaggcatggaccctgagggccagcagcagatgtggcaggccatccgggccaccttcaggaacacagagcggggggccctgctgaccacccactacatggccgaggccgaggccgtgtgtgacagagtggccatcatggtgtctggccgcctgcgctgcatcggcagcatccagcacctgaagagcaagtttgggaaggactacctgctggagatgaaggtgaagaacctggcccaggtggagcccctgcacgccgagatcctgcggctcttcccccaggccgcccggcaggagcgctacagcagcctgatggtgtacaagctgcctgtggaggatgtgcagcccctggcccaggccttcttcaagctggagaaggtgaagcagagctttgacctggaggagtacagcctgagccagagcaccctggagcaggtgttcctggagctgagcaaggagcaggagctgggggactttgaagaagattttgaccccagcgtgaagtggaagctgctgccccaggaggagccctag

SEQ ID NO: 144573 - DNA, 3312 bp, synthetic construct
  misc_feature 1..3312: note = Description of Artificial Sequence: Synthetic coding sequence
  source 1..3312: mol_type = other DNA
atggacctgggccgggtggacaccttcaatgaaagccgcttctctgtggtgtacacccctgtgaccaacaccacccagcagatcatgaacaaggtggccagcacccccttcctggccggcaaggaggtgctgggcctgcctgatgaggagagcatcaaggagttcaccgccaactacccagaggagatcgtgcgggtgaccttcaccaacacctacagctaccacctgaagttcctgctgggccacggcatgcctgccaagaaggagcacaaggaccacacagcccactgctatgagaccaatgaagatgtgtactgtgaggtgtctgtgttctggaaggagggctttgtggccctgcaggccgccatcaatgctgccatcatcgagatcaccaccaaccacagcgtgatggaggagctgatgtctgtgacaggcaagaacatgaagatgcacagcttcatcggccagagcggggtcatcacagacctgtacctgttcagctgcatcatctccttcagcagcttcatctactatgcctctgtgaatgtgacccgggagaggaagaggatgaaggccctgatgaccatgatgggcctgcgggacagcgccttctggctgtcctggggcctgctgtatgccggcttcatcttcatcatggccctcttcctggccctggtgatccgcagcacccagttcatcatcctgagcggcttcatggtggtgttcagcctcttcctgctgtatggcctgagcctggtggccctggccttcctgatgagcatcctggtgaagaagagcttcctgaccggcctggtggtgttcctgctgactgtgttctggggctgcctgggcttcaccagcctgtaccgccacctgcctgccagcctggagtggatcctgagcctgctgagcccctttgccttcatgctgggcatggcccagctgctgcacctggactatgacctgaacagcaatgccttcccccaccccagtgatggcagcaacctgattgtggccaccaacttcatgctggcctttgacacctgcctgtacctggccctggccatctactttgagaagatcctgcccaatgaatatggccacagaagacctcctctcttcttcctgaagagcagcttctggagccagacccagaagacagaccacgtggccctggaggatgagatggatgctgaccccagcttccatgacagctttgagcaggcccctcctgagttccagggcaaggaggccatccgcatcagaaatgtgaccaaggagtacaagggcaagccagacaagattgaggccctgaaggacctggtgtttgacatctatgagggccagatcacagccatcctgggccacagcggggccggcaagagcaccctgctgaacatcctgagcggcctgtctgtgcccaccaagggctctgtgaccatctacaacaacaagctgtctgagatggctgacctggagaacctgagcaagctgactggagtgtgcccccagagcaatgtgcagtttgacttcctgactgtgcgggagaacctgcggctgtttgccaagatcaagggcatcctgccccaggaggtggacaaggagatccagagggtgctgctggagctggagatgaagaacatccaggatgtgctggcccagaacctgagcggcggccagaagaggaagctgaccttcggcatcgccatcctgggggacccccagatcttcctgctggatgagcccacagctggcctggaccccttcagccgccaccaggtgtggaacctgctgaaggagaggaagacagacagagtcatcctcttcagcacccagttcatggatgaagctgacatcctggccgacaggaaggtgttcctgagccagggcaagctgaagtgtgccggcagcagcctcttcctgaagaagaagtggggcatcggctaccacctgagcctgcagctgaatgagatctgtgtggaggagaacatcaccagcctggtgaagcagcacatcccagatgccaagctgagcgccaagtctgagggcaagctgatctacaccctgcccctggagaggaccaacaagtttcctgagctgtacaaggacctggacagctacccagacctgggcattgaaaattatggagtgtccatgaccaccctgaatgaggtgttcctgaagctggagggcaagagcaccatcaatgaaagtgacatcgccatcctgggggaggtgcaggccgagaaggcagatgacacagagcggctggtggagatggagcaggtgctgagcagcctgaacaagatgaggaagaccatcggcggcgtggccctgtggaggcagcagatctgtgccatcgcccgggtgcggctgctgaagctgaagcatgagaggaaggccctgctggccctgctgctgatcctgatggccggcttctgccccctgctggtggagtacaccatggtgaagatctaccagaacagctacacctgggagctgagcccccacctgtacttcctggcccctggccagcagccccatgaccccctgacccagctgctgatcatcaacaagacaggagccagcattgatgacttcatccagagcgtggagcaccagaacatcgccctggaggtggatgccttcggcaccagaaatggaacagatgaccccagctacaatggagccatcaccgtgtgctgcaatgagaagaactacagcttcagcctggcctgcaatgccaagaggctgaactgcttccctgtgctgatggacatcgtgtccaatggcctgctgggcatggtgaagcccagcgtgcacatcagaacagagaggagcaccttcctggagaatggccaggacaaccccatcggcttcctggcctacatcatgttctggctggtgctgaccagcagctgccccccctacatcgccatgagcagcattgatgactacaagaacagagcccggagccagctgcgcatcagcggcctgagccccagcgcctactggtttggccaggccctggtggatgtgtccctgtacttcctggtgtttgtgttcatctacctgatgagctacatcagcaactttgaggacatgctgctgaccatcatccacatcatccagatcccctgtgctgtgggctacagcttcagcctcatcttcatgacctacgtgatctccttcatcttcaggaagggcaggaagaacagcggcatctggagcttctgcttctacgtggtgtccatcttcctggtggatgtgtactgcatctacctgatctacaacagcgagctgatcctgtag

SEQ ID NO: 144574 - DNA, 471 bp, synthetic construct
  misc_feature 1..471: note = Description of Artificial Sequence: Synthetic coding sequence
  source 1..471: mol_type = other DNA
atgctgggcatggcccagctgctgcacctggactatgacctgaacagcaatgccttcccccaccccagtgatggcagcaacctgattgtggccaccaacttcatgctggcctttgacacctgcctgtacctggccctggccatctactttgagaagatcctgcccaatgaatatggccacagaagacctcctctcttcttcctgaagagcagcttctggagccagacccagaagacagaccacgtggccctggaggatgagatggatgctgaccccagcttccatgacagctttgagcaggcccctcctgagttccagggcaaggaggccatccgcatcagaaatgtgaccaaggagtacaagggcaagccagacaagattgaggccctgaaggacctggtgtttgacatctatgagggccagatcacagccatcctggtgacagtggagctggagagccagcactgctag

SEQ ID NO: 144575 - DNA, 4875 bp, synthetic construct
  misc_feature 1..4875: note = Description of Artificial Sequence: Synthetic coding sequence
  source 1..4875: mol_type = other DNA
atgagcaagaggaggatgtctgtgggccagcagacctgggccctgctgtgcaagaactgcctgaagaagtggaggatgaagaggcagaccctgctggagtggctgttctccttcctgctggtgctcttcctgtacctgttcttcagcaacctgcaccaggtgcatgacaccccccagatgagctccatggacctgggccgggtggacagcttcaatgacaccaactacgtgattgcctttgcccctgagagcaagaccacccaggagatcatgaacaaggtggccagcgcccccttcctgaagggccgcaccatcatgggctggccagatgagaagtccatggatgagctggacctgaactacagcattgatgctgtgcgggtcatcttcacagacaccttctcctaccacctgaagttctcctggggccaccgcatccccatgatgaaggagcaccgggaccacagcgcccactgccaggccgtgaatgagaagatgaagtgtgagggcagcgagttctgggagaagggctttgtggccttccaggccgccatcaatgctgccatcatcgagatcgccaccaaccacagcgtgatggagcagctgatgtctgtgactggagtgcacatgaagatcctgccctttgtggcccagggcggcgtggccacagacttcttcatcttcttctgcatcatctccttcagcaccttcatctactacgtgtctgtgaatgtgacccaggagcggcagtacatcaccagcctgatgaccatgatgggcctgcgggagagcgccttctggctgtcctggggcctgatgtatgccggcttcatcctgatcatggccaccctgatggccctgattgtgaagagcgcccagatcgtggtgctgaccggctttgtgatggtgttcaccctcttcctgctgtatggcctgagcctcatcaccctggccttcctgatgtctgtgctgatcaagaagcccttcctgaccggcctggtggtgttcctgctgattgtgttctggggcatcctgggcttccctgccctgtacacccggctgcctgccttcctggagtggaccctgtgcctgctgagcccctttgccttcaccgtgggcatggcccagctgatccacctggactatgatgtgaacagcaatgcccacctggacagcagccagaacccctacctgatcatcgccaccctcttcatgctggtgtttgacaccctgctgtacctggtgctgaccctgtactttgacaagatcctgcctgcagaatatggccaccgctgcagccccctcttcttcctgaagagctgcttctggttccagcacggccgggccaaccacgtggtgctggagaatgaaacagacagcgaccccaccccaaatgactgctttgagcctgtgtccccagagttctgtgggaaggaggccatccgcatcaagaacctgaagaaggagtatgctggaaaatgtgagcgggtggaggccctgaagggcgtggtgtttgacatctatgagggccagatcacagccctgctgggccacagcggggccggcaagaccaccctgctgaacatcctgagcggcctgtctgtgcccaccagcggctctgtgacagtgtacaaccacaccctgagcaggatggctgacatcgagaacatcagcaagttcaccggcttctgcccccagagcaatgtgcagtttggcttcctgactgtgaaggagaacctgcggctgtttgccaagatcaagggcatcctgccccatgaggtggagaaggaggtgcagagggtggtgcaggagctggagatggagaacatccaggacatcctggcccagaacctgagcggcggccagaacaggaagctgaccttcggcatcgccatcctgggggacccccaggtgctgctgctggatgagcccacagctggcctggaccccctgagccgccaccgcatctggaacctgctgaaggagggcaagagtgacagagtcatcctcttcagcacccagttcattgatgaagctgacatcctggccgacaggaaggtgttcatcagcaatggcaagctgaagtgtgccggcagcagcctcttcctgaagaagaagtggggcatcggctaccacctgagcctgcacctgaatgaaagatgtgaccctgagagcatcaccagcctggtgaagcagcacatcagtgatgccaagctgacagcccagagcgaggagaagctggtgtacatcctgcccctggagaggaccaacaagtttcctgagctgtacagagacctggaccgctgcagcaaccagggcattgaagattatggagtgtccatcaccaccctgaatgaggtgttcctgaagctggagggcaagagcaccattgatgaaagtgacatcggcatctggggccagctgcagacagatggagccaaggacatcggcagcctggtggagctggagcaggtgctgagcagcttccacgagaccaggaagaccatctctggagtggccctgtggaggcagcaggtgtgtgccatcgccaaggtgcgcttcctgaagctgaagaaggagaggaagagcctgtggaccatcctgctgctgtttggcatctccttcatcccccagctgctggagcacctgttctatgagagctaccagaagagctacccctgggagctgagccccaacacctacttcctgagccctggccagcagccccaggaccccctgacccacctgctggtgatcaacaagacaggcagcaccatcgacaacttcctgcacagcctgcggcggcagaacatcgccatcgaggtggatgccttcggcaccagaaatggaacagatgaccccagctacaatggagccatcatcgtgtctggagatgagaaggaccaccgcttcagcatcgcctgcaacaccaagaggctgaactgcttccctgtgctgctggatgtgatcagcaatggcctgctgggcatcttcaacagcagcgagcacatccagacagacaggagcaccttctttgaggagcacatggactatgaatatggctaccgcagcaacaccttcttctggatccccatggccgccagcttcaccccctacatcgccatgagcagcattggagactacaagaagaaggcccacagccagctgcgcatcagcggcctgtaccccagcgcctactggtttggccaggccctggtggatgtgtccctgtacttcctgatcctgctgctgatgcagatcatggactacatcttcagccctgaggagatcatcttcatcatccagaacctgctgatccagatcctgtgcagcatcggctacgtgagcagcctggtgttcctgacctacgtgatctccttcatcttcagaaatggaaggaagaacagcggcatctggagcttcttcttcctgattgtggtgatcttcagcatcgtggccacagacctgaatgaatatggcttcctgggcctcttcttcggcaccatgctgatcccccccttcaccctgattggcagcctcttcatcttcagcgagatcagcccagacagcatggactacctgggcgccagcgagagcgagatcgtgtacctggccctgctgatcccctacctgcacttcctgatcttcctgttcatcctgcgctgcctggagatgaactgcaggaagaagctgatgaggaaggaccccgtcttccgcatcagccccaggagcaatgccatcttccccaaccctgaggagcctgagggggaggaggaggacatccagatggagaggatgaggacagtgaatgccatggctgtgcgggactttgatgagacccctgtgatcatcgccagctgcctgaggaaggagtatgccggcaagaagaagaactgcttcagcaagaggaagaagaagatcgccaccagaaatgtgtccttctgtgtgaagaagggggaggtgattggcctgctgggccacaacggggccggcaagagcaccaccatcaagatgatcaccggggacaccaagcccacagctggccaggtgatcctgaagggcagcggcggcggggagcccctgggcttcctgggctactgcccccaggagaatgccctgtggcccaacctgactgtgcggcagcacctggaggtgtatgctgctgtgaagggcctgaggaaaggagatgccatgattgccatcacccggctggtggatgccctgaagctgcaggaccagctgaaggcccctgtgaagaccctgtctgagggcatcaagaggaagctgtgctttgtgctgagcatcctgggcaaccccagcgtggtgctgctggatgagcccagcacaggcatggaccctgagggccagcagcagatgtggcaggtgatccgggccaccttcaggaacacagagcggggggccctgctgaccacccactacatggccgaggccgaggccgtgtgtgacagagtggccatcatggtgtctggccgcctgcgctgcatcggcagcatccagcacctgaagagcaagtttgggaaggactacctgctggagatgaagctgaagaacctggcccagatggagcccctgcatgctgagatcctgcggctcttcccccaggccgcccagcaggagcgcttcagcagcctgatggtgtacaagctgcctgtggaggatgtgcggcccctgagccaggccttcttcaagctggagatcgtgaagcagagctttgacctggaggagtacagcctgagccagagcaccctggagcaggtgttcctggagctgagcaaggagcaggagctgggggacctggaggaggactttgaccccagcgtgaagtggaagctgctgctgcaggaggagccctag

SEQ ID NO: 144576 - DNA, 4308 bp, synthetic construct
  misc_feature 1..4308: note = Description of Artificial Sequence: Synthetic coding sequence
  source 1..4308: mol_type = other DNA
atgagcaagaggaggatgtctgtgggccagcagacctgggccctgctgtgcaagaactgcctgaagaagtggaggatgaagaggcagaccctgctggagtggctgttctccttcctgctggtgctcttcctgtacctgttcttcagcaacctgcaccaggtgcatgacaccccccagatgagctccatggacctgggccgggtggacagcttcaatgacaccaactacgtgattgcctttgcccctgagagcaagaccacccaggagatcatgaacaaggtggccagcgcccccttcctgaagggccgcaccatcatgggctggccagatgagaagtccatggatgagctggacctgaactacagcattgatgctgtgcgggtcatcttcacagacaccttctcctaccacctgaagttctcctggggccaccgcatccccatgatgaaggagcaccgggaccacagcgcccactgccaggccgtgaatgagaagatgaagtgtgagggcagcgagttctgggagaagggctttgtggccttccaggccgccatcaatgctgccatcatcgagatcgccaccaaccacagcgtgatggagcagctgatgtctgtgactggagtgcacatgaagatcctgccctttgtggcccagggcggcgtggccacagacttcttcatcttcttctgcatcatctccttcagcaccttcatctactacgtgtctgtgaatgtgacccaggagcggcagtacatcaccagcctgatgaccatgatgggcctgcgggagagcgccttctggctgtcctggggcctgatgtatgccggcttcatcctgatcatggccaccctgatggccctgattgtgaagagcgcccagatcgtggtgctgaccggctttgtgatggtgttcaccctcttcctgctgtatggcctgagcctcatcaccctggccttcctgatgtctgtgctgatcaagaagcccttcctgaccggcctggtggtgttcctgctgattgtgttctggggcatcctgggcttccctgccctgtacacccggctgcctgccttcctggagtggaccctgtgcctgctgagcccctttgccttcaccgtgggcatggcccagctgatccacctggactatgatgtgaacagcaatgcccacctggacagcagccagaacccctacctgatcatcgccaccctcttcatgctggtgtttgacaccctgctgtacctggtgctgaccctgtactttgacaagatcctgcctgcagaatatggccaccgctgcagccccctcttcttcctgaagagctgcttctggttccagcacggccgggccaaccacgtggtgctggagaatgaaacagacagcgaccccaccccaaatgactgctttgagcctgtgtccccagagttctgtgggaaggaggccatccgcatcaagaacctgaagaaggagtatgctggaaaatgtgagcgggtggaggccctgaagggcgtggtgtttgacatctatgagggccagatcacagccctgctgggccacagcggggccggcaagaccaccctgctgaacatcctgagcggcctgtctgtgcccaccagcggctctgtgacagtgtacaaccacaccctgagcaggatggctgacatcgagaacatcagcaagttcaccggcttctgcccccagagcaatgtgcagtttggcttcctgactgtgaaggagaacctgcggctgtttgccaagatcaagggcatcctgccccatgaggtggagaaggaggtgcagagggtggtgcaggagctggagatggagaacatccaggacatcctggcccagaacctgagcggcggccagaacaggaagctgaccttcggcatcgccatcctgggggacccccaggtgctgctgctggatgagcccacagctggcctggaccccctgagccgccaccgcatctggaacctgctgaaggagggcaagagtgacagagtcatcctcttcagcacccagttcattgatgaagctgacatcctggccgacaggaaggtgttcatcagcaatggcaagctgaagtgtgccggcagcagcctcttcctgaagaagaagtggggcatcggctaccacctgagcctgcacctgaatgaaagatgtgaccctgagagcatcaccagcctggtgaagcagcacatcagtgatgccaagctgacagcccagagcgaggagaagctggtgtacatcctgcccctggagaggaccaacaagtttcctgagctgtacagagacctggaccgctgcagcaaccagggcattgaagattatggagtgtccatcaccaccctgaatgaggtgttcctgaagctggagggcaagagcaccattgatgaaagtgacatcggcatctggggccagctgcagacagatggagccaaggacatcggcagcctggtggagctggagcaggtgctgagcagcttccacgagaccaggaagaccatctctggagtggccctgtggaggcagcaggtgtgtgccatcgccaaggtgcgcttcctgaagctgaagaaggagaggaagagcctgtggaccatcctgctgctgtttggcatctccttcatcccccagctgctggagcacctgttctatgagagctaccagaagagctacccctgggagctgagccccaacacctacttcctgagccctggccagcagccccaggaccccctgacccacctgctggtgatcaacaagacaggcagcaccatcgacaacttcctgcacagcctgcggcggcagaacatcgccatcgaggtggatgccttcggcaccagaaatggaacagatgaccccagctacaatggagccatcatcgtgtctggagatgagaaggaccaccgcttcagcatcgcctgcaacaccaagaggctgaactgcttccctgtgctgctggatgtgatcagcaatggcctgctgggcatcttcaacagcagcgagcacatccagacagacaggagcaccttctttgaggagcacatggactatgaatatggctaccgcagcaacaccttcttctggatccccatggccgccagcttcaccccctacatcgccatgagcagcattggagactacaagaagaaggcccacagccagctgcgcatcagcggcctgtaccccagcgcctactggtttggccaggccctggtggatgtgtccctgtacttcctgatcctgctgctgatgcagatcatggactacatcttcagccctgaggagatcatcttcatcatccagaacctgctgatccagatcctgtgcagcatcggctacgtgagcagcctggtgttcctgacctacgtgatctccttcatcttcagaaatggaaggaagaacagcggcatctggagcttcttcttcctgattgtggtgatcttcagcatcgtggccacagacctgaatgaatatggcttcctgggcctcttcttcggcaccatgctgatcccccccttcaccctgattggcagcctcttcatcttcagcgagatcagcccagacagcatggactacctgggcgccagcgagagcgagatcgtgtacctggccctgctgatcccctacctgcacttcctgatcttcctgttcatcctgcgctgcctggagatgaactgcaggaagaagctgatgaggaaggaccccgtcttccgcatcagccccaggagcaatgccatcttccccaaccctgaggagcctgagggggaggaggaggacatccagatggagaggatgaggacagtgaatgccatggctgtgcgggactttgatgagacccctgtgatcatcgccagctgcctgaggaaggagtatgccggcaagaagaagaactgcttcagcaagaggaagaagaagatcgccaccagaaatgtgtccttctgtgtgaagaagggggaggtgattggcctgctgggccacaacggggccggcaagagcaccaccatcaagatgatcaccggggacaccaagcccacagctggccaggtgatcctgaagggcagcggcggcggggagcccctgggcttcctgggctactgcccccaggagaatgccctgtggcccaacctgactgtgcggcagcacctggaggtgtatgctgctgtgaagggcctgaggaaaggagatgccatgattgccatcacccggctggtggatgccctgaagctgcaggaccagctgaaggcccctgtgaagaccctgtctgagggcatcaagaggaaggccggggacagcggccacctgtag

SEQ ID NO: 144577 - DNA, 3423 bp, synthetic construct
  misc_feature 1..3423: note = Description of Artificial Sequence: Synthetic coding sequence
  source 1..3423: mol_type = other DNA
atgtctgtgggccagcagacctgggccctgctgtgcaagaactgcctgaagaagtggaggatgaagaggcagaccctgctggagtggctgttctccttcctgctggtgctcttcctgtacctgttcttcagcaacctgcaccaggtgcatgacaccccccagatgagctccatggacctgggccgggtggacagcttcaatgacaccaactacgtgattgcctttgcccctgagagcaagaccacccaggagatcatgaacaaggtggccagcgcccccttcctgaagggccgcaccatcatgggctggccagatgagaagtccatggatgagctggacctgaactacagcattgatgctgtgcgggtcatcttcacagacaccttctcctaccacctgaagttctcctggggccaccgcatccccatgatgaaggagcaccgggaccacagcgcccactgccaggccgtgaatgagaagatgaagtgtgagggcagcgagttctgggagaagggctttgtggccttccaggccgccatcaatgctgccatcattgaaattgccaccaaccacagcgtgatggagcagctgatgtctgtgactggagtgcacatgaagatcctgccctttgtggcccagggcggcgtggccacagacttcttcatcttcttctgcatcatctccttcagcaccttcatctactacgtgtctgtgaatgtgacccaggagcggcagtacatcaccagcctgatgaccatgatgggcctgcgggagagcgccttctggctgtcctggggcctgatgtatgccggcttcatcctgatcatggccaccctgatggccctgattgtgaagagcgcccagatcgtggtgctgactggatttgtgatggtgttcaccctcttcctgctgtatggcctgagcctcatcaccctggccttcctgatgtctgtgctgatcaagaagcccttcctgaccggcctggtggtgttcctgctgattgtgttctggggcatcctgggcttccctgccctgtacacccggctgcctgccttcctggagtggaccctgtgcctgctgagcccctttgccttcaccgtgggcatggcccagctgatccacctggactatgatgtgaacagcaatgcccacctggacagcagccagaacccctacctgatcatcgccaccctcttcatgctggtgtttgacaccctgctgtacctggtgctgaccctgtactttgacaagatcctgcctgcagaatatggccaccgctgcagccccctcttcttcctgaagagctgcttctggttccagcacggccgggccaaccacgtggtgctggagaatgaaacagacagcgaccccaccccaaatgactgctttgagcctgtgtccccagagttctgtgggaaggaggccatccgcatcaagaacctgaagaaggagtatgctggaaaatgtgagcgggtggaggccctgaagggcgtggtgtttgacatctatgagggccagatcacagccctgctgggccacagcggggccggcaagaccaccctgctgaacatcctgagcggcctgtctgtgcccaccagcggctctgtgacagtgtacaaccacaccctgagcaggatggctgacatcgagaacatcagcaagttcaccggcttctgcccccagagcaatgtgcagtttggcttcctgactgtgaaggagaacctgcggctgtttgccaagatcaagggcatcctgccccatgaggtggagaaggaggtgcagagggtggtgcaggagctggagatggagaacatccaggacatcctggcccagaacctgagcggcggccagaacaggaagctgacctttggaattgccatcctgggggacccccaggtgctgctgctggatgagcccacagctggcctggaccccctgagccgccaccgcatctggaacctgctgaaggagggcaagagtgacagagtcatcctcttcagcacccagttcattgatgaggccgacatcctggccgacaggaaggtgttcatcagcaatggcaagctgaagtgtgccggcagcagcctcttcctgaagaagaagtggggcatcggctaccacctgagcctgcacctgaatgaaagatgtgaccctgagagcatcaccagcctggtgaagcagcacatcagtgatgccaagctgacagcccagagcgaggagaagctggtgtacatcctgcccctggagaggaccaacaagtttcctgagctgtacagagacctggaccgctgcagcaaccagggcatcgaggactatggagtgtccatcaccaccctgaatgaggtgttcctgaagctggagggcaagagcaccattgatgaaagtgacatcggcatctggggccagctgcagacagatggagccaaggacatcggcagcctggtggagctggagcaggtgctgagcagcttccacgagaccaggaagaccatcagcggcgtggccctgtggaggcagcaggtgtgtgccatcgccaaggtgcgcttcctgaagctgaagaaggagaggaagagcctgtggaccatcctgctgctgtttggcatctccttcatcccccagctgctggagcacctgttctatgagagctaccagaagagctacccctgggagctgagccccaacacctacttcctgagccctggccagcagccccaggaccccctgacccacctgctggtgatcaacaagacaggcagcaccatcgacaacttcctgcacagcctgcggcggcagaacatcgccatcgaggtggatgccttcggcaccagaaatggaacagatgaccccagctacaacggggccatcatcgtgtctggagatgagaaggaccaccgcttcagcatcgcctgcaacaccaagaggctgaactgcttccctgtgctgctggatgtgatcagcaatggcctgctgggcatcttcaacagcagcgagcacatccagacagacaggagcaccttctttgaggagcacatggactatgaatatggctaccgcagcaacaccttcttctggatccccatggccgccagcttcaccccctacatcgccatgagcagcatcggggactacaagaagaaggcccacagccagctgcgcatcagcggcctgtaccccagcgcctactggtttggccaggccctggtggatgtgtccctgtacttcctgatcctgctgctgatgcagatcatggactacatcttcagccctgaggagatcatcttcatcatccagaacctgctgatccaggtggtgatcttcagcatcgtggccacagacctgaatgaatatggcttcctgggcctcttctggcaccacgtgaacaccagcctgcacatcgactggctgagcatccacttcttctag

SEQ ID NO: 144578 - DNA, 2217 bp, synthetic construct
  misc_feature 1..2217: note = Description of Artificial Sequence: Synthetic coding sequence
  source 1..2217: mol_type = other DNA
atgaggggccccccagcctggcccctgcggctgctggagccccccagccctgctgagcccggccgcctgctgcctgtggcctgtgtgtgggccgccgccagccgggtgcccggcagcctgagccccttcaccggcctgcggcctgcccggctgtggggcgccggccctgccctgctgtggggcgtgggcgccgcccggcgctggaggagcggctgccggggcggcggccctggggccagccggggcgtgctgggcctggcccggctgctgggcctgtgggcccggggccctggcagctgccgctgtggggcctttgctggccctggggccccccggctgccccgggcccgcttccctgggggccctgctgctgctgcctgggccggagatgaggcctggaggcggggccctgctgcccctcctggggacaagggccgcctgcggcctgctgctgctggcctgcctgaggccaggaagctgctgggcctggcctacccagagcggcggcggctggccgctgctgtgggcttcctgaccatgagcagcgtcatctccatgtctgcccccttcttcctgggcaagatcattgatgtgatctacaccaaccccaccgtggactacagcgacaacctgacccggctgtgcctgggcctgtctgctgtgttcctgtgtggggctgctgccaatgccatccgggtgtacctgatgcagaccagcggccagagaattgtgaaccggctgcggaccagcctcttcagcagcatcctgcggcaggaggtggccttctttgacaagaccaggactggagagctgatcaaccggctgagcagtgacacagccctgctgggccgctctgtgacagagaacctgagtgatggcctgcgggccggggcccaggcctctgtgggcatctccatgatgttctttgtgagccccaacctggccacctttgtgctgtctgtggtgccccctgtgtccatcatcgctgtgatctacggccgctacctgaggaagctgaccaaggtgacccaggacagcctggcccaggccacccagctggccgaggagagaattggaaatgtgaggacagtgcgggccttcggcaaggagatgacagaaattgagaagtatgccagcaaggtggaccacgtgatgcagctggccaggaaggaggcctttgcccgggccggcttctttggagccaccggcctgagcggcaacctgattgtgctgtctgtgctgtacaagggcggcctgctgatgggcagcgcccacatgacagtgggggagctgagcagcttcctgatgtatgccttctgggtgggcatcagcattggaggcctgagcagcttctacagcgagctgatgaagggcctgggcgccggcggccgcctgtgggagctgctggagcgggagcccaagctgcccttcaatgaaggagtcatcctgaatgagaagagcttccagggcgccctggagttcaagaatgtgcactttgcctacccagcccggcctgaggtgcccatcttccaggacttcagcctgagcatccccagcggctctgtgacagccctggtgggccccagcggcagcggcaagagcacagtgctgagcctgctgctgcggctgtatgaccctgccagcggcaccatcagcctggatggccatgacatccggcagctgaaccctgtgtggctgcggagcaagattggcaccgtgtcccaggagcccatcctcttcagctgcagcattgctgagaacatcgcctacggggctgatgaccccagctctgtgacagctgaggagatccagagggtggccgaggtggccaatgctgtggccttcatccggaacttcccccagggcttcaacacagtggtgggggagaagggcgtgctgctgagcggcggccagaagcagagaattgccatcgcccgggccctgctgaagaaccccaagatcctgctgctggatgaggccaccagcgccctggatgctgaaaatgagtacctggtgcaggaggccctggaccggctgatggatggccgcacagtgctggtgattgcccaccggctgagcaccatcaagaatgccaacatggtggccgtgctggaccagggcaagatcacagaatatggcaagcatgaggagctgctgagcaagcccaacggcatctacaggaagctgatgaacaagcagagcttcatcagcgcctag

SEQ ID NO: 144579 - DNA, 2529 bp, synthetic construct
  misc_feature 1..2529: note = Description of Artificial Sequence: Synthetic coding sequence
  source 1..2529: mol_type = other DNA
atggtgacagtgggcaactactgtgaggccgagggccctgtgggccctgcctggatgcaggacggcctgagcccctgcttcttcttcaccctggtgcccagcaccaggatggccctgggcaccctggccctggtgctggccctgccctgcagaagaagagagaggcctgctggagctgacagcctgtcctggggcgccggcccccgcatcagcccctacgtgctgcagctgctgctggccaccctgcaggccgccctgcccctggccggcctggccggccgggtgggcacagcccggggggcccccctgcccagctacctgctgctggcctctgtgctggagagcctggccggggcctgtggcctgtggctgctggtggtggagaggagccaggcccggcagaggctggccatgggcatctggatcaagttccgccacagccctggcctgctgctgctgtggacagtggcctttgctgctgagaacctggccctggtgtcctggaacagcccccagtggtggtgggcccgggctgacctgggccagcaggtgcagttcagcctgtgggtgctgcgctacgtggtgtctgggggcctgtttgtgctgggcctgtgggcccctggcctgcggccccagagctacaccctgcaggtgcatgaggaggaccaggatgtggagaggagccaggtgcgctctgctgcccagcagagcacctggagggactttggaaggaagctgcggctgctgagcggctacctgtggccccggggcagccctgccctgcagctggtggtgctgatctgcctgggcctgatgggcctggagcgggccctgaatgtgctggtgcccatcttctacagaaatattgtgaacctgctgacagagaaggccccctggaacagcctggcctggacagtgaccagctatgtgttcctgaagttcctgcagggcggcggcaccggcagcactggatttgtgagcaacctgcggaccttcctgtggatccgggtgcagcagttcaccagcagaagagtggagctgctgatcttcagccacctgcacgagctgagcctgcgctggcacctgggccgcaggactggagaggtgctgagaattgctgaccggggcaccagctctgtgacaggcctgctgagctacctggtgttcaacgtcatccccaccctggccgacatcatcatcggcatcatctacttctccatgttcttcaatgcctggtttggcctcatcgtgttcctgtgcatgagcctgtacctgaccctgaccatcgtggtgacagagtggaggaccaagttcagaagagccatgaacacccaggagaatgccacccgggcccgggctgtggacagcctgctgaactttgagaccgtgaagtactacaatgctgagagctatgaggtggagcgctaccgggaggccatcatcaagtaccagggcctggagtggaagagcagcgccagcctggtgctgctgaaccagacccagaacctggtgattggcctgggcctgctggccggcagcctgctgtgtgcctactttgtgacagagcagaagctgcaggtgggggactatgtgctgtttggcacctacatcatccagctgtacatgcccctgaactggtttggcacctactacaggatgatccagaccaacttcatcgacatggagaacatgtttgacctgctgaaggaggagacagaggtgaaggacctgcccggggccggccccctgcgcttccagaagggccgcatcgagtttgaaaatgtgcacttctcctatgcagatggccgggagaccctgcaggatgtgtccttcaccgtgatgcctggccagaccctggccctggtgggccccagcggggccggcaagagcaccatcctgcggctgctcttccgcttctatgacatcagcagcggctgcatcagaattgatggccaggacatcagccaggtgacccaggccagcctgcggagccacatcggcgtggtgccccaggacacagtgctcttcaatgacaccatcgctgacaacatccgctatggccgggtgacagctggaaatgatgaggtggaggccgccgcccaggccgccggcatccatgatgccatcatggccttccctgagggctaccgcacccaggtgggggagcggggcctgaagctgagcggcggggagaagcagagggtggccatcgcccggaccatcctgaaggcccctggcatcatcctgctggatgaggccaccagcgccctggacaccagcaatgaaagagccatccaggccagcctggccaaggtgtgtgccaacagaaccaccatcgtggtggcccaccggctgagcacagtggtgaatgctgaccagatcctggtgatcaaggatggctgcatcgtggagcggggcagacatgaggccctgctgagcagaggaggagtgtatgctgacatgtggcagctgcagcagggccaggaggagaccagcgaggacaccaagccccagaccatggagaggtag

SEQ ID NO: 144580 - DNA, 636 bp, synthetic construct
  misc_feature 1..636: note = Description of Artificial Sequence: Synthetic coding sequence
  source 1..636: mol_type = other DNA
atggtgacagtgggcaactactgtgaggccgagggccctgtgggccctgcctggatgcaggacggcctgagcccctgcttcttcttcaccctggtgcccagcaccaggatggccctgggcaccctggccctggtgctggccctgccctgcagaagaagagagaggcctgctggagctgacagcctgtcctggggcgccggcccccgcatcagcccctatgccctgcccggcggcccccactgccaggccatctacttctggccaccctgctggagggtgtggccagcccctgtggcctgtggctgcctgtcctggagcggggcccggcacggctctgtgtggcagtgggccagcggcagcagcagcggcacagccctggtgtcctgcagcagcggcctgtggaggctgcagctgcggacctggccctggtgcctgggcacagcccacagcggcggcggccagggccagacctgggccagccgcttcagcctggcctgtggctgctgcggcatgtggagcctggagggctgcctgtcctgggtgtctggccccctggactttgtgcccagccccatccactgccgcttcatgaagaggaccaagatgtggaagggggccagcgagctggccgactag

SEQ ID NO: 144581 - DNA, 2391 bp, synthetic construct
  misc_feature 1..2391: note = Description of Artificial Sequence: Synthetic coding sequence
  source 1..2391: mol_type = other DNA
atggtgacagtgggcaactactgtgaggccgagggccctgtgggccctgcctggatgcaggacggcctgagcccctgcttcttcttcaccctggtgcccagcaccaggatggccctgggcaccctggccctggtgctggccctgccctgcagaagaagagagaggcctgctggagctgacagcctgtcctggggcgccggcccccgcatcagcccctacgtgctgcagctgctgctggccaccctgcaggccgccctgcccctggccggcctggccggccgggtgggcacagcccggggggcccccctgcccagctacctgctgctggcctctgtgctggagagcctggccggggcctgtggcctgtggctgctggtggtggagaggagccaggcccggcagaggctggccatgggcatctggatcaagttccgccacagccctggcctgctgctgctgtggacagtggcctttgctgctgagaacctggccctggtgtcctggaacagcccccagtggtggtgggcccgggctgacctgggccagcaggtgcgctctgctgcccagcagagcacctggagggactttggaaggaagctgcggctgctgagcggctacctgtggccccggggcagccctgccctgcagctggtggtgctgatctgcctgggcctgatgggcctggagcgggccctgaatgtgctggtgcccatcttctacagaaatattgtgaacctgctgacagagaaggccccctggaacagcctggcctggacagtgaccagctatgtgttcctgaagttcctgcagggcggcggcaccggcagcactggatttgtgagcaacctgcggaccttcctgtggatccgggtgcagcagttcaccagcagaagagtggagctgctgatcttcagccacctgcacgagctgagcctgcgctggcacctgggccgcaggactggagaggtgctgagaattgctgaccggggcaccagctctgtgacaggcctgctgagctacctggtgttcaacgtcatccccaccctggccgacatcatcatcggcatcatctacttctccatgttcttcaatgcctggtttggcctcatcgtgttcctgtgcatgagcctgtacctgaccctgaccatcgtggtgacagagtggaggaccaagttcagaagagccatgaacacccaggagaatgccacccgggcccgggctgtggacagcctgctgaactttgagaccgtgaagtactacaatgctgagagctatgaggtggagcgctaccgggaggccatcatcaagtaccagggcctggagtggaagagcagcgccagcctggtgctgctgaaccagacccagaacctggtgattggcctgggcctgctggccggcagcctgctgtgtgcctactttgtgacagagcagaagctgcaggtgggggactatgtgctgtttggcacctacatcatccagctgtacatgcccctgaactggtttggcacctactacaggatgatccagaccaacttcatcgacatggagaacatgtttgacctgctgaaggaggagacagaggtgaaggacctgcccggggccggccccctgcgcttccagaagggccgcatcgagtttgaaaatgtgcacttctcctatgcagatggccgggagaccctgcaggatgtgtccttcaccgtgatgcctggccagaccctggccctggtgggccccagcggggccggcaagagcaccatcctgcggctgctcttccgcttctatgacatcagcagcggctgcatcagaattgatggccaggacatcagccaggtgacccaggccagcctgcggagccacatcggcgtggtgccccaggacacagtgctcttcaatgacaccatcgctgacaacatccgctatggccgggtgacagctggaaatgatgaggtggaggccgccgcccaggccgccggcatccatgatgccatcatggccttccctgagggctaccgcacccaggtgggggagcggggcctgaagctgagcggcggggagaagcagagggtggccatcgcccggaccatcctgaaggcccctggcatcatcctgctggatgaggccaccagcgccctggacaccagcaatgaaagagccatccaggccagcctggccaaggtgtgtgccaacagaaccaccatcgtggtggcccaccggctgagcacagtggtgaatgctgaccagatcctggtgatcaaggatggctgcatcgtggagcggggcagacatgaggccctgctgagcagaggaggagtgtatgctgacatgtggcagctgcagcagggccaggaggagaccagcgaggacaccaagccccagaccatggagaggtag

SEQ ID NO: 144582 - DNA, 2262 bp, synthetic construct
  misc_feature 1..2262: note = Description of Artificial Sequence: Synthetic coding sequence
  source 1..2262: mol_type = other DNA
atggccctgctggccatgcacagctggcgctgggccgctgctgctgctgcctttgagaagagaagacacagcgccatcctgatccggcccctggtgtctgtgtctggcagcggcccccagtggaggccccaccagctgggcgccctgggcacagcccgggcctaccagcagatccctgagagcctgaagagcatcacctggcagaggctgggcaagggcaacagcggccagttcctggatgctgccaaggccctgcaggtgtggcccctgattgagaagaggacctgctggcacggccatgctgggggcggcctgcacacagaccccaaggagggcctgaaggatgtggacaccaggaagatcatcaaggccatgctgtcctatgtgtggcccaaggacagaccagacctgcgggcccgggtggccatcagcctgggcttcctgggcggggccaaggccatgaacatcgtggtgcccttcatgttcaagtatgctgtggacagcctgaaccagatgagcggcaacatgctgaacctgagtgatgcccccaacacagtggccaccatggccacagctgtgctgattggctatggagtgtcccgggccggggccgccttcttcaatgaggtgagaaatgctgtgtttgggaaggtggcccagaacagcatccgccgcatcgccaagaatgtgttcctgcacctgcacaacctggacctgggcttccacctgagccggcagacaggagccctgagcaaggccatcgaccggggcacccggggcatcagctttgtgctgagcgccctggtgttcaacctgctgcccatcatgtttgaggtgatgctggtgtctggagtgctgtactacaagtgtggggcccagtttgccctggtgaccctgggcaccctgggcacctacacagccttcaccgtggccgtgacccgctggaggacccgcttcagaattgagatgaacaaggctgacaatgatgctggaaatgctgccatcgacagcctgctgaactatgaaacagtgaagtacttcaacaatgaaagatatgaggcccagagatatgatggcttcctgaagacctatgaaacagccagcctgaagagcaccagcaccctggccatgctgaactttggccagagcgccatcttctctgtgggcctgacagccatcatggtgctggccagccagggcatcgtggccggcaccctgactgtgggggacctggtgatggtgaatggcctgctcttccagctgagcctgcccctgaacttcctgggcaccgtgtaccgggagacccggcaggccctgattgacatgaacaccctcttcaccctgctgaaggtggacacccagatcaaggacaaggtgatggccagccccctgcagatcaccccccagacagccaccgtggcctttgacaacgtgcactttgagtacatcgagggccagaaggtgctgagcggcatcagctttgaggtgcctgctgggaagaaggtggccatcgtgggcggcagcggcagcggcaagagcaccatcgtgcggctgctcttccgcttctatgagccccagaagggcagcatctacctggccggccagaacatccaggatgtgtccctggagagcctgcggcgggctgtgggcgtggtgccccaggatgctgtgctcttccacaacaccatctactacaacctgctgtatggcaacatcagcgccagccctgaggaggtgtatgctgtggccaagctggccggcctgcatgatgccatcctgaggatgcctcatggctatgacacccaggtgggggagcggggcctgaagctgtctggaggagagaagcagagggtggccatcgcccgggccatcctgaaggacccccctgtgatcctgtatgatgaggccaccagcagcctggacagcatcacagaggagaccatcctgggcgccatgaaggatgtggtgaagcacaggaccagcatcttcatcgcccaccggctgagcacagtggtggatgctgatgagatcatcgtgctggaccagggcaaggtggccgagcggggcacccaccacggcctgctggccaacccccacagcatctacagcgagatgtggcacacccagagcagccgggtgcagaaccacgacaaccccaagtgggaggccaagaaggagaacatcagcaaggaggaggagaggaagaagctgcaggaggagatcgtgaacagcgtgaagggctgcggcaactgcagctgctag

SEQ ID NO: 144583 - DNA, 2259 bp, synthetic construct
  misc_feature 1..2259: note = Description of Artificial Sequence: Synthetic coding sequence
  source 1..2259: mol_type = other DNA
atggccctgctggccatgcacagctggcgctgggccgctgctgctgctgcctttgagaagagaagacacagcgccatcctgatccggcccctggtgtctgtgtctggcagcggcccccagtggaggccccaccagctgggcgccctgggcacagcccgggcctaccagatccctgagagcctgaagagcatcacctggcagaggctgggcaaaggaaacagcggccagttcctggatgctgccaaggccctgcaggtgtggcccctcatcgagaagaggacctgctggcacggccacgccggcggcggcctgcacacagaccccaaggagggcctgaaggatgtggacaccaggaagatcatcaaggccatgctgtcctatgtgtggcccaaggacagaccagacctgcgggcccgggtggccatcagcctgggcttcctgggcggggccaaggccatgaacatcgtggtgcccttcatgttcaagtatgctgtggacagcctgaaccagatgagcggcaacatgctgaacctgagtgatgcccccaacacagtggccaccatggccacagctgtgctgattggctacggcgtgtccagagctggagctgccttcttcaatgaggtgagaaatgctgtgtttgggaaggtggcccagaacagcatcagaagaattgccaagaatgtgttcctgcacctgcacaacctggacctgggcttccacctgagccggcagacaggagccctgagcaaggccatcgaccggggcacccggggcatcagctttgtgctgagcgccctggtgttcaacctgctgcccatcatgtttgaggtgatgctggtgtctggagtgctgtactacaagtgtggggcccagtttgccctggtgaccctgggcaccctgggcacctacacagccttcaccgtggccgtgacccgctggaggacccgcttccgcatcgagatgaacaaggctgacaatgatgctggaaatgctgccatcgacagcctgctgaactatgagaccgtgaagtacttcaacaatgaaagatatgaggcccagagatatgatggcttcctgaagacctatgaaacagccagcctgaagagcaccagcaccctggccatgctgaactttggccagagcgccatcttctctgtgggcctgacagccatcatggtgctggccagccagggcatcgtggccggcaccctgactgtgggggacctggtgatggtgaatggcctgctcttccagctgagcctgcccctgaacttcctgggcaccgtgtaccgggagacccggcaggccctgattgacatgaacaccctcttcaccctgctgaaggtggacacccagatcaaggacaaggtgatggccagccccctgcagatcaccccccagacagccaccgtggcctttgacaacgtgcactttgagtacatcgagggccagaaggtgctgagcggcatcagctttgaggtgcctgctgggaagaaggtggccatcgtgggcggcagcggcagcggcaagagcaccatcgtgcggctgctcttccgcttctatgagccccagaagggcagcatctacctggccggccagaacatccaggatgtgtccctggagagcctgcggcgggctgtgggcgtggtgccccaggatgctgtgctcttccacaacaccatctactacaacctgctgtatggcaacatcagcgccagccctgaggaggtgtatgctgtggccaagctggccggcctgcatgatgccatcctgaggatgccccacggctatgacacccaggtgggggagcggggcctgaagctgagcggcggggagaagcagagggtggccatcgcccgggccatcctgaaggacccccctgtgatcctgtatgatgaggccaccagcagcctggacagcatcacagaggagaccatcctgggcgccatgaaggatgtggtgaagcacaggaccagcatcttcatcgcccaccggctgagcacagtggtggatgctgatgagatcatcgtgctggaccagggcaaggtggccgagcggggcacccaccacggcctgctggccaacccccacagcatctacagcgagatgtggcacacccagagcagccgggtgcagaaccacgacaaccccaagtgggaggccaagaaggagaacatcagcaaggaggaggagaggaagaagctgcaggaggagatcgtgaacagcgtgaagggctgcggcaactgcagctgctag

SEQ ID NO: 144584 - DNA, 2109 bp, synthetic construct
  misc_feature 1..2109: note = Description of Artificial Sequence: Synthetic coding sequence
  source 1..2109: mol_type = other DNA
atggccctgctggccatgcacagctggcgctgggccgctgctgctgctgcctttgagaagagaagacacagcgccatcctgatccggcccctggtgtctgtgtctggcagcggcccccagtggaggccccaccagctgggcgccctgggcacagcccgggcctaccaggccctgcaggtgtggcccctcatcgagaagaggacctgctggcacggccacgccggcggcggcctgcacacagaccccaaggagggcctgaaggatgtggacaccaggaagatcatcaaggccatgctgtcctatgtgtggcccaaggacagaccagacctgcgggcccgggtggccatcagcctgggcttcctgggcggggccaaggccatgaacatcgtggtgcccttcatgttcaagtatgctgtggacagcctgaaccagatgagcggcaacatgctgaacctgagtgatgcccccaacacagtggccaccatggccacagctgtgctgattggctacggcgtgtccagagctggagctgccttcttcaatgaggtgagaaatgctgtgtttgggaaggtggcccagaacagcatcagaagaattgccaagaatgtgttcctgcacctgcacaacctggacctgggcttccacctgagccggcagacaggagccctgagcaaggccatcgaccggggcacccggggcatcagctttgtgctgagcgccctggtgttcaacctgctgcccatcatgtttgaggtgatgctggtgtctggagtgctgtactacaagtgtggggcccagtttgccctggtgaccctgggcaccctgggcacctacacagccttcaccgtggccgtgacccgctggaggacccgcttccgcatcgagatgaacaaggctgacaatgatgctggaaatgctgccatcgacagcctgctgaactatgagaccgtgaagtacttcaacaatgaaagatatgaggcccagagatatgatggcttcctgaagacctatgaaacagccagcctgaagagcaccagcaccctggccatgctgaactttggccagagcgccatcttctctgtgggcctgacagccatcatggtgctggccagccagggcatcgtggccggcaccctgactgtgggggacctggtgatggtgaatggcctgctcttccagctgagcctgcccctgaacttcctgggcaccgtgtaccgggagacccggcaggccctgattgacatgaacaccctcttcaccctgctgaaggtggacacccagatcaaggacaaggtgatggccagccccctgcagatcaccccccagacagccaccgtggcctttgacaacgtgcactttgagtacatcgagggccagaaggtgctgagcggcatcagctttgaggtgcctgctgggaagaaggtggccatcgtgggcggcagcggcagcggcaagagcaccatcgtgcggctgctcttccgcttctatgagccccagaagggcagcatctacctggccggccagaacatccaggatgtgtccctggagagcctgcggcgggctgtgggcgtggtgccccaggatgctgtgctcttccacaacaccatctactacaacctgctgtatggcaacatcagcgccagccctgaggaggtgtatgctgtggccaagctggccggcctgcatgatgccatcctgaggatgccccacggctatgacacccaggtgggggagcggggcctgaagctgagcggcggggagaagcagagggtggccatcgcccgggccatcctgaaggacccccctgtgatcctgtatgatgaggccaccagcagcctggacagcatcacagaggagaccatcctgggcgccatgaaggatgtggtgaagcacaggaccagcatcttcatcgcccaccggctgagcacagtggtggatgctgatgagatcatcgtgctggaccagggcaaggtggccgagcggggcacccaccacggcctgctggccaacccccacagcatctacagcgagatgtggcacacccagagcagccgggtgcagaaccacgacaaccccaagtgggaggccaagaaggagaacatctcctag

SEQ ID NO: 144585 - DNA, 2181 bp, synthetic construct
  misc_feature 1..2181: note = Description of Artificial Sequence: Synthetic coding sequence
  source 1..2181: mol_type = other DNA
atggccctgctggccatgcacagctggcgctgggccgctgctgctgctgcctttgagaagagaagacacagcgccatcctgatccggcccctggtgtctgtgtctggcagcggcccccagtggaggccccaccagctgggcgccctgggcacagcccgggcctaccaggccctgcaggtgtggcccctcatcgagaagaggacctgctggcacggccacgccggcggcggcctgcacacagaccccaaggagggcctgaaggatgtggacaccaggaagatcatcaaggccatgctgtcctatgtgtggcccaaggacagaccagacctgcgggcccgggtggccatcagcctgggcttcctgggcggggccaaggccatgaacatcgtggtgcccttcatgttcaagtatgctgtggacagcctgaaccagatgagcggcaacatgctgaacctgagtgatgcccccaacacagtggccaccatggccacagctgtgctgattggctacggcgtgtccagagctggagctgccttcttcaatgaggtgagaaatgctgtgtttgggaaggtggcccagaacagcatcagaagaattgccaagaatgtgttcctgcacctgcacaacctggacctgggcttccacctgagccggcagacaggagccctgagcaaggccatcgaccggggcacccggggcatcagctttgtgctgagcgccctggtgttcaacctgctgcccatcatgtttgaggtgatgctggtgtctggagtgctgtactacaagtgtggggcccagtttgccctggtgaccctgggcaccctgggcacctacacagccttcaccgtggccgtgacccgctggaggacccgcttccgcatcgagatgaacaaggctgacaatgatgctggaaatgctgccatcgacagcctgctgaactatgagaccgtgaagtacttcaacaatgaaagatatgaggcccagagatatgatggcttcctgaagacctatgaaacagccagcctgaagagcaccagcaccctggccatgctgaactttggccagagcgccatcttctctgtgggcctgacagccatcatggtgctggccagccagggcatcgtggccggcaccctgactgtgggggacctggtgatggtgaatggcctgctcttccagctgagcctgcccctgaacttcctgggcaccgtgtaccgggagacccggcaggccctgattgacatgaacaccctcttcaccctgctgaaggtggacacccagatcaaggacaaggtgatggccagccccctgcagatcaccccccagacagccaccgtggcctttgacaacgtgcactttgagtacatcgagggccagaaggtgctgagcggcatcagctttgaggtgcctgctgggaagaaggtggccatcgtgggcggcagcggcagcggcaagagcaccatcgtgcggctgctcttccgcttctatgagccccagaagggcagcatctacctggccggccagaacatccaggatgtgtccctggagagcctgcggcgggctgtgggcgtggtgccccaggatgctgtgctcttccacaacaccatctactacaacctgctgtatggcaacatcagcgccagccctgaggaggtgtatgctgtggccaagctggccggcctgcatgatgccatcctgaggatgccccacggctatgacacccaggtgggggagcggggcctgaagctgagcggcggggagaagcagagggtggccatcgcccgggccatcctgaaggacccccctgtgatcctgtatgatgaggccaccagcagcctggacagcatcacagaggagaccatcctgggcgccatgaaggatgtggtgaagcacaggaccagcatcttcatcgcccaccggctgagcacagtggtggatgctgatgagatcatcgtgctggaccagggcaaggtggccgagcggggcacccaccacggcctgctggccaacccccacagcatctacagcgagatgtggcacacccagagcagccgggtgcagaaccacgacaaccccaagtgggaggccaagaaggagaacatcagcaaggaggaggagaggaagaagctgcaggaggagatcgtgaacagcgtgaagggctgcggcaactgcagctgctag

SEQ ID NO: 144586 - DNA, 2208 bp, synthetic construct
  misc_feature 1..2208: note = Description of Artificial Sequence: Synthetic coding sequence
  source 1..2208: mol_type = other DNA
atgctggtgcacctgttccgggtgggcatccggggcggccccttccctggccgcctgctgccccccctgcgcttccagaccttctctgctgtgaggaacacctggagaaatggcaagacaggccagctgcacaaggccgagggggagtacagtgatggctaccgcagcagcagcctgctgcgggctgtggcccacctgcggagccagctgtgggcccacctgccccgggcccccctggccccccgctggagccccagcgcctggtgctgggtgggcggggccctgctgggccccatggtgctgagcaagcacccccacctgtgcctggtggccctgtgtgaggccgaggaggcccccccagccagcagcaccccccacgtggtgggcagccgcttcaactggaagctgttctggcagttcctgcacccccacctgctggtgctgggcgtggccgtggtgctggccctgggcgccgccctggtgaatgtgcagatccccctgctgctgggccagctggtggaggtggtggccaagtacacccgggaccacgtgggcagcttcatgacagagagccagaacctgagcacccacctgctgatcctgtatggagtgcagggcctgctgaccttcggctacctggtgctgctgagccacgtgggggagaggatggctgtggacatgaggcgggccctcttcagcagcctgctgcggcaggacatcaccttctttgatgccaacaagacaggccagctggtgtcccggctgaccacagatgtgcaggagttcaagagcagcttcaagctggtgatcagccagggcctgcggagctgcacccaggtggccggctgcctggtgtccctgtccatgctgagcacccggctgaccctgctgctgatggtggccaccccagccctgatgggcgtgggcaccctgatgggcagcggcctgaggaagctgagccggcagtgccaggagcagatcgcccgggccatgggcgtggctgatgaggccctgggcaatgtgaggacagtgcgggcctttgccatggagcagcgggaggaggagagatatggagctgagctggaggcctgccgctgcagagctgaggagctgggccggggcatcgccctcttccagggcctgagcaacatcgccttcaactgcatggtgctgggcaccctcttcatcggcggcagcctggtggccggccagcagctgactggaggagacctgatgtccttcctggtggccagccagacagtgcagaggtccatggccaacctgtctgtgctgtttggccaggtggtgcggggcctgtctgctggggcccgggtgtttgagtacatggccctgaacccctgcatccccctgagcggcggctgctgcgtgcccaaggagcagctgcggggctctgtgaccttccagaatgtgtgcttctcctacccctgcaggcctggctttgaggtgctgaaggacttcaccctgaccctgcccccaggcaagatcgtggccctggtgggccagagcggcggcggcaagaccaccgtggccagcctgctggagcgcttctatgaccccacagctggggtggtgatgctggatggccgggacctgcggaccctggaccccagctggctgcggggccaggtggtgggcttcatcagccaggagcctgtgctgtttggcaccaccatcatggagaacatccgctttgggaagctggaggccagtgatgaggaggtgtacacagctgcccgggaggccaatgcccacgagttcatcaccagcttccctgagggctacaacacagtggtgggggagcggggcaccaccctgagcggcggccagaagcagaggctggccatcgcccgggccctgatcaagcagcccaccgtgctgatcctggatgaggccaccagcgccctggatgctgagagcgagcgggtggtgcaggaggccctggaccgggccagcgctggccgcacagtgctggtgattgcccaccggctgagcacagtgcggggggcccactgcatcgtggtgatggctgatggccgggtgtgggaggccggcacccatgaggagctgctgaagaagggcggcctgtatgcagagctgatccggcggcaggccctggatgcccccaggacagctgcccccccacccaagaagccagagggccccaggagccaccagcacaagagctag

SEQ ID NO: 144587 - DNA, 1404 bp, synthetic construct
  misc_feature 1..1404: note = Description of Artificial Sequence: Synthetic coding sequence
  source 1..1404: mol_type = other DNA
atgctggtgcacctgttccgggtgggcatccggggcggccccttccctggccgcctgctgccccccctgcgcttccagaccttctctgctgtgcggcggctgctgcggctgcagccccgggtgtcccagaaggagggcaccctgggcgtgtctgaccacgcccagagcgccctgcccaccggcggccccctgtcctggccctggagatacagtgatggctaccgcagcagcagcctgctgcgggctgtggcccacctgcggagccagctgtgggcccacctgccccgggcccccctggccccccgctggagccccagcgcctggtgctgggtgggcggggccctgctgggccccatggtgctgagcaagcacccccacctgtgcctggtggccctgtgtgaggccgaggaggcccccccagccagcagcaccccccacgtggtgggcagccgcttcaactggaagctgttctggcagttcctgcacccccacctgctggtgctgggcgtggccgtggtgctggccctgggcgccgccctggtgaatgtgcagatccccctgctgctgggccagctggtggaggtggtggccaagtacacccgggaccacgtgggcagcttcatgacagagagccagaacctgagcacccacctgctgatcctgtatggagtgcagggcctgctgaccttcggctacctggtgctgctgagccacgtgggggagaggatggctgtggacatgaggcgggccctcttcagcagcctgctgcggcaggacatcaccttctttgatgccaacaagacaggccagctggtgtcccggctgaccacagatgtgcaggagttcaagagcagcttcaagctggtgatcagccagggcctgcggagctgcacccaggtggccggctgcctggtgtccctgtccatgctgagcacccggctgaccctgctgctgatggtggccaccccagccctgatgggcgtgggcaccctgatgggcagcggcctgaggaagctgagccggcagtgccaggagcagatcgcccgggccatgggcgtggctgatgaggccctgggcaatgtgaggacagtgcgggcctttgccatggagcagcgggaggaggagagatatggagctgagctggaggcctgccgctgcagagctgaggagctgggccggggcatcgccctcttccagggcctgagcaacatcgccttcaactgcatggtgctgggcaccctcttcatcggcggcagcctggtggccggccagcagctgactggaggagacctgatgtccttcctggtggccagccagacagtgcagaggcaggtgcacggccagcccctgtgccctgtgtgggccggcggccctggagcagaatgtcgctgccccggcctgtag

SEQ ID NO: 144588 - DNA, 2157 bp, synthetic construct
  misc_feature 1..2157: note = Description of Artificial Sequence: Synthetic coding sequence
  source 1..2157: mol_type = other DNA
atgctggtgcacctgttccgggtgggcatccggggcggccccttccctggccgcctgctgccccccctgcgcttccagaccttctctgctgtgcgctacagtgatggctaccgcagcagcagcctgctgcgggctgtggcccacctgcggagccagctgtgggcccacctgccccgggcccccctggccccccgctggagccccagcgcctggtgctgggtgggcggggccctgctgggccccatggtgctgagcaagcacccccacctgtgcctggtggccctgtgtgaggccgaggaggcccccccagccagcagcacccctcatgtggtgggcagccgcttcaactggaagctgttctggcagttcctgcacccccacctgctggtgctgggcgtggccgtggtgctggccctgggcgccgccctggtgaatgtgcagatccccctgctgctgggccagctggtggaggtggtggccaagtacacccgggaccacgtgggcagcttcatgacagagagccagaacctgagcacccacctgctgatcctgtatggagtgcagggcctgctgaccttcggctacctggtgctgctgagccacgtgggggagaggatggctgtggacatgagaagagccctcttcagcagcctgctgcggcaggacatcaccttctttgatgccaacaagacaggccagctggtgtcccggctgaccacagatgtgcaggagttcaagagcagcttcaagctggtgatcagccagggcctgcggagctgcacccaggtggccggctgcctggtgtccctgtccatgctgagcacccggctgaccctgctgctgatggtggccaccccagccctgatgggcgtgggcaccctgatgggcagcggcctgaggaagctgagccggcagtgccaggagcagatcgcccgggccatgggcgtggctgatgaggccctgggcaatgtgaggacagtgcgggcctttgccatggagcagcgggaggaggagcgctacggggctgagctggaggcctgccgctgcagagctgaggagctgggccggggcatcgccctcttccagggcctgagcaacatcgccttcaactgcatggtgctgggcaccctcttcatcggcggcagcctggtggccggccagcagctgaccggcggggacctgatgtccttcctggtggccagccagacagtgcagaggtccatggccaacctgtctgtgctgtttggccaggtggtgcggggcctgtctgctggggcccgggtgtttgagtacatggccctgaacccctgcatccccctgagcggcggctgctgcgtgcccaaggagcagctgcggggctctgtgaccttccagaatgtgtgcttctcctacccctgccggcccggctttgaggtgctgaaggacttcaccctgaccctgcccccaggcaagatcgtggccctggtgggccagagcggcggcggcaagaccaccgtggccagcctgctggagcgcttctatgaccccacagctggggtggtgatgctggatggccgggacctgcggaccctggaccccagctggctgcggggccaggtggtgggcttcatcagccaggagcctgtgctgtttggcaccaccatcatggagaacatccgctttgggaagctggaggccagtgatgaggaggtgtacacagctgcccgggaggccaatgcccacgagttcatcaccagcttccctgagggctacaacacagtggtgggggagcggggcaccaccctgagcggcggccagaagcagaggctggccatcgcccgggccctgatcaagcagcccaccgtgctgatcctggatgaggccaccagcgccctggatgctgagagcgagcgggtggtgcaggaggccctggaccgggccagcgctggccgcacagtgctggtgattgcccaccggctgagcacagtgcggggggcccactgcatcgtggtgatggctgatggccgggtgtgggaggccggcacccatgaggagctgctgaagaagggcggcctgtatgcagagctgatccggcggcaggccctggatgcccccaggacagctgcccccccacccaagaagccagagggccccaggagccaccagcacaagagctag

SEQ ID NO: 144589 - DNA, 2106 bp, synthetic construct
  misc_feature 1..2106: note = Description of Artificial Sequence: Synthetic coding sequence
  source 1..2106: mol_type = other DNA
atgctggtgcacctgttccgggtgggcatccggggcggccccttccctggccgcctgctgccccccctgcgcttccagaccttctctgctgtgcgctacagtgatggctaccgcagcagcagcctgctgcgggctgtggcccacctgcggagccagctgtgggcccacctgccccgggccctgctgggccccatggtgctgagcaagcacccccacctgtgcctggtggccctgtgtgaggccgaggaggcccccccagccagcagcaccccccacgtggtgggcagccgcttcaactggaagctgttctggcagttcctgcacccccacctgctggtgctgggcgtggccgtggtgctggccctgggcgccgccctggtgaatgtgcagatccccctgctgctgggccagctggtggaggtggtggccaagtacacccgggaccacgtgggcagcttcatgacagagagccagaacctgagcacccacctgctgatcctgtatggagtgcagggcctgctgaccttcggctacctggtgctgctgagccacgtgggggagaggatggctgtggacatgaggcgggccctcttcagcagcctgctgcggcaggacatcaccttctttgatgccaacaagacaggccagctggtgtcccggctgaccacagatgtgcaggagttcaagagcagcttcaagctggtgatcagccagggcctgcggagctgcacccaggtggccggctgcctggtgtccctgtccatgctgagcacccggctgaccctgctgctgatggtggccaccccagccctgatgggcgtgggcaccctgatgggcagcggcctgaggaagctgagccggcagtgccaggagcagatcgcccgggccatgggcgtggctgatgaggccctgggcaatgtgaggacagtgcgggcctttgccatggagcagcgggaggaggagagatatggagctgagctggaggcctgccgctgcagagctgaggagctgggccggggcatcgccctcttccagggcctgagcaacatcgccttcaactgcatggtgctgggcaccctcttcatcggcggcagcctggtggccggccagcagctgactggaggagacctgatgtccttcctggtggccagccagacagtgcagaggtccatggccaacctgtctgtgctgtttggccaggtggtgcggggcctgtctgctggggcccgggtgtttgagtacatggccctgaacccctgcatccccctgagcggcggctgctgcgtgcccaaggagcagctgcggggctctgtgaccttccagaatgtgtgcttctcctacccctgcaggcctggctttgaggtgctgaaggacttcaccctgaccctgcccccaggcaagatcgtggccctggtgggccagagcggcggcggcaagaccaccgtggccagcctgctggagcgcttctatgaccccacagctggggtggtgatgctggatggccgggacctgcggaccctggaccccagctggctgcggggccaggtggtgggcttcatcagccaggagcctgtgctgtttggcaccaccatcatggagaacatccgctttgggaagctggaggccagtgatgaggaggtgtacacagctgcccgggaggccaatgcccacgagttcatcaccagcttccctgagggctacaacacagtggtgggggagcggggcaccaccctgagcggcggccagaagcagaggctggccatcgcccgggccctgatcaagcagcccaccgtgctgatcctggatgaggccaccagcgccctggatgctgagagcgagcgggtggtgcaggaggccctggaccgggccagcgctggccgcacagtgctggtgattgcccaccggctgagcacagtgcggggggcccactgcatcgtggtgatggctgatggccgggtgtgggaggccggcacccatgaggagctgctgaagaagggcggcctgtatgcagagctgatccggcggcaggccctggatgcccccaggacagctgcccccccacccaagaagccagagggccccaggagccaccagcacaagagctag

SEQ ID NO: 144590 - DNA, 1296 bp, synthetic construct
  misc_feature 1..1296: note = Description of Artificial Sequence: Synthetic coding sequence
  source 1..1296: mol_type = other DNA
atgctggtgcacctgttccgggtgggcatccggggcggccccttccctggccgcctgctgccccccctgcgcttccagaccttctctgctgtgcgctacagtgatggctaccgcagcagcagcctgctgcgggctgtggcccacctgcggagccagctgtgggcccacctgccccgggcccccctggccccccgctggagccccagcgcctggtgctgggtgggcggggccctgctgggccccatggtgctgagcaagcacccccacctgtgcctggtggccctgtgtgaggccgaggaggcccccccagccagcagcacccctcatgtggtgggcagccgcttcaactggaagctgttctggcagttcctgcacccccacctgctggtgctgggcgtggccgtggtgctggccctgggcgccgccctggtgaatgtgcagatccccctgctgctgggccagctggtggaggtggtggccaagtacacccgggaccacgtgggcagcttcatgacagagagccagaacctgagcacccacctgctgatcctgtatggagtgcagggcctgctgaccttcggctacctggtgctgctgagccacgtgggggagaggatggctgtggacatgagaagagccctcttcagcagcctgctgcggcaggacatcaccttctttgatgccaacaagacaggccagctggtgtcccggctgaccacagatgtgcaggagttcaagagcagcttcaagctggtgatcagccagggcctgcggagctgcacccaggtggccggctgcctggtgtccctgtccatgctgagcacccggctgaccctgctgctgatggtggccaccccagccctgatgggcgtgggcaccctgatgggcagcggcctgaggaagctgagccggcagtgccaggagcagatcgcccgggccatgggcgtggctgatgaggccctgggcaatgtgaggacagtgcgggcctttgccatggagcagcgggaggaggagcgctacggggctgagctggaggcctgccgctgcagagctgaggagctgggccggggcatcgccctcttccagggcctgagcaacatcgccttcaactgcatggtgctgggcaccctcttcatcggcggcagcctggtggccggccagcagctgaccggcggggacctgatgtccttcctggtggccagccagacagtgcagagcttcctgcgggtggccccctgccccaacagcctgcccctgcaggccgtgaccttccacgcctggaaggaccacccctag

SEQ ID NO: 144591 - DNA, 2082 bp, synthetic construct
  misc_feature 1..2082: note = Description of Artificial Sequence: Synthetic coding sequence
  source 1..2082: mol_type = other DNA
atgctggtgcacctgttccgggtgggcatccggggcggccccttccctggccgcctgctgccccccctgcgcttccagaccttctctgctgtgcgctacagtgatggctaccgcagcagcagcctgctgcgggctgtggcccacctgcggagccagctgtgggcccacctgccccgggcccccctggccccccgctggagccccagcgcctggtgctgggtgggcggggccctgctgggccccatggtgctgagcaagcacccccacctgtgcctggtggccctgtgtgaggccgaggaggcccccccagccagcagcacccctcatgtggtgggcagccgcttcaactggaagctgttctggcagttcctgcacccccacctgctggtgctgggcgtggccgtggtgctggccctgggcgccgccctggtgaatgtgcagatccccctgctgctgggccagctggtggaggtggtggccaagtacacccgggaccacgtgggcagcttcatgacagagagccagaacctgagcacccacctgctgatcctgtatggagtgcagggcctgctgaccttcggctacctggtgctgctgagccacgtgggggagaggatggctgtggacatgagaagagccctcttcagcagcctgctgcggcaggacatcaccttctttgatgccaacaagacaggccagctggtgtcccggctgaccacagatgtgcaggagttcaagagcagcttcaagctggtgatcagccagggcctgcggagctgcacccaggtggccggctgcctggtgtccctgtccatgctgagcacccggctgaccctgctgctgatggtggccaccccagccctgatgggcgtgggcaccctgatgggcagcggcctgaggaagctgagccggcagtgccaggagcagatcgcccgggccatgggcgtggctgatgaggccctgggcaatgtgaggacagtgcgggcctttgccatggagcagcgggaggaggagcgctacggggctgagctggaggcctgccgctgcagagctgaggagctgggccggggcatcgccctcttccagggcctgagcaacatcgccttcaactgcatggtgctgggcaccctcttcatcggcggcagcctggtggccggccagcagctgaccggcggggacctgatgtccttcctggtggccagccagacagtgcagaggtccatggccaacctgtctgtgctgtttggccaggtggtgcggggcctgtctgctggggcccgggtgtttgagtacatggccctgaacccctgcatccccctgagcggcggctgctgcgtgcccaaggagcagctgcggggctctgtgaccttccagaatgtgtgcttctcctacccctgccggcccggctttgaggtgctgaaggacttcaccctgaccctgcccccaggcaagatcgtggccctggtgggccagagcggcggcggcaagaccaccgtggccagcctgctggagcgcttctatgaccccacagctggggtggtgatgctggatggccgggacctgcggaccctggaccccagctggctgcggggccaggtggtgggcttcatcagccaggagcctgtgctgtttggcaccaccatcatggagaacatccgctttgggaagctggaggccagtgatgaggaggtgtacacagctgcccgggaggccaatgcccacgagttcatcaccagcttccctgagggctacaacacagtggtgggggagcggggcaccaccctgagcggcggccagaagcagaggctggccatcgcccgggccctgatcaagcagcccaccgtgctgatcctggatgaggccaccagcgccctggatgctgagagcgagcgggtggtgcaggaggccctggaccgggccagcgctggccgcacagtgctggccggcacccatgaggagctgctgaagaagggcggcctgtatgcagagctgatccggcggcaggccctggatgcccccaggacagctgcccccccacccaagaagccagagggccccaggagccaccagcacaagagctag

SEQ ID NO: 144592 - DNA, 1893 bp, synthetic construct
  misc_feature 1..1893: note = Description of Artificial Sequence: Synthetic coding sequence
  source 1..1893: mol_type = other DNA
atgagggtgaagctgctgctgcctgctgcccctgtgctgccccggcagcacgccggggccttcatcagcggccgggacagcggctggcccatcccccggcaggccgccacagccccacccctgcctgacatcctgagctgccagctggccctgggcgccgccctggtgaatgtgcagatccccctgctgctgggccagctggtggaggtggtggccaagtacacccgggaccacgtgggcagcttcatgacagagagccagaacctgagcacccacctgctgatcctgtatggagtgcagggcctgctgaccttcggctacctggtgctgctgagccacgtgggggagaggatggctgtggacatgagaagagccctcttcagcagcctgctgcggcaggacatcaccttctttgatgccaacaagacaggccagctggtgtcccggctgaccacagatgtgcaggagttcaagagcagcttcaagctggtgatcagccagggcctgcggagctgcacccaggtggccggctgcctggtgtccctgtccatgctgagcacccggctgaccctgctgctgatggtggccaccccagccctgatgggcgtgggcaccctgatgggcagcggcctgaggaagctgagccggcagtgccaggagcagatcgcccgggccatgggcgtggctgatgaggccctgggcaatgtgaggacagtgcgggcctttgccatggagcagcgggaggaggagcgctacggggctgagctggaggcctgccgctgcagagctgaggagctgggccggggcatcgccctcttccagggcctgagcaacatcgccttcaactgcatggtgctgggcaccctcttcatcggcggcagcctggtggccggccagcagctgaccggcggggacctgatgtccttcctggtggccagccagacagtgcagaggtccatggccaacctgtctgtgctgtttggccaggtggtgcggggcctgtctgctggggcccgggtgtttgagtacatggccctgaacccctgcatccccctgagcggcggctgctgcgtgcccaaggagcagctgcggggctctgtgaccttccagaatgtgtgcttctcctacccctgccggcccggctttgaggtgctgaaggacttcaccctgaccctgcccccaggcaagatcgtggccctggtgggccagagcggcggcggcaagaccaccgtggccagcctgctggagcgcttctatgaccccacagctggggtggtgatgctggatggccgggacctgcggaccctggaccccagctggctgcggggccaggtggtgggcttcatcagccaggagcctgtgctgtttggcaccaccatcatggagaacatccgctttgggaagctggaggccagtgatgaggaggtgtacacagctgcccgggaggccaatgcccacgagttcatcaccagcttccctgagggctacaacacagtggtgggggagcggggcaccaccctgagcggcggccagaagcagaggctggccatcgcccgggccctgatcaagcagcccaccgtgctgatcctggatgaggccaccagcgccctggatgctgagagcgagcgggtggtgcaggaggccctggaccgggccagcgctggccgcacagtgctggtgattgcccaccggctgagcacagtgcggggggcccactgcatcgtggtgatggctgatggccgggtgtgggaggccggcacccatgaggagctgctgaagaagggcggcctgtatgcagagctgatccggcggcaggccctggatgcccccaggacagctgcccccccacccaagaagccagagggccccaggagccaccagcacaagagctag

SEQ ID NO: 144593 - DNA, 2301 bp, synthetic construct
  misc_feature 1..2301: note = Description of Artificial Sequence: Synthetic coding sequence
  source 1..2301: mol_type = other DNA
atgaggctgtggaaggctgtggtggtgaccctggccttcatgtctgtggacatctgtgtgaccacagccatctacgtgttcagccacctggacaggagcctgctggaggacatccgccacttcaacatctttgacagcgtgctggacctgtgggccgcctgcctgtaccgcagctgcctgctgctgggcgccaccatcggcgtggccaagaacagcgccctgggcccccggcggctgcgggcctcctggctggtgatcaccctggtgtgcctgtttgtgggcatctatgccatggtgaagctgctgctcttcagcgaggtgcggcggcccatccgggacccctggttctgggccctgtttgtgtggacctacatcagcctgggcgccagcttcctgctgtggtggctgctgagcacagtgcggcccggcacccaggccctggagcctggagctgccacagaagctgagggcttccctggcagcggccggcccccacctgagcaggccagcggggccaccctgcagaagctgctgagctacaccaagccagatgtggccttcctggtggccgccagcttcttcctgattgtggccgccctgggggagaccttcctgccctactacacaggccgggccattgatggcatcgtcatccagaagtccatggaccagttcagcacagctgtggtgattgtgtgcctgctggccatcggcagcagctttgctgctggcatccggggcggcatcttcaccctcatctttgcccggctgaacatccggctgaggaactgcctcttccgcagcctggtgtcccaggagaccagcttctttgatgaaaatagaactggagacctgatcagccggctgaccagtgacaccaccatggtgtctgacctggtgtcccagaacatcaacgtgttcctgaggaacacagtgaaggtgactggagtggtggtgttcatgttcagcctgtcctggcagctgagcctggtgaccttcatgggcttccccatcatcatgatggtgagcaacatctacggcaagtactacaagaggctgagcaaggaggtgcagaatgccctggcccgggccagcaacacagctgaggagaccatcagcgccatgaagacagtgcgcagctttgccaatgaggaggaggaggccgaggtgtacctgaggaagctgcagcaggtgtacaagctgaacaggaaggaggccgccgcctacatgtactacgtgtggggcagcggcctgaccctgctggtggtgcaggtgtccatcctgtactacggcggccacctggtgatcagcggccagatgaccagcggcaacctgattgccttcatcatctatgaatttgtgctgggggactgcatggagagcgtgggctctgtgtacagcggcctgatgcagggcgtgggcgctgctgagaaggtgtttgagttcatcgaccggcagcccaccatggtgcatgatggcagcctggccccagaccacctggagggccgggtggactttgaaaatgtgaccttcacctaccgcacccggccccacacccaggtgctgcagaatgtgtccttcagcctgagccctgggaaggtgacagccctggtgggccccagcggcagcggcaagagcagctgtgtgaacatcctggagaacttctaccccctggagggcggccgggtgctgctggatggcaagcccatcagcgcctatgaccacaagtacctgcacagggtcatcagcctggtgtcccaggagcctgtgctgtttgcccggagcatcacagacaacatctcctatggcctgcccaccgtgccctttgagatggtggtggaggccgcccagaaggccaatgcccacggcttcatcatggagctgcaggacggctacagcacagagaccggggagaagggggcccagctgagcggcggccagaagcagagggtggccatggcccgggccctggtgagaaatcctcctgtgctgatcctggatgaggccaccagcgccctggatgctgagagcgagtacctgatccagcaggccatccacggcaacctgcagaagcacacagtgctgatcatcgcccaccggctgagcacagtggagcacgcccacctgattgtggtgctggacaagggccgggtggtgcagcagggcacccaccagcagctgctggcccagggcggcctgtatgccaagctggtgcagaggcagatgctgggcctgcagcctgctgctgacttcaccgctggccacaatgaacctgtggccaacggcagccacaaggcctag

SEQ ID NO: 144594 - DNA, 2172 bp, synthetic construct
  misc_feature 1..2172: note = Description of Artificial Sequence: Synthetic coding sequence
  source 1..2172: mol_type = other DNA
atgaggctgtggaaggctgtggtggtgaccctggccttcatgtctgtggacatctgtgtgaccacagccatctacgtgttcagccacctggacaggagcctgctggaggacatccgccacttcaacatctttgacagcgtgctggacctgtgggccgcctgcctgtaccgcagctgcctgctgctgggcgccaccatcggcgtggccaagaacagcgccctgggcccccggcggctgcgggcctcctggctggtgatcaccctggtgtgcctgtttgtgggcatctatgccatggtgaagctgctgctcttcagcgaggtgcggcggcccatccgggacccctggttctgggccctgtttgtgtggacctacatcagcctgggcgccagcttcctgctgtggtggctgctgagcacagtgcggcccggcacccaggccctggagcctggagctgccacagaagctgagggcttccctggcagcggccggcccccacctgagcaggccagcggggccaccctgcagaagctgctgagctacaccaagccagatgtggccttcctggtggccgccagcttcttcctgattgtggccgccctgggggagaccttcctgccctactacacaggccgggccattgatggcatcgtcatccagaagtccatggaccagttcagcacagctgtggtgattgtgtgcctgctggccatcggcagcagctttgctgctggcatccggggcggcatcttcaccctcatctttgcccggctgaacatccggctgaggaactgcctcttccgcagcctggtgtcccaggagaccagcttctttgatgaaaatagaactggagacctgatcagccggctgaccagtgacaccaccatggtgtctgacctggtgtcccagaacatcaacgtgttcctgaggaacacagtgaaggtgactggagtggtggtgttcatgttcagcctgtcctggcagctgagcctggtgaccttcatgggcttccccatcatcatgatggtgagcaacatctacggcaagtactacaagaggctgagcaaggaggtgcagaatgccctggcccgggccagcaacacagctgaggagaccatcagcgccatgaagacagtgcgcagctttgccaatgaggaggaggaggccgaggtgtacctgaggaagctgcagcaggtgtacaagctgaacaggaaggaggccgccgcctacatgtactacgtgtggggcagcggctctgtgggctctgtgtacagcggcctgatgcagggcgtgggcgctgctgagaaggtgtttgagttcatcgaccggcagcccaccatggtgcatgatggcagcctggccccagaccacctggagggccgggtggactttgaaaatgtgaccttcacctaccgcacccggccccacacccaggtgctgcagaatgtgtccttcagcctgagccctgggaaggtgacagccctggtgggccccagcggcagcggcaagagcagctgtgtgaacatcctggagaacttctaccccctggagggcggccgggtgctgctggatggcaagcccatcagcgcctatgaccacaagtacctgcacagggtcatcagcctggtgtcccaggagcctgtgctgtttgcccggagcatcacagacaacatctcctatggcctgcccaccgtgccctttgagatggtggtggaggccgcccagaaggccaatgcccacggcttcatcatggagctgcaggacggctacagcacagaaacaggagagaagggggcccagctgagcggcggccagaagcagagggtggccatggcccgggccctggtgaggaacccccctgtgctgatcctggatgaggccaccagcgccctggatgctgagagcgagtacctgatccagcaggccatccacggcaacctgcagaagcacacagtgctgatcatcgcccaccggctgagcacagtggagcacgcccacctgattgtggtgctggacaagggccgggtggtgcagcagggcacccaccagcagctgctggcccagggcggcctgtatgccaagctggtgcagaggcagatgctgggcctgcagcctgctgctgacttcaccgctggccacaatgaacctgtggccaacggcagccacaaggcctag

SEQ ID NO: 144595 - DNA, 2301 bp, synthetic construct; identical to SEQ ID NO: 144593
  misc_feature 1..2301: note = Description of Artificial Sequence: Synthetic coding sequence
  source 1..2301: mol_type = other DNA

SEQ ID NO: 144596 - DNA, 2310 bp, synthetic construct
  misc_feature 1..2310: note = Description of Artificial Sequence: Synthetic coding sequence
  source 1..2310: mol_type = other DNA
atgaggctgtggaaggctgtggtggtgaccctggccttcatgtctgtggacatctgtgtgaccacagccatctacgtgttcagccacctggacaggagcctgctggaggacatccgccacttcaacatctttgacagcgtgctggacctgtgggccgcctgcctgtaccgcagctgcctgctgctgggcgccaccatcggcgtggccaagaacagcgccctgggcccccggcggctgcgggcctcctggctggtgatcaccctggtgtgcctgtttgtgggcatctatgccatggtgaagctgctgctcttcagcgaggtgcggcggcccatccgggacccctggttctgggccctgtttgtgtggacctacatcagcctgggcgccagcttcctgctgtggtggctgctgagcacagtgcggcccggcacccaggccctggagcctggagctgccacagaagctgagggcttccctggcagcggccggcccccacctgagcaggccagcggggccaccctgcagaagctgctgagctacaccaagccagatgtggccttcctggtggccgccagcttcttcctgattgtggccgccctgggggagaccttcctgccctactacacaggccgggccattgatggcatcgtcatccagaagtccatggaccagttcagcacagctgtggtgattgtgtgcctgctggccatcggcagcagctttgctgctggcatccggggcggcatcttcaccctcatctttgcccggctgaacatccggctgaggaactgcctcttccgcagcctggtgtcccaggagaccagcttctttgatgaaaatagaactggagacctgatcagccggctgaccagtgacaccaccatggtgtctgacctggtgtcccagaacatcaacgtgttcctgaggaacacagtgaaggtgactggagtggtggtgttcatgttcagcctgtcctggcagctgagcctggtgaccttcatgggcttccccatcatcatgatggtgagcaacatctacggcaagtactacaagaggctgagcaaggaggtgcagaatgccctggcccgggccagcaacacagctgaggagaccatcagcgccatgaagacagtgcgcagctttgccaatgaggaggaggaggccgaggtgtacctgaggaagctgcagcaggtgtacaagctgaacaggaaggaggccgccgcctacatgtactacgtgtggggcagcggcctgaccctgctggtggtgcaggtgtccatcctgtactacggcggccacctggtgatcagcggccagatgaccagcggcaacctgattgccttcatcatctatgaatttgtgctgggggactgcatggagagcgtgggctctgtgtacagcggcctgatgcagggcgtgggcgctgctgagaaggtgtttgagttcatcgaccggcagcccaccatggtgcatgatggcagcctggccccagaccacctggagggccgggtggactttgaaaatgtgaccttcacctaccgcacccggccccacacccaggtgctgcagaatgtgtccttcagcctgagccctgggaaggtgacagccctggtgggccccagcggcagcggcaagagcagctgtgtgaacatcctggagaacttctaccccctggagggcggccgggtgctgctggatggcaagcccatcagcgcctatgaccacaagtacctgcacagggtcatcagcctggtgtcccaggagcctgtgctgtttgcccggagcatcacagacaacatctcctatggcctgcccaccgtgccctttgagatggtggtggaggccgcccagaaggccaatgcccacggcttcatcatggagctgcaggacggctacagcacagagaccggggagaagggggcccagctgagcggcggccagaagcagagggtggccatggcccgggccctggtgagaaatcctcctgtgctgatcctggatgaggccaccagcgccctggatgctgagagcgagtacctgagcccccagatccagcaggccatccacggcaacctgcagaagcacacagtgctgatcatcgcccaccggctgagcacagtggagcacgcccacctgattgtggtgctggacaagggccgggtggtgcagcagggcacccaccagcagctgctggcccagggcggcctgtatgccaagctggtgcagaggcagatgctgggcctgcagcctgctgctgacttcaccgctggccacaatgaacctgtggccaacggcagccacaaggcctag

SEQ ID NO: 144597 - DNA, 2112 bp, synthetic construct
  misc_feature 1..2112: note = Description of Artificial Sequence: Synthetic coding sequence
  source 1..2112: mol_type = other DNA
atgaggctgtggaaggctgtggtggtgaccctggccttcatgtctgtggacatctgtgtgaccacagccatctacgtgttcagccacctggacaggagcctgctggaggacatccgccacttcaacatctttgacagcgtgctggacctgtgggccgcctgcctgtaccgcagctgcctgctgctgggcgccaccatcggcgtggccaagaacagcgccctgggcccccggcggctgcgggcctcctggctggtgatcaccctggtgtgcctgtttgtgggcatctatgccatggtgaagctgctgctcttcagcgaggtgcggcggcccatccgggacccctggttctgggccctgtttgtgtggacctacatcagcctgggcgccagcttcctgctgtggtggctgctgagcacagtgcggcccggcacccaggccctggagcctggagctgccacagaagctgagggcttccctggcagcggccggcccccacctgagcaggccagcggggccaccctgcagaagctgctgagctacaccaagccagatgtggccttcctggtggccgccagcttcttcctgattgtggccgccctgggggagaccttcctgccctactacacaggccgggccattgatggcatcgtcatccagaagtccatggaccagttcagcacagctgtggtgattgtgtgcctgctggccatcggcagcagctttgctgctggcatccggggcggcatcttcaccctcatctttgcccggctgaacatccggctgaggaactgcctcttccgcagcctggtgtcccaggagaccagcttctttgatgaaaatagaactggagacctgatcagccggctgaccagtgacaccaccatggtgtctgacctggtgtcccagaacatcaacgtgttcctgaggaacacagtgaaggtgactggagtggtggtgttcatgttcagcctgtcctggcagctgagcctggtgaccttcatgggcttccccatcatcatgatggtgagcaacatctacggcaagtactacaagaggctgagcaaggaggtgcagaatgccctggcccgggccagcaacacagctgaggagaccatcagcgccatgaagacagtgcgcagctttgccaatgaggaggaggaggccgaggtgtacctgaggaagctgcagcaggtgtacaagctgaacaggaaggaggccgccgcctacatgtactacgtgtggggcagcggcctgaccctgctggtggtgcaggtgtccatcctgtactacggcggccacctggtgatcagcggccagatgaccagcggcaacctgattgccttcatcatctatgaatttgtgctgggggactgcatggagaatgtgtccttcagcctgagccctgggaaggtgacagccctggtgggccccagcggcagcggcaagagcagctgtgtgaacatcctggagaacttctaccccctggagggcggccgggtgctgctggatggcaagcccatcagcgcctatgaccacaagtacctgcacagggtcatcagcctggtgtcccaggagcctgtgctgtttgcccggagcatcacagacaacatctcctatggcctgcccaccgtgccctttgagatggtggtggaggccgcccagaaggccaatgcccacggcttcatcatggagctgcaggacggctacagcacagaaacaggagagaagggggcccagctgagcggcggccagaagcagagggtggccatggcccgggccctggtgaggaacccccctgtgctgatcctggatgaggccaccagcgccctggatgctgagagcgagtacctgatccagcaggccatccacggcaacctgcagaagcacacagtgctgatcatcgcccaccggctgagcacagtggagcacgcccacctgattgtggtgctggacaagggccgggtggtgcagcagggcacccaccagcagctgctggcccagggcggcctgtatgccaagctggtgcagaggcagatgctgggcctgcagcctgctgctgacttcaccgctggccacaatgaacctgtggccaacggcagccacaaggcctag

SEQ ID NO: 144598 - DNA, 2301 bp, synthetic construct; identical to SEQ ID NO: 144593
  misc_feature 1..2301: note = Description of Artificial Sequence: Synthetic coding sequence
  source 1..2301: mol_type = other DNA

SEQ ID NO: 144599 - DNA, 4395 bp, synthetic construct
  misc_feature 1..4395: note = Description of Artificial Sequence: Synthetic coding sequence
  source 1..4395: mol_type = other DNA
atgtgcctgctggtgttccccctggtgcccaggagcccagactacatcctgccctgcagccctggctggaggctgcggctggccgccagcttcctgctgagcgtcttccccctgctggacctgctgcctgtggccctgcccccaggggccggccctggccccatcggcctggaggtgctggccggctgtgtggccgctgtggcctggatcagccacagcctggccctgtgggtgctggcccacagcccccacggccacagccggggccccctggccctggccctggtggccctgctgcctgccccagccctggtgctgactgtgctgtggcactgccagaggggcaccctgctgccccccctgctgcccggccccatggcccggctgtgcctgctgatcctgcagctggccgccctgctggcctatgccctgggctgggccgcccctgggggcccccgggagccctgggcccaggagcccctgctgcctgaggaccaggagcctgaggtggccgaggatggagagagctggctgagccgcttctcctatgcctggctggcccccctgctggcccggggggcctgtggggagctgcggcagccccaggacatctgccgcctgccccaccggctgcagcccacctacctggcccgggtcttccaggcccactggcaggagggcgcccggctgtggagggccctgtatggagccttcggccgctgctacctggccctgggcctgctgaagctggtgggcaccatgctgggcttcagcggccccctgctgctgagcctgctggtgggcttcctggaggagggccaggagcccctgagccacggcctgctgtatgccctgggcctggccggcggcgctgtgctgggcgctgtgctgcagaaccagtatggctatgaggtgtacaaggtgaccctgcaggcccggggagctgtgctgaacatcctgtactgcaaggccctgcagctgggccccagccggccccccaccggggaggccctgaacctgctgggcacagattctgagcggctgctgaactttgctggcagcttccacgaggcctggggcctgcccctgcagctggccatcaccctgtacctgctgtaccagcaggtgggcgtggcctttgtgggcggcctcatcctggccctgctgctggtgcctgtgaacaaggtgattgccacccgcatcatggccagcaaccaggagatgctgcagcacaaggatgcccgggtgaagctggtgacagagctgctgagcggcatccgggtcatcaagttctgtggctgggagcaggccctgggcgcccgggtggaggcctgccgggcccgggagctgggccgcctgcgggtcatcaagtacctggatgctgcctgtgtgtacctgtgggccgccctgcctgtggtgatcagcatcgtcatcttcatcacctacgtgctgatgggccaccagctgacagccaccaaggtgttcaccgccctggccctggtgaggatgctgatcctgcccctgaacaacttcccctgggtgatcaatggcctgctggaggccaaggtgtccctggaccgcatccagctgttcctggacctgcccaaccacaacccccaggcctactacagcccagactgtggccgcctgggcgcccagatcaagtggctgctgtgcagcgaccccccagctgagcccagcacagtgctggagctgcatggagccctcttctcctgggaccctgtgggcaccagcctggagaccttcatcagccacctggaggtgaagaagggcatgctggtgggcatcgtgggcaaggtgggctgcggcaagagcagcctgctggccgccatcgccggggagctgcaccggctgcggggccacgtggccgtgcggggcctgagcaagggcttcggcctggccacccaggagccctggatccagtttgccaccatccgggacaacatcctgtttgggaagacctttgatgcccagctgtacaaggaggtgctggaggcctgtgccctgaatgatgacctgagcatcctgcctgctggggaccagacagaggtgggggagaagggcgtgaccctgagcggcggccagagggcccgcatcgccctggcccgggctgtgtaccaggagaaggagctgtacctgctggatgaccccctggccgctgtggatgctgatgtggccaaccacctgctgcaccgctgcatcctgggcatgctgagctacaccacccggctgctgtgcacccacaggacagagtacctggagcgggcagatgctgtgctgctgatggaggccggccgcctcatccgggccggccccccatctgagatcctgcccctggtgcaggccgtgcccaaggcctgggccgagaatggccaggagagtgacagcgccacagcccagagcgtgcagaaccctgagaagaccaaggagggcctggaggaggagcagagcaccagcggccgcctgctgcaggaggagagcaagaaggagggcgctgtggccctgcacgtgtaccaggcctactggaaggctgtgggccagggcctggccctggccatcctcttcagcctgctgctgatgcaggccaccagaaatgctgctgactggtggctgagccactggatcagccagctgaaggccgagaacagcagccaggaggcccagcccagcaccagccctgcctccatgggcctcttcagcccccagctgctgctcttcagccctggcaacctgtacatccctgtgttccccctgcccaaggccgccccaaatggcagcagtgacatccgcttctacctgactgtgtatgccaccatcgccggcgtgaacagcctgtgcaccctgctgcgggctgtgctgtttgctgctggcaccctgcaggccgccgccaccctgcaccggcggctgctgcaccgggtgctgatggcccctgtgaccttcttcaatgccacccccaccggccgcatcctgaaccgcttcagcagtgatgtggcctgtgctgatgacagcctgcccttcatcctgaacatcctgctggccaatgctgctggcctgctgggcctgctggccgtgctgggcagcggcctgccctggctgctgctgctgctgccccccctgagcatcatgtactaccacgtgcagaggcactaccgggccagcagccgggagctgcggcggctgggcagcctgaccctgagccccctgtacagccacctggccgacaccctggccggcctgtctgtgctgcgggccaccggggccacctacagatttgaggaggagaacctgcggctgctggagctgaaccagcgctgccagtttgccaccagcgccaccatgcagtggctggacatccggctgcagctgatgggcgctgctgtggtgtctgccatcgccggcatcgccctggtgcagcaccagcagggcctggccaaccctggcctggtgggcctgagcctgtcctatgccctgagcctgaccggcctgctgagcggcctggtgagcagcttcacccagacagaggccatgctggtgtctgtggagcggctggaggagtacacctgtgacctgccccaggagccccagggccagcccctgcagctgggcaccggctggctgacccagggcggcgtggagttccaggatgtggtgctggcctacagacctggcctgcccaatgccctggatggagtgaccttctgtgtgcagcccggggagaagctgggcatcgtgggccgcacaggcagcggcaagagcagcctgctgctggtgctcttccggctgctggagcccagcagcggccgggtgctgctggatggagtggacaccagccagctggagctggcccagctgcggagccagctggccatcatcccccaggagcccttcctgttcagcggcaccgtgcgggagaacctggacccccagggcctgcacaaggaccgggccctgtggcaggccctgaagcagtgccacctgtctgaggtgatcacctccatgggcggcctggatggagagctgggggagggcggccgcagcctgagcctgggccagaggcagctgctgtgcctggcccgggccctgctgacagatgccaagatcctgtgcattgatgaggccacagcctctgtggaccagaagacagaccagctgctgcagcagaccatctgcaagagatttgccaacaagacagtgctgaccatcgcccaccggctgaacaccatcctgaacagcgacagagtgctggtgctgcaggccggccgggtggtggagctggacagccctgccaccctgaggaaccagccccacagcctcttccagcagctgctgcagagcagccagcagggcgtgcctgccagcctgggcggcccctag

SEQ ID NO: 144600 - DNA, 4479 bp, synthetic construct
  misc_feature 1..4479: note = Description of Artificial Sequence: Synthetic coding sequence
  source 1..4479: mol_type = other DNA
atggagcggctgctggcccagctgtgtggcagcagcgctgcctggcccctgcccctgtgggagggggacaccaccggccactgcttcacccagctggtgctgagcgccctgccccacgccctgctggccgtgctgagcgcctgctacctgggcacccccaggagcccagactacatcctgccctgcagccctggctggaggctgcggctggccgccagcttcctgctgtctgtgttccccctgctggacctgctgcctgtggccctgcccccaggagctggccctggccccatcggcctggaggtgctggccggctgtgtggccgctgtggcctggatcagccacagcctggccctgtgggtgctggcccacagcccccacggccacagccggggccccctggccctggccctggtggccctgctgcctgccccagccctggtgctgactgtgctgtggcactgccagaggggcaccctgctgccccccctgctgcccggccccatggcccggctgtgcctgctgatcctgcagctggccgccctgctggcctatgccctgggctgggccgcccctgggggcccccgggagccctgggcccaggagcccctgctgcctgaggaccaggagcctgaggtggctgaagatggagagagctggctgagccgcttctcctatgcctggctggcccccctgctggcccggggggcctgtggggagctgcggcagccccaggacatctgccgcctgccccaccggctgcagcccacctacctggcccgggtcttccaggcccactggcaggagggcgcccggctgtggagggccctgtatggagccttcggccgctgctacctggccctgggcctgctgaagctggtgggcaccatgctgggcttcagcggccccctgctgctgagcctgctggtgggcttcctggaggagggccaggagcccctgagccacggcctgctgtatgccctgggcctggccggcggcgctgtgctgggcgctgtgctgcagaaccagtatggctatgaggtgtacaaggtgaccctgcaggcccggggagctgtgctgaacatcctgtactgcaaggccctgcagctgggccccagccggcccccaactggagaggccctgaacctgctgggcacagacagcgagcggctgctgaactttgctggcagcttccacgaggcctggggcctgcccctgcagctggccatcaccctgtacctgctgtaccagcaggtgggcgtggcctttgtgggcggcctcatcctggccctgctgctggtgcctgtgaacaaggtgattgccacccgcatcatggccagcaaccaggagatgctgcagcacaaggatgcccgggtgaagctggtgacagagctgctgagcggcatccgggtcatcaagttctgtggctgggagcaggccctgggcgcccgggtggaggcctgccgggcccgggagctgggccgcctgcgggtcatcaagtacctggatgctgcctgtgtgtacctgtgggccgccctgcctgtggtgatcagcatcgtcatcttcatcacctacgtgctgatgggccaccagctgacagccaccaaggtgttcaccgccctggccctggtgaggatgctgatcctgcccctgaacaacttcccctgggtgatcaatggcctgctggaggccaaggtgtccctggaccgcatccagctgttcctggacctgcccaaccacaacccccaggcctactacagcccagaccccccagctgagcccagcacagtgctggagctgcatggagccctcttctcctgggaccctgtgggcaccagcctggagaccttcatcagccacctggaggtgaagaagggcatgctggtgggcatcgtgggcaaggtgggctgcggcaagagcagcctgctggccgccatcgccggggagctgcaccggctgcggggccacgtggccgtgcggggcctgagcaagggcttcggcctggccacccaggagccctggatccagtttgccaccatccgggacaacatcctgtttgggaagacctttgatgcccagctgtacaaggaggtgctggaggcctgtgccctgaatgatgacctgagcatcctgcctgctggggaccagacagaggtgggggagaagggcgtgaccctgagcggcggccagagggcccgcatcgccctggcccgggctgtgtaccaggagaaggagctgtacctgctggatgaccccctggccgctgtggatgctgatgtggccaaccacctgctgcaccgctgcatcctgggcatgctgagctacaccacccggctgctgtgcacccacaggacagagtacctggagcgggcagatgctgtgctgctgatggaggccggccgcctcatccgggccggccccccatctgagatcctgcccctggtgcaggccgtgcccaaggcctgggccgagaatggccaggagagtgacagcgccacagcccagagcgtgcagaaccctgagaagaccaaggagggcctggaggaggagcagagcaccagcggccgcctgctgcaggaggagagcaagaaggagggcgctgtggccctgcacgtgtaccaggcctactggaaggctgtgggccagggcctggccctggccatcctcttcagcctgctgctgatgcaggccaccagaaatgctgctgactggtggctgagccactggatcagccagctgaaggccgagaacagcagccaggaggcccagcccagcaccagccctgcctccatgggcctcttcagcccccagctgctgctcttcagccctggcaacctgtacatccctgtgttccccctgcccaaggccgccccaaatggcagcagtgacatccgcttctacctgactgtgtatgccaccatcgccggcgtgaacagcctgtgcaccctgctgcgggctgtgctgtttgctgctggcaccctgcaggccgccgccaccctgcaccggcggctgctgcaccgggtgctgatggcccctgtgaccttcttcaatgccacccccaccggccgcatcctgaaccgcttcagcagtgatgtggcctgtgctgatgacagcctgcccttcatcctgaacatcctgctggccaatgctgctggcctgctgggcctgctggccgtgctgggcagcggcctgccctggctgctgctgctgctgccccccctgagcatcatgtactaccacgtgcagaggcactaccgggccagcagccgggagctgcggcggctgggcagcctgaccctgagccccctgtacagccacctggccgacaccctggccggcctgtctgtgctgcgggccaccggggccacctacagatttgaggaggagaacctgcggctgctggagctgaaccagcgctgccagtttgccaccagcgccaccatgcagtggctggacatccggctgcagctgatgggcgctgctgtggtgtctgccatcgccggcatcgccctggtgcagcaccagcagggcctggccaaccctggcctggtgggcctgagcctgtcctatgccctgagcctgaccggcctgctgagcggcctggtgagcagcttcacccagacagaggccatgctggtgtctgtggagcggctggaggagtacacctgtgacctgccccaggagccccagggccagcccctgcagctgggcaccggctggctgacccagggcggcgtggagttccaggatgtggtgctggcctacagacctggcctgcccaatgccctggatggagtgaccttctgtgtgcagcccggggagaagctgggcatcgtgggccgcacaggcagcggcaagagcagcctgctgctggtgctcttccggctgctggagcccagcagcggccgggtgctgctggatggagtggacaccagccagctggagctggcccagctgcggagccagctggccatcatcccccaggagcccttcctgttcagcggcaccgtgcgggagaacctggacccccagggcctgcacaaggaccgggccctgtggcaggccctgaagcagtgccacctgtctgaggtgatcacctccatgggcggcctggatggagagctgggggagggcggccgcagcctgagcctgggccagaggcagctgctgtgcctggcccgggccctgctgacagatgccaagatcctgtgcattgatgaggccacagcctctgtggaccagaagacagaccagctgctgcagcagaccatctgcaagagatttgccaacaagacagtgctgaccatcgcccaccggctgaacaccatcctgaacagcgacagagtgctggtgctgcaggccggccgggtggtggagctggacagccctgccaccctgaggaaccagccccacagcctcttccagcagctgctgcagagcagccagcagggcgtgcctgccagcctgggcggcccctag

SEQ ID NO: 144601 - DNA, 4035 bp, synthetic construct
  misc_feature 1..4035: note = Description of Artificial Sequence: Synthetic coding sequence
  source 1..4035: mol_type = other DNA
atgaccaggaagaggacctactgggtgcccaacagcagcggcggcctggtgaacagaggaattgatattggagatgacatggtgtctggcctcatctacaagacctacaccctgcaggacggcccctggagccagcaggagaggaaccctgaggcccctggccgggctgctgtgcccccctggggcaagtatgatgctgccctgcggaccatgatccccttccggcccaagccccgcttccctgccccccagcccctggacaatgccggcctcttctcctacctgactgtgtcctggctgacccccctgatgatccagagcctgcggagccggctggatgagaacaccatcccccccctgtctgtgcatgatgccagtgacaagaatgtgcagaggctgcaccggctgtgggaggaggaggtgtccagaagaggcatcgagaaggcctctgtgctgctggtgatgctgcgcttccagaggaccaggctcatctttgatgccctgctgggcatctgcttctgcatcgcctctgtgctgggccccatcctgatcatccccaagatcctggagtacagcgaggagcagctgggcaatgtggtgcatggagtgggcctgtgctttgccctcttcctgtctgaatgtgtgaagagcctgtccttcagcagctcctggatcatcaaccagaggacagccatccgcttccgggctgctgtgagcagctttgcctttgagaagctgatccagttcaagagcgtcatccacatcaccagcggggaggccatctccttcttcaccggagatgtgaactacctgtttgagggcgtgtgctacggccccctggtgctgatcacctgtgccagcctggtgatctgcagcatcagcagctacttcatcatcggctacacagccttcatcgccatcctgtgctacctgctggtgttccccctggccgtgttcatgaccaggatggctgtgaaggcccagcaccacaccagcgaggtgtctgaccagaggatccgggtgaccagcgaggtgctgacctgcatcaagctgatcaagatgtacacctgggagaagccctttgccaagatcatcgaggacctgcggaggaaggagaggaagctgctggagaagtgtggcctggtgcagagcctgaccagcatcaccctcttcatcatccccaccgtggccacagctgtgtgggtgctgatccacaccagcctgaagctgaagctgacagcctccatggccttctccatgctggccagcctgaacctgctgcggctgagcgtcttctttgtgcccatcgctgtgaagggcctgaccaacagcaagtctgctgtgatgaggttcaagaagttcttcctgcaggagagccctgtgttctacgtgcagaccctgcaggaccccagcaaggccctggtgtttgaggaggccaccctgtcctggcagcagacctgccccggcatcgtgaatggagccctggagctggagagaaatggccacgccagcgagggcatgacccggcccagagatgccctgggccctgaggaggagggcaacagcctgggccctgagctgcacaagatcaacctggtggtgtccaagggcatgatgctgggcgtgtgtggcaacacaggcagcggcaagagcagcctgctgagcgccatcctggaggagatgcacctgctggagggctctgtgggcgtgcagggcagcctggcctacgtgccccagcaggcctggatcgtgtctggcaacatccgggagaacatcctgatgggcggggcctatgacaaggcccgctacctgcaggtgctgcactgctgcagcctgaacagagacctggagctgctgccctttggagacatgacagaaattggagagcggggcctgaacctgagcggcggccagaagcagaggatcagcctggcccgggctgtgtacagcgaccggcagatctacctgctggatgaccccctgtctgctgtggatgcccacgtgggcaagcacatctttgaggagtgcatcaagaagaccctgcggggcaagacagtggtgctggtgacccaccagctgcagtacctggagttctgtggccagatcatcctgctggagaatggcaagatctgtgaaaatggcacccacagcgagctgatgcagaagaagggcaagtatgcccagctgatccagaagatgcacaaggaggccaccagtgacatgctgcaggacacagccaagattgctgagaagcccaaggtggagagccaggccctggccaccagcctggaggagagcctgaatggaaatgctgtgcctgagcaccagctgacccaggaggaggagatggaggagggcagcctgtcctggagggtgtaccaccactacatccaggccgccggcggctacatggtgtcctgcatcatcttcttctttgtggtgctgattgtgttcctgaccatcttctccttctggtggctgagctactggctggagcagggcagcggcaccaacagcagccgggagagcaatggcaccatggctgacctgggcaacattgctgacaacccccagctgtccttctaccagctggtgtatggcctgaatgccctgctgctgatctgtgtgggcgtgtgcagcagcggcatcttcaccaaggtgaccaggaaggccagcacagccctgcacaacaagctgttcaacaaggtgttccgctgccccatgtccttctttgacaccatccccatcggccgcctgctgaactgctttgctggggacctggagcagctggaccagctgctgcccatcttcagcgagcagttcctggtgctgagcctgatggtgattgctgtgctgctgattgtgtctgtgctgagcccctacatcctgctgatgggcgccatcatcatggtgatctgcttcatctactacatgatgttcaagaaggccatcggggtcttcaagaggctggagaactacagccgcagccccctcttcagccacatcctgaacagcctgcagggcctgagcagcatccacgtgtatggcaagacagaggacttcatcagccagttcaagaggctgacagatgcccagaacaactacctgctgctcttcctgagcagcacccgctggatggccctgcggctggagatcatgaccaacctggtgaccctggccgtggccctgtttgtggccttcggcatcagcagcaccccctacagcttcaaggtgatggctgtgaacatcgtgctgcagctggccagcagcttccaggccacagccagaattggcctggagacagaggcccagttcaccgctgtggagcgcatcctgcagtacatgaagatgtgtgtgtctgaggcccccctgcacatggagggcaccagctgcccccagggctggccccagcacggggagatcatcttccaggactaccacatgaagtacagagacaacacccccaccgtgctgcacggcatcaacctgaccatccggggccacgaggtggtgggcatcgtgggccgcactggaagtggcaagagcagcctgggcatggccctcttccggctggtggagcccatggccggccgcatcctgattgatggagtggacatctgcagcatcggcctggaggacctgcggagcaagctgagcgtcatcccccaggaccctgtgctgctgagcggcaccatccgcttcaacctggacccctttgacagacacacagaccagcagatctgggatgccctggagaggaccttcctgaccaaggccatcatcctgattgatgaggccacagccagcattgacatggagacagacaccctcatccagaggaccatccgggaggccttccagggctgcaccgtgctggtgattgcccaccgggtgaccaccgtgctgaactgtgaccacatcctggtgatgggaaatggcaaggtggtggagtttgacaggcctgaggtgctgaggaagaagccaggcagcctgtttgctgccctgatggccacagccaccagcagcctgaggtag

SEQ ID NO: 144602 - DNA, 4149 bp, synthetic construct
  misc_feature 1..4149: note = Description of Artificial Sequence: Synthetic coding sequence
  source 1..4149: mol_type = other DNA
atgaccaggaagaggacctactgggtgcccaacagcagcggcggcctggtgaacagaggaattgatattggagatgacatggtgtctggcctcatctacaagacctacaccctgcaggacggcccctggagccagcaggagaggaaccctgaggcccctggccgggctgctgtgcccccctggggcaagtatgatgctgccctgcggaccatgatccccttccggcccaagccccgcttccctgccccccagcccctggacaatgccggcctcttctcctacctgactgtgtcctggctgacccccctgatgatccagagcctgcggagccggctggatgagaacaccatcccccccctgtctgtgcatgatgccagtgacaagaatgtgcagaggctgcaccggctgtgggaggaggaggtgtccagaagaggcatcgagaaggcctctgtgctgctggtgatgctgcgcttccagaggaccaggctcatctttgatgccctgctgggcatctgcttctgcatcgcctctgtgctgggccccatcctgatcatccccaagatcctggagtacagcgaggagcagctgggcaatgtggtgcatggagtgggcctgtgctttgccctcttcctgtctgaatgtgtgaagagcctgtccttcagcagctcctggatcatcaaccagaggacagccatccgcttccgggctgctgtgagcagctttgcctttgagaagctgatccagttcaagagcgtcatccacatcaccagcggggaggccatctccttcttcaccggagatgtgaactacctgtttgagggcgtgtgctacggccccctggtgctgatcacctgtgccagcctggtgatctgcagcatcagcagctacttcatcatcggctacacagccttcatcgccatcctgtgctacctgctggtgttccccctggccgtgttcatgaccaggatggctgtgaaggcccagcaccacaccagcgaggtgtctgaccagaggatccgggtgaccagcgaggtgctgacctgcatcaagctgatcaagatgtacacctgggagaagccctttgccaagatcatcgaggacctgcggaggaaggagaggaagctgctggagaagtgtggcctggtgcagagcctgaccagcatcaccctcttcatcatccccaccgtggccacagctgtgtgggtgctgatccacaccagcctgaagctgaagctgacagcctccatggccttctccatgctggccagcctgaacctgctgcggctgagcgtcttctttgtgcccatcgctgtgaagggcctgaccaacagcaagtctgctgtgatgaggttcaagaagttcttcctgcaggagagccctgtgttctacgtgcagaccctgcaggaccccagcaaggccctggtgtttgaggaggccaccctgtcctggcagcagacctgccccggcatcgtgaatggagccctggagctggagagaaatggccacgccagcgagggcatgacccggcccagagatgccctgggccctgaggaggagggcaacagcctgggccctgagctgcacaagatcaacctggtggtgtccaagggcatgatgctgggcgtgtgtggcaacacaggcagcggcaagagcagcctgctgagcgccatcctggaggagatgcacctgctggagggctctgtgggcgtgcagggcagcctggcctacgtgccccagcaggcctggatcgtgtctggcaacatccgggagaacatcctgatgggcggggcctatgacaaggcccgctacctgcaggtgctgcactgctgcagcctgaacagagacctggagctgctgccctttggagacatgacagaaattggagagcggggcctgaacctgagcggcggccagaagcagaggatcagcctggcccgggctgtgtacagcgaccggcagatctacctgctggatgaccccctgtctgctgtggatgcccacgtgggcaagcacatctttgaggagtgcatcaagaagaccctgcggggcaagacagtggtgctggtgacccaccagctgcagtacctggagttctgtggccagatcatcctgctggagaatggcaagatctgtgaaaatggcacccacagcgagctgatgcagaagaagggcaagtatgcccagctgatccagaagatgcacaaggaggccaccagtgacatgctgcaggacacagccaagattgctgagaagcccaaggtggagagccaggccctggccaccagcctggaggagagcctgaatggaaatgctgtgcctgagcaccagctgacccaggaggaggagatggaggagggcagcctgtcctggagggtgtaccaccactacatccaggccgccggcggctacatggtgtcctgcatcatcttcttctttgtggtgctgattgtgttcctgaccatcttctccttctggtggctgagctactggctggagcagggcagcggcaccaacagcagccgggagagcaatggcaccatggctgacctgggcaacattgctgacaacccccagctgtccttctaccagctggtgtatggcctgaatgccctgctgctgatctgtgtgggcgtgtgcagcagcggcatcttcaccaaggtgaccaggaaggccagcacagccctgcacaacaagctgttcaacaaggtgttccgctgccccatgtccttctttgacaccatccccatcggccgcctgctgaactgctttgctggggacctggagcagctggaccagctgctgcccatcttcagcgagcagttcctggtgctgagcctgatggtgattgctgtgctgctgattgtgtctgtgctgagcccctacatcctgctgatgggcgccatcatcatggtgatctgcttcatctactacatgatgttcaagaaggccatcggggtcttcaagaggctggagaactacagccgcagccccctcttcagccacatcctgaacagcctgcagggcctgagcagcatccacgtgtatggcaagacagaggacttcatcagccagttcaagaggctgacagatgcccagaacaactacctgctgctcttcctgagcagcacccgctggatggccctgcggctggagatcatgaccaacctggtgaccctggccgtggccctgtttgtggccttcggcatcagcagcaccccctacagcttcaaggtgatggctgtgaacatcgtgctgcagctggccagcagcttccaggccacagccagaattggcctggagacagaggcccagttcaccgctgtggagcgcatcctgcagtacatgaagatgtgtgtgtctgaggcccccctgcacatggagggcaccagctgcccccagggctggccccagcacggggagatcatcttccaggactaccacatgaagtacagagacaacacccccaccgtgctgcacggcatcaacctgaccatccggggccacgaggtggtgggcatcgtgggccgcactggaagtggcaagagcagcctgggcatggccctcttccggctggtggagcccatggccggccgcatcctgattgatggagtggacatctgcagcatcggcctggaggacctgcggagcaagctgagcgtcatcccccaggaccctgtgctgctgagcggcaccatccgcttcaacctggacccctttgacagacacacagaccagcagatctgggatgccctggagaggaccttcctgaccaaggccatcagcaagttccccaagaagctgcacacagatgtggtggagaatggaggcaacttctctgtgggggagcggcagctgctgtgcatcgcccgggctgtgctgaggaacagcaagatcatcctgattgatgaggccacagccagcattgacatggagacagacaccctcatccagaggaccatccgggaggccttccagggctgcaccgtgctggtgattgcccaccgggtgaccaccgtgctgaactgtgaccacatcctggtgatgggaaatggcaaggtggtggagtttgacaggcctgaggtgctgaggaagaagccaggcagcctgtttgctgccctgatggccacagccaccagcagcctgaggtag

SEQ ID NO: 144603 - DNA, 4149 bp, synthetic construct; identical to SEQ ID NO: 144602
  misc_feature 1..4149: note = Description of Artificial Sequence: Synthetic coding sequence
  source 1..4149: mol_type = other DNA

SEQ ID NO: 144604 - DNA, 4149 bp, synthetic construct; identical to SEQ ID NO: 144602
  misc_feature 1..4149: note = Description of Artificial Sequence: Synthetic coding sequence
  source 1..4149: mol_type = other DNA

SEQ ID NO: 144605 - DNA, 2268 bp, synthetic construct
  misc_feature 1..2268: note = Description of Artificial Sequence: Synthetic coding sequence
  source 1..2268: mol_type = other DNA
atgaccaggaagaggacctactgggtgcccaacagcagcggcggcctggtgaacagaggaattgatattggagatgacatggtgtctggcctcatctacaagacctacaccctgcaggacggcccctggagccagcaggagaggaaccctgaggcccctggccgggctgctgtgcccccctggggcaagtatgatgctgccctgcggaccatgatccccttccggcccaagccccgcttccctgccccccagcccctggacaatgccggcctcttctcctacctgactgtgtcctggctgacccccctgatgatccagagcctgcggagccggctggatgagaacaccatcccccccctgtctgtgcatgatgccagtgacaagaatgtgcagaggctgcaccggctgtgggaggaggaggtgtccagaagaggcatcgagaaggcctctgtgctgctggtgatgctgcgcttccagaggaccaggctcatctttgatgccctgctgggcatctgcttctgcatcgcctctgtgctgggccccatcctgatcatccccaagatcctggagtacagcgaggagcagctgggcaatgtggtgcatggagtgggcctgtgctttgccctcttcctgtctgaatgtgtgaagagcctgtccttcagcagctcctggatcatcaaccagaggacagccatccgcttccgggctgctgtgagcagctttgcctttgagaagctgatccagttcaagagcgtcatccacatcaccagcggggaggccatctccttcttcaccggagatgtgaactacctgtttgagggcgtgtgctacggccccctggtgctgatcacctgtgccagcctggtgatctgcagcatcagcagctacttcatcatcggctacacagccttcatcgccatcctgtgctacctgctggtgttccccctggccgtgttcatgaccaggatggctgtgaaggcccagcaccacaccagcgaggtgtctgaccagaggatccgggtgaccagcgaggtgctgacctgcatcaagctgatcaagatgtacacctgggagaagccctttgccaagatcatcgaggacctgcggaggaaggagaggaagctgctggagaagtgtggcctggtgcagagcctgaccagcatcaccctcttcatcatccccaccgtggccacagctgtgtgggtgctgatccacaccagcctgaagctgaagctgacagcctccatggccttctccatgctggccagcctgaacctgctgcggctgagcgtcttctttgtgcccatcgctgtgaagggcctgaccaacagcaagtctgctgtgatgaggttcaagaagttcttcctgcaggagagccctgtgttctacgtgcagaccctgcaggaccccagcaaggccctggtgtttgaggaggccaccctgtcctggcagcagacctgccccggcatcgtgaatggagccctggagctggagagaaatggccacgccagcgagggcatgacccggcccagagatgccctgggccctgaggaggagggcaacagcctgggccctgagctgcacaagatcaacctggtggtgtccaagggcatgatgctgggcgtgtgtggcaacacaggcagcggcaagagcagcctgctgagcgccatcctggaggagatgcacctgctggagggctctgtgggcgtgcagggcagcctggcctacgtgccccagcaggcctggatcgtgtctggcaacatccgggagaacatcctgatgggcggggcctatgacaaggcccgctacctgcaggtgctgcactgctgcagcctgaacagagacctggagctgctgccctttggagacatgacagaaattggagagcggggcctgaacctgagcggcggccagaagcagaggatcagcctggcccgggctgtgtacagcgaccggcagatctacctgctggatgaccccctgtctgctgtggatgcccacgtgggcaagcacatctttgaggagtgcatcaagaagaccctgcggggcaagacagtggtgctggtgacccaccagctgcagtacctggagttctgtggccagatcatcctgctggagaatggcaagatctgtgaaaatggcacccacagcgagctgatgcagaagaagggcaagtatgcccagctgatccagaagatgcacaaggaggccaccagctgccgcagcatcagcagccacagaagaagacgctggaagaaggccccctag

SEQ ID NO: 144606 - DNA, 4080 bp, synthetic construct
  misc_feature 1..4080: note = Description of Artificial Sequence: Synthetic coding sequence
  source 1..4080: mol_type = other DNA
atggtgggggagggcccctacctgatcagtgacctggaccagagaggaagaagaagaagctttgctgagagatatgaccccagcctgaagaccatgatccctgtgcggccctgtgcccggctggcccccaaccctgtggatgatgctggcctgctgagctttgccaccttctcctggctgacccctgtgatggtgaagggctaccggcagaggctgactgtggacaccctgccccccctgagcacctatgacagcagtgacaccaatgccaagcgcttccgggtgctgtgggatgaggaggtggcccgggtgggccctgagaaggccagcctgagccacgtggtgtggaagttccagaggaccagggtgctgatggacatcgtggccaacatcctgtgcatcatcatggccgccatcggccctgtgatcctgatccaccagatcctgcagcagacagagaggaccagcggcaaggtgtgggtgggcatcggcctgtgcatcgccctgtttgccacagagttcaccaaggtgttcttctgggccctggcctgggccatcaactacagaacagccatccggctgaaggtggccctgagcaccctggtgtttgagaacctggtgtccttcaagaccctgacccacatctctgtgggggaggtgctgaacatcctgagcagtgacagctacagcctgtttgaggccgccctcttctgccccctgcctgccaccatccccatcctgatggtgttctgtgccgcctatgccttcttcatcctgggccccacagccctgattggcatctctgtgtatgtgatcttcatccctgtgcagatgttcatggccaagctgaacagcgccttccgccgcagcgccatcctggtgacagacaagagggtgcagaccatgaatgagttcctgacctgcatccgcctcatcaagatgtatgcctgggagaagagcttcaccaacaccatccaggacatcagaagaagagagaggaagctgctggagaaggccggctttgtgcagagcggcaacagcgccctggcccccatcgtgtccaccatcgccatcgtgctgaccctgagctgccacatcctgctgcggaggaagctgacagcccctgtggccttctctgtgattgccatgtttaatgtgatgaagttcagcatcgccatcctgcccttcagcatcaaggccatggccgaggccaacgtgtccctgcggaggatgaagaagatcctgattgacaagagcccccccagctacatcacccagcctgaggaccctgacacagtgctgctgctggccaatgccaccctgacctgggagcacgaggccagcaggaagagcacccccaagaagctgcagaaccagaagaggcacctgtgcaagaagcagaggtctgaggcctacagcgagaggagccccccagccaagggggccactggacctgaggagcagagcgacagcctgaagtctgtgctgcacagcatcagctttgtggtgaggaagggcaagatcctgggcatctgtggaaatgtgggcagcggcaagagcagcctgctggccgccctgctgggccagatgcagctgcagaagggcgtggtggccgtgaatggcaccctggcctacgtgtcccagcaggcctggatcttccacggcaatgtgcgggagaacatcctgtttggagagaagtatgaccaccagcgctaccagcacacagtgcgggtgtgtggcctgcagaaggacctgagcaacctgccctacggggacctgacagagatcggggagcggggcctgaacctgagcggcggccagaggcagaggatcagcctggcccgggctgtgtacagcgaccggcagctgtacctgctggatgaccccctgtctgctgtggatgcccacgtgggcaagcacgtgtttgaggagtgcatcaagaagaccctgcggggcaagacagtggtgctggtgacccaccagctgcagttcctggagagctgtgatgaagtcatcctgctggaggatggagagatctgtgagaagggcacccacaaggagctgatggaggagcggggccgctatgccaagctgatccacaacctgcggggcctgcagttcaaggaccctgagcacctgtacaatgctgccatggtggaggccttcaaggagagccctgctgagcgggaggaggatgctggcatcatcgtgctggcccctggaaatgagaaggatgagggcaaggagagcgagaccggcagcgagtttgtggacaccaaggtgcctgagcaccagctgatccagacagagagcccccaggagggcaccgtgacctggaagacctaccacacctacatcaaggccagcggcggctacctgctgagcctcttcaccgtcttcctgttcctgctgatgattggcagcgctgccttcagcaactggtggctgggcctgtggctggacaagggcagcaggatgacctgtggcccccagggcaacagaaccatgtgtgaggtgggcgctgtgctggccgacatcggccagcacgtgtaccagtgggtgtacacagcctccatggtgttcatgctggtgtttggagtgaccaagggctttgtgttcaccaagaccaccctgatggccagcagcagcctgcatgacacagtgtttgacaagatcctgaagagccccatgtccttctttgacaccacccccaccggccgcctgatgaaccgcttcagcaaggacatggatgagctggatgtgcggctgcccttccacgccgagaacttcctgcagcagttcttcatggtggtgttcatcctggtgatcctggccgctgtgtttcctgctgtgctgctggtggtggccagcctggccgtgggcttcttcatcctgctgcgcatcttccaccggggcgtgcaggagctgaagaaggtggagaatgtgagccgcagcccctggttcacccacatcaccagctccatgcagggcctgggcatcatccacgcctacggcaagaaggagagctgcatcacctaccacctgctgtacttcaactgtgccctgcgctggtttgccctgaggatggatgtgctgatgaacatcctgaccttcaccgtggccctgctggtgaccctgtccttcagcagcatcagcaccagcagcaagggcctgagcctgagctacatcatccagctgagcggcctgctgcaggtgtgtgtgaggactggaacagagacccaggccaagttcacctctgtggagctgctgcgggagtacatcagcacctgtgtgcctgagtgcacccaccccctgaaggtgggcacctgccccaaggactggcccagcagaggagagatcaccttccgggactaccagatgagatacagagacaacacccccctggtgctggacagcctgaacctgaacatccagagcggccagacagtgggcatcgtgggccgcacaggcagcggcaagagcagcctgggcatggccctcttccggctggtggagcccgccagcggcaccatcttcattgatgaggtggacatctgcatcctgagcctggaggacctgcggaccaagctgaccgtcatcccccaggaccctgtgctgtttgtgggcaccgtgcgctacaacctggacccctttgagagccacacagatgagatgctgtggcaggtgctggagaggaccttcatgagggacaccatcatgaagctgcctgagaagctgcaggccgaggtgacagaaaatggagagaacttctctgtgggggagcggcagctgctgtgtgtggcccgggccctgctgaggaacagcaagatcatcctgctggatgaggccacagcctccatggacagcaagacagacaccctggtgcagaacaccatcaaggatgccttcaagggctgcaccgtgctgaccatcgcccaccggctgaacacagtgctgaactgtgaccacgtgctggtgatggagaatggcaaggtgattgaatttgacaagccagaggtgctggccgagaagccagattctgcctttgccatgctgctggccgctgaggtgcggctgtag

SEQ ID NO: 144607 - DNA, 1902 bp, synthetic construct
  misc_feature 1..1902: note = Description of Artificial Sequence: Synthetic coding sequence
  source 1..1902: mol_type = other DNA
atggtgggggagggcccctacctgatcagtgacctggaccagagaggaagaagaagaagctttgctgagagatatgaccccagcctgaagaccatgatccctgtgcggccctgtgcccggctggcccccaaccctgtggatgatgctggcctgctgagctttgccaccttctcctggctgacccctgtgatggtgaagggctaccggcagaggctgactgtggacaccctgccccccctgagcacctatgacagcagtgacaccaatgccaagcgcttccgggtgctgtgggatgaggaggtggcccgggtgggccctgagaaggccagcctgagccacgtggtgtggaagttccagaggaccagggtgctgatggacatcgtggccaacatcctgtgcatcatcatggccgccatcggccccaccgtgctgatccaccagatcctgcagcagacagagaggaccagcggcaaggtgtgggtgggcatcggcctgtgcatcgccctgtttgccacagagttcaccaaggtgttcttctgggccctggcctgggccatcaactacagaacagccatccggctgaaggtggccctgagcaccctggtgtttgagaacctggtgtccttcaagaccctgacccacatctctgtgggggaggtgctgaacatcctgagcagtgacagctacagcctgtttgaggccgccctcttctgccccctgcctgccaccatccccatcctgatggtgttctgtgccgcctatgccttcttcatcctgggccccacagccctgattggcatctctgtgtatgtgatcttcatccctgtgcagatgttcatggccaagctgaacagcgccttccgccgcagcgccatcctggtgacagacaagagggtgcagaccatgaatgagttcctgacctgcatccgcctcatcaagatgtatgcctgggagaagagcttcaccaacaccatccaggacatcagaagaagagagaggaagctgctggagaaggccggctttgtgcagagcggcaacagcgccctggcccccatcgtgtccaccatcgccatcgtgctgaccctgagctgccacatcctgctgcggaggaagctgacagcccctgtggccttctctgtgattgccatgtttaatgtgatgaagttcagcatcgccatcctgcccttcagcatcaaggccatggccgaggccaacgtgtccctgcggaggatgaagaagatcctgattgacaagagcccccccagctacatcacccagcctgaggaccctgacacagtgctgctgctggccaatgccaccctgacctgggagcacgaggccagcaggaagagcacccccaagaagctgcagaaccagaagaggcacctgtgcaagaagcagaggtctgaggcctacagcgagaggagccccccagccaagggggccactggacctgaggagcagagcgacagcctgaagtctgtgctgcacagcatcagctttgtggtgaggaagggcaagatcctgggcatctgtggaaatgtgggcagcggcaagagcagcctgctggccgccctgctgggccagatgcagctgcagaagggcgtggtggccgtgaatggcaccctggcctacgtgtcccagcaggcctggatcttccacggcaatgtgcgggagaacatcctgtttggagagaagtatgaccaccagaggctgggcagcggggccagcaccagcctgggcggccggggccggggcctggcctggccagccctgagcacccccaccgtgagcagcacctgctggaccaccccctgccggccctggacccccacctggggcagcaccagcctgcggagcgccctgcggcggcgcagcggggagcggcagagctcctggtag

SEQ ID NO: 144608 - DNA, 2808 bp, synthetic construct
  misc_feature 1..2808: note = Description of Artificial Sequence: Synthetic coding sequence
  source 1..2808: mol_type = other DNA
atggtgggggagggcccctacctgatcagtgacctggaccagagaggaagaagaagaagctttgctgagagatatgaccccagcctgaagaccatgatccctgtgcggccctgtgcccggctggcccccaaccctgtggatgatgctggcctgctgagctttgccaccttctcctggctgacccctgtgatggtgaagggctaccggcagaggctgactgtggacaccctgccccccctgagcacctatgacagcagtgacaccaatgccaagcgcttccgggtgctgtgggatgaggaggtggcccgggtgggccctgagaaggccagcctgagccacgtggtgtggaagttccagaggaccagggtgctgatggacatcgtggccaacatcctgtgcatcatcatggccgccatcggccccaccgtgctgatccaccagatcctgcagcagacagagaggaccagcggcaaggtgtgggtgggcatcggcctgtgcatcgccctgtttgccacagagttcaccaaggtgttcttctgggccctggcctgggccatcaactacagaacagccatccggctgaaggtggccctgagcaccctggtgtttgagaacctggtgtccttcaagaccctgacccacatctctgtgggggaggtgctgaacatcctgagcagtgacagctacagcctgtttgaggccgccctcttctgccccctgcctgccaccatccccatcctgatggtgttctgtgccgcctatgccttcttcatcctgggccccacagccctgattggcatctctgtgtatgtgatcttcatccctgtgcagatgttcatggccaagctgaacagcgccttccgccgcagcgccatcctggtgacagacaagagggtgcagaccatgaatgagttcctgacctgcatccgcctcatcaagatgtatgcctgggagaagagcttcaccaacaccatccaggacatcagaagaagagagaggaagctgctggagaaggccggctttgtgcagagcggcaacagcgccctggcccccatcgtgtccaccatcgccatcgtgctgaccctgagctgccacatcctgctgcggaggaagctgacagcccctgtggccttctctgtgattgccatgtttaatgtgatgaagttcagcatcgccatcctgcccttcagcatcaaggccatggccgaggccaacgtgtccctgcggaggatgaagaagatcctgattgacaagagcccccccagctacatcacccagcctgaggaccctgacacagtgctgctgctggccaatgccaccctgacctgggagcacgaggccagcaggaagagcacccccaagaagctgcagaaccagaagaggcacctgtgcaagaagcagaggtctgaggcctacagcgagaggagccccccagccaagggggccactggacctgaggagcagagcgacagcctgaagtctgtgctgcacagcatcagctttgtggtgaggaagggcaagatcctgggcatctgtggaaatgtgggcagcggcaagagcagcctgctggccgccctgctgggccagatgcagctgcagaagggcgtggtggccgtgaatggcaccctggcctacgtgtcccagcaggcctggatcttccacggcaatgtgcgggagaacatcctgtttggagagaagtatgaccaccagcgctaccagcacacagtgcgggtgtgtggcctgcagaaggacctgagcaacctgccctacggggacctgacagagatcggggagcggggcctgaacctgagcggcggccagaggcagaggatcagcctggcccgggctgtgtacagcgaccggcagctgtacctgctggatgaccccctgtctgctgtggatgcccacgtgggcaagcacgtgtttgaggagtgcatcaagaagaccctgcggggcaagacagtggtgctggtgacccaccagctgcagttcctggagagctgtgatgaagtcatcctgctggaggatggagagatctgtgagaagggcacccacaaggagctgatggaggagcggggccgctatgccaagctgatccacaacctgcggggcctgcagttcaaggaccctgagcacctgtacaatgctgccatggtggaggccttcaaggagagccctgctgagcgggaggaggatgctgtgctggcccctggaaatgagaaggatgagggcaaggagagcgagactggaagtgaatttgtggacaccaaggtgcctgagcaccagctgatccagacagagagcccccaggagggcaccgtgacctggaagacctaccacacctacatcaaggccagcggcggctacctgctgagcctcttcaccgtcttcctgttcctgctgatgattggcagcgctgccttcagcaactggtggctgggcctgtggctggacaagggcagcaggatgacctgtggcccccagggcaacagaaccatgtgtgaggtgggcgctgtgctggccgacatcggccagcacgtgtaccagtgggtgtacacagcctccatggtgttcatgctggtgtttggagtgaccaagggctttgtgttcaccaagaccaccctgatggccagcagcagcctgcatgacacagtgtttgacaagcacttcccccagaggagccctggggcccaggagggcggggagtgccagcctgtgaccctggtgcacccccaccacctgctgcatgctggccctggccaccacagccggctgtggcaggagggggagctgcaccacctggtgtag

SEQ ID NO: 144609 - DNA, 2793 bp, synthetic construct
  misc_feature 1..2793: note = Description of Artificial Sequence: Synthetic coding sequence
  source 1..2793: mol_type = other DNA
atggtgggggagggcccctacctgatcagtgacctggaccagagaggaagaagaagaagctttgctgagagatatgaccccagcctgaagaccatgatccctgtgcggccctgtgcccggctggcccccaaccctgtggatgatgctggcctgctgagctttgccaccttctcctggctgacccctgtgatggtgaagggctaccggcagaggctgactgtggacaccctgccccccctgagcacctatgacagcagtgacaccaatgccaagcgcttccgggtgctgtgggatgaggaggtggcccgggtgggccctgagaaggccagcctgagccacgtggtgtggaagttccagaggaccagggtgctgatggacatcgtggccaacatcctgtgcatcatcatggccgccatcggccccaccgtgctgatccaccagatcctgcagcagacagagaggaccagcggcaaggtgtgggtgggcatcggcctgtgcatcgccctgtttgccacagagttcaccaaggtgttcttctgggccctggcctgggccatcaactacagaacagccatccggctgaaggtggccctgagcaccctggtgtttgagaacctggtgtccttcaagaccctgacccacatctctgtgggggagatgttcatggccaagctgaacagcgccttccgccgcagcgccatcctggtgacagacaagagggtgcagaccatgaatgagttcctgacctgcatccgcctcatcaagatgtatgcctgggagaagagcttcaccaacaccatccaggacatcagaagaagagagaggaagctgctggagaaggccggctttgtgcagagcggcaacagcgccctggcccccatcgtgtccaccatcgccatcgtgctgaccctgagctgccacatcctgctgcggaggaagctgacagcccctgtggccttctctgtgattgccatgtttaatgtgatgaagttcagcatcgccatcctgcccttcagcatcaaggccatggccgaggccaacgtgtccctgcggaggatgaagaagatcctgattgacaagagcccccccagctacatcacccagcctgaggaccctgacacagtgctgctgctggccaatgccaccctgacctgggagcacgaggccagcaggaagagcacccccaagaagctgcagaaccagaagaggcacctgtgcaagaagcagaggtctgaggcctacagcgagaggagccccccagccaagggggccactggacctgaggagcagagcgacagcctgaagtctgtgctgcacagcatcagctttgtggtgaggaagggcaagatcctgggcatctgtggaaatgtgggcagcggcaagagcagcctgctggccgccctgctgggccagatgcagctgcagaagggcgtggtggccgtgaatggcaccctggcctacgtgtcccagcaggcctggatcttccacggcaatgtgcgggagaacatcctgtttggagagaagtatgaccaccagcgctaccagcacacagtgcgggtgtgtggcctgcagaaggacctgagcaacctgccctacggggacctgacagagatcggggagcggggcctgaacctgagcggcggccagaggcagaggatcagcctggcccgggctgtgtacagcgaccggcagctgtacctgctggatgaccccctgtctgctgtggatgcccacgtgggcaagcacgtgtttgaggagtgcatcaagaagaccctgcggggcaagacagtggtgctggtgacccaccagctgcagttcctggagagctgtgatgaagtcatcctgctggaggatggagagatctgtgagaagggcacccacaaggagctgatggaggagcggggccgctatgccaagctgatccacaacctgcggggcctgcagttcaaggaccctgagcacctgtacaatgctgccatggtggaggccttcaaggagagccctgctgagcgggaggaggatgctggcatcatcgtgcctgagcaccagctgatccagacagagagcccccaggagggcaccgtgacctggaagacctaccacacctacatcaaggccagcggcggctacctgctgagcctcttcaccgtcttcctgttcctgctgatgattggcagcgctgccttcagcaactggtggctgggcctgtggctggacaagggcagcaggatgacctgtggcccccagggcaacagaaccatgtgtgaggtgggcgctgtgctggccgacatcggccagcacgtgtaccagtgggtgtacacagcctccatggtgttcatgctggtgtttggagtgaccaagggctttgtgttcaccaagaccaccctgatggccagcagcagcctgcatgacacagtgtttgacaagatcctgaagagccccatgtccttctttgacaccacccccaccggccgcctgatgaaccgcttcagcaaggacatggatgagctggatgtgcggctgcccttccacgccgagaacttcctgcagcagttcttcatggtggtgttcatcctggtgatcctggccgctgtgtttcctgctgtgctgctggtggtggccagcctggccgtgggcttcttcatcctgctgcgcatcttccaccggggcgtgcaggagctgaagaaggtggagaatgtgagccgcagcccctggttcacccacatcaccagctccatgcagggcctgggcatcatccacgcctacggcaagaaggagagctgcatcacctag

SEQ ID NO: 144610 - DNA, 321 bp, synthetic construct
  misc_feature 1..321: note = Description of Artificial Sequence: Synthetic coding sequence
  source 1..321: mol_type = other DNA
atggtgggggagggcccctacctgatcagtgacctggaccagagaggaagaagaagaagctttgctgagagatatgaccccagcctgaagaccatgatccctgtgcggccctgtgcccggctggcccccaaccctgtggatgatgctggcctgctgagctttgccaccttctcctggctgacccctgtgatggtgaagggctaccggcagaggctgactgtggacaccctgccccccctgagcacctatgacagcagtgacaccaatgccaagcgcttccgggtgctgtgggatgaggaggtggcccgggtgggcccctag

SEQ ID NO: 144611 - DNA, 858 bp, synthetic construct
  misc_feature 1..858: note = Description of Artificial Sequence: Synthetic coding sequence
  source 1..858: mol_type = other DNA
atggtgggggagggcccctacctgatcagtgacctggaccagagaggaagaagaagaagctttgctgagagatatgaccccagcctgaagaccatgatccctgtgcggccctgtgcccggctggcccccaaccctgtggatgatgctggcctgctgagctttgccaccttctcctggctgacccctgtgatggtgaagggctaccggcagaggctgactgtggacaccctgccccccctgagcacctatgacagcagtgacaccaatgccaagcgcttccgggtgctgtgggatgaggaggtggcccgggtgggccctgagaaggccagcctgagccacgtggtgtggaagttccagaggaccagggtgctgatggacatcgtggccaacatcctgtgcatcatcatggccgccatcggccccaccgtgctgatccaccagatcctgcagcagacagagaggaccagcggcaaggtgtgggtgggcatcggcctgtgcatcgccctgtttgccacagagttcaccaaggtgttcttctgggccctggcctgggccatcaactacagaacagccatccggctgaaggtggccctgagcaccctggtgtttgagaacctggtgtccttcaagaccctgacccacatctctgtgggggaggtgctgaacatcctgagcagtgacagctacagcctgtttgaggccgccctcttctgccccctgcctgccaccatccccatcctgatggtgttctgtgccgcctatgccttcttcatcctgggccccacagccctgattggcatctctgtgtgcctgtggcccagcagcatccagctgtctgagggccagcagttctggtag

SEQ ID NO: 144612 - DNA, 882 bp, synthetic construct
  misc_feature 1..882: note = Description of Artificial Sequence: Synthetic coding sequence
  source 1..882: mol_type = other DNA
atgctggagaagttctgcaacagcaccttctggaacagcagcttcctggacagccctgaggccgacctgcccctgtgctttgagcagacagtgctggtgtggatccccctgggctacctgtggctgctggccccctggcagctgctgcacgtgtacaagagcaggaccaagaggagcagcaccaccaagctgtacctggccaagcaggtgtttgtgggcttcctgctgatcctggccgccatcgagctggccctggtgctgacagaagattctggccaggccaccgtgcctgctgtgcgctacaccaaccccagcctgtacctgggcacctggctgctggtgctgctgatccagtacagccggcagtggtgtgtgcagaagaacagctggttcctgagcctcttctggatcctgagcatcctgtgtggcaccttccagttccagaccctcatccgcaccctgctgcagggcgacaacagcaacctggcctacagctgcctcttcttcatctcctatggcttccagatcctgatcctgatcttcagcgccttcagcgagaacaatgaaagcagcaacaaccccagcagcatcgccagcttcctgagcagcatcacctacagctggtatgacagcatcatcctgaagggctacaagaggcccctgaccctggaggatgtgtgggaggtggatgaggagatgaagaccaagaccctggtgtccaagtttgagacccacatgaagcgggagctgcagaaggcccggcgggccctgcagaggcggcaggagaagagcagccagcagaacagcggggcccggctgcccggcctgaacaagaaccagagccagagccaggatgccctggtgctggtgaccttcccctag

SEQ ID NO: 144613 - DNA, 4638 bp, synthetic construct
  misc_feature 1..4638: note = Description of Artificial Sequence: Synthetic coding sequence
  source 1..4638: mol_type = other DNA
atgctggagaagttctgcaacagcaccttctggaacagcagcttcctggacagccctgaggccgacctgcccctgtgctttgagcagacagtgctggtgtggatccccctgggctacctgtggctgctggccccctggcagctgctgcacgtgtacaagagcaggaccaagaggagcagcaccaccaagctgtacctggccaagcaggtgtttgtgggcttcctgctgatcctggccgccatcgagctggccctggtgctgacagaagattctggccaggccaccgtgcctgctgtgcgctacaccaaccccagcctgtacctgggcacctggctgctggtgctgctgatccagtacagccggcagtggtgtgtgcagaagaacagctggttcctgagcctcttctggatcctgagcatcctgtgtggcaccttccagttccagaccctcatccgcaccctgctgcagggcgacaacagcaacctggcctacagctgcctcttcttcatctcctatggcttccagatcctgatcctgatcttcagcgccttcagcgagaacaatgaaagcagcaacaaccccagcagcatcgccagcttcctgagcagcatcacctacagctggtatgacagcatcatcctgaagggctacaagaggcccctgaccctggaggatgtgtgggaggtggatgaggagatgaagaccaagaccctggtgtccaagtttgagacccacatgaagcgggagctgcagaaggcccggcgggccctgcagaggcggcaggagaagagcagccagcagaacagcggggcccggctgcccggcctgaacaagaaccagagccagagccaggatgccctggtgctggaggatgtggagaagaagaagaagaagagcggcaccaagaaggatgtgcccaagtcctggctgatgaaggccctcttcaagaccttctacatggtgctgctgaagagcttcctgctgaagctggtgaatgacatcttcacctttgtgagcccccagctgctgaagctgctgatcagctttgccagtgaccgggacacctacctgtggattggctacctgtgtgccatcctgctcttcaccgctgccctgatccagagcttctgcctgcagtgctacttccagctgtgcttcaagctgggcgtgaaggtgaggacagccatcatggcctctgtgtacaagaaggccctgaccctgagcaacctggccaggaaggagtacacagtgggggagaccgtgaacctgatgtctgtggatgcccagaagctgatggatgtgaccaacttcatgcacatgctgtggagctctgtgctgcagatcgtgctgagcatcttcttcctgtggagggagctgggccccagcgtgctggccggcgtgggcgtgatggtgctggtgatccccatcaatgccatcctgagcaccaagagcaagaccatccaggtgaagaacatgaagaacaaggacaagaggctgaagatcatgaatgagatcctgagcggcatcaagatcctgaagtactttgcctgggagcccagcttccgggaccaggtgcagaacctgaggaagaaggagctgaagaacctgctggccttcagccagctgcagtgtgtggtgatctttgtgttccagctgacccctgtgctggtgtctgtggtgaccttctctgtgtatgtgctggtggacagcaacaacatcctggatgcccagaaggccttcaccagcatcaccctcttcaacatcctgcgcttccccctgtccatgctgcccatgatgatcagctccatgctgcaggcctctgtgtccacagagcggctggagaagtacctgggcggagatgacctggacaccagcgccatcagacatgactgcaactttgacaaggccatgcagttcagcgaggccagcttcacctgggagcatgacagcgaggccaccgtgagagatgtgaacctggacatcatggccggccagctggtggccgtcatcggccctgtgggcagcggcaagagcagcctcatcagcgccatgctgggggagatggagaatgtgcacggccacatcaccatcaagggcaccacagcctacgtgccccagcagagctggatccagaatggcaccatcaaggacaacatcctgtttggaacagagttcaatgagaagcgctaccagcaggtgctggaggcctgtgccctgctgcctgacctggagatgctgcctggaggagacctggccgagatcggggagaagggcatcaacctgagcggcggccagaagcagaggatcagcctggcccgggccacctaccagaacctggacatctacctgctggatgaccccctgtctgctgtggatgcccacgtgggcaagcacatcttcaacaaggtgctgggccccaacggcctgctgaagggcaagacccggctgctggtgacccacagcatgcacttcctgccccaggtggatgaaattgtggtgctgggcaatggcaccatcgtggagaagggcagctacagcgccctgctggccaagaagggggagtttgccaagaacctgaagaccttcctgcggcacacaggccctgaggaggaggccaccgtgcatgatggcagcgaggaggaggatgatgattatggcctcatcagctctgtggaggagatcccagaagatgctgccagcatcaccatgaggcgggagaacagcttccggaggaccctgagccgcagcagccgcagcaatggccgccacctgaagagcctgaggaacagcctgaagaccagaaatgtgaacagcctgaaggaggatgaggagctggtgaagggccagaagctgatcaagaaggagttcattgaaacaggcaaggtgaagttcagcatctacctggagtacctgcaggccatcggcctcttcagcatcttcttcatcatcctggcctttgtgatgaacagcgtggccttcatcggcagcaacctgtggctgagcgcctggaccagtgacagcaagatcttcaacagcacagactacccagccagccagagggacatgagggtgggcgtgtatggagccctgggcctggcccagggcatctttgtgttcatcgcccacttctggagcgcctttggatttgtgcacgccagcaacatcctgcacaagcagctgctgaacaacatcctgcgggcccccatgaggttctttgacaccacccccaccggccgcatcgtgaacagatttgctggggacatcagcacagtggatgacaccctgccccagagcctgcgctcctggatcacctgcttcctgggcatcatcagcaccctggtgatgatctgcatggccacccctgtgttcaccatcatcgtcatccccctgggcatcatctacgtgtctgtgcagatgttttatgtgtccaccagccggcagctgcggcggctggacagcgtgaccaggagccccatctacagccacttcagcgagaccgtgtctggcctgcctgtgatccgggcctttgagcaccagcagcgcttcctgaagcacaatgaggtgagaattgacaccaaccagaagtgtgtgttctcctggatcaccagcaaccgctggctggccatccggctggagctggtgggcaacctgaccgtcttcttcagcgccctgatgatggtgatctacagagacaccctgagcggggacacagtgggctttgtgctgagcaatgccctgaacatcacccagaccctgaactggctggtgaggatgaccagcgagattgagaccaacatcgtggccgtggagcgcatcacagagtacaccaaggtggagaatgaggccccctgggtgacagacaagaggcctcctccagactggcccagcaagggcaagatccagttcaacaactaccaggtgcgctacagacctgagctggacctggtgctgcggggcatcacctgtgacatcggctccatggagaagattggagtggtgggccgcactggagctgggaagagcagcctgaccaactgcctcttccgcatcctggaggccgccggcggccagatcatcattgatggagtggacatcgccagcatcggcctgcatgacctgcgggagaagctgaccatcatcccccaggaccccatcctcttcagcggcagcctgaggatgaacctggaccccttcaacaactacagtgatgaggagatctggaaggccctggagctggcccacctgaagagctttgtggccagcctgcagctgggcctgagccatgaggtgacagaagctgggggcaacctgagcatcggccagaggcagctgctgtgcctgggccgggccctgctgaggaagagcaagatcctggtgctggatgaggccacagctgctgtggacctggagacagacaacctgatccagaccaccatccagaatgaatttgcccactgcaccgtcatcaccatcgcccaccggctgcacaccatcatggacagcgacaaggtgatggtgctggacaatggcaagatcattgaatgtggcagccctgaggagctgctgcagatccctggccccttctacttcatggccaaggaggccggcattgaaaatgtgaacagcaccaagttctag

SEQ ID NO: 144614 - DNA, 4584 bp, synthetic construct
  misc_feature 1..4584: note = Description of Artificial Sequence: Synthetic coding sequence
  source 1..4584: mol_type = other DNA
atggatgccctgtgtggcagcggggagctgggcagcaagttctgggacagcaacctgtctgtgcacacagagaacccagacctgaccccctgcttccagaacagcctgctggcctgggtgccctgcatctacctgtgggtggccctgccctgctacctgctgtacctgcggcaccactgccggggctacatcatcctgagccacctgagcaagctgaagatggtgctgggcgtgctgctgtggtgtgtgtcctgggccgacctcttctacagcttccacggcctggtgcacggccgggccccagcccctgtgttctttgtgacccccctggtggtgggcgtgaccatgctgctggccaccctgctgatccagtatgagcggctgcagggcgtgcagagcagcggcgtgctgatcatcttctggttcctgtgtgtggtgtgtgccatcgtgcccttccgcagcaagatcctgctggccaaggccgagggggagatcagtgaccccttccgcttcaccaccttctacatccactttgccctggtgctgagcgccctgatcctggcctgcttccgggagaagccacccttcttcagcgccaagaatgtggaccccaacccctacccagagaccagcgctggcttcctgagccgcctcttcttctggtggttcaccaagatggccatctacggctaccgccaccccctggaggagaaggacctgtggagcctgaaggaggaggacaggagccagatggtggtgcagcagctgctggaggcctggaggaagcaggagaagcagacagcccggcacaaggccagcgctgcccctgggaagaatgccagcggagaagatgaggtgctgctgggcgcccggccccggcccaggaagcccagcttcctgaaggccctgctggccaccttcggcagcagcttcctgatcagcgcctgcttcaagctgatccaggacctgctgtccttcatcaacccccagctgctgagcatcctgatccgcttcatcagcaaccccatggcccccagctggtggggcttcctggtggccggcctgatgttcctgtgcagcatgatgcagagcctcatcctgcagcactactaccactacatctttgtgactggagtgaagttcagaacaggcatcatgggcgtcatctacaggaaggccctggtgatcaccaacagcgtgaagagggccagcacagtgggggagatcgtgaacctgatgtctgtggatgcccagcgcttcatggacctggcccccttcctgaacctgctgtggagcgcccccctgcagatcatcctggccatctacttcctgtggcagaacctgggccccagcgtgctggccggcgtggccttcatggtgctgctgatccccctgaatggagctgtggccgtgaagatgagggccttccaggtgaagcagatgaagctgaaggacagccgcatcaagctgatgtctgagatcctgaatggcatcaaggtgctgaagctgtatgcctgggagcccagcttcctgaagcaggtggagggcatccggcagggcgagctgcagctgctgaggacagctgcctacctgcacaccaccaccaccttcacctggatgtgcagccccttcctggtgaccctcatcaccctgtgggtgtatgtgtatgtggaccccaacaacgtgctggatgctgagaaggcctttgtgtctgtgtccctcttcaacatcctgcggctgcccctgaacatgctgccccagctgatcagcaacctgacccaggcctctgtgtccctgaagaggatccagcagttcctgagccaggaggagctggacccccagagcgtggagaggaagaccatcagccctggctacgccatcaccatccacagcggcaccttcacctgggcccaggacctgccccccaccctgcacagcctggacatccaggtgcccaagggggccctggtggccgtggtgggccctgtgggctgcggcaagagcagcctggtgtctgccctgctgggggagatggagaagctggagggcaaggtgcacatgaagggctctgtggcctacgtgccccagcaggcctggatccagaactgcaccctgcaggagaatgtgctgtttgggaaggccctgaaccccaagcgctaccagcagaccctggaggcctgtgccctgctggccgacctggagatgctgcctggaggagaccagacagagatcggggagaagggcatcaacctgagcggcggccagaggcagagggtgtccctggcccgggctgtgtacagtgatgctgacatcttcctgctggatgaccccctgtctgctgtggacagccacgtggccaagcacatctttgaccacgtgattggccctgagggcgtgctggccggcaagaccagggtgctggtgacccacggcatctccttcctgccccagacagacttcatcatcgtgctggctgatggccaggtgtctgagatgggcccctacccagccctgctgcagagaaatggcagctttgccaacttcctgtgcaactatgccccagatgaggaccagggccacctggaggacagctggacagccctggagggcgctgaggacaaggaggccctgctgattgaggacaccctgagcaaccacacagacctgacagacaatgaccctgtgacctacgtggtgcagaagcagttcatgaggcagctgagcgccctgagcagtgatggagagggccagggccggcctgtgcccaggaggcacctgggccccagcgagaaggtgcaggtgacagaggccaaggcagatggagccctgacccaggaggagaaggccgccatcggcaccgtggagctgtctgtgttctgggactatgccaaggctgtgggcctgtgcaccaccctggccatctgcctgctgtatgtgggccagagcgctgctgccatcggggccaacgtgtggctgagcgcctggaccaatgatgccatggctgacagccggcagaacaacaccagcctgcggctgggcgtgtatgctgccctgggcatcctgcagggcttcctggtgatgctggccgccatggccatggctgctgggggcatccaggccgcccgggtgctgcaccaggccctgctgcacaacaagatccgcagcccccagagcttctttgacaccaccccatctggccgcatcctgaactgcttcagcaaggacatctacgtggtggatgaggtgctggcccctgtgatcctgatgctgctgaacagcttcttcaatgccatcagcaccctggtggtgatcatggccagcacccccctcttcaccgtggtgatcctgcccctggccgtgctgtacaccctggtgcagcgcttctacgccgccaccagccggcagctgaagaggctggagagcgtgagccgcagccccatctacagccacttcagcgagaccgtgactggagccagcgtcatccgggcctacaacagaagccgggactttgagatcatcagtgacaccaaggtggatgccaaccagaggagctgctacccctacatcatcagcaaccgctggctgagcattggagtggagtttgtgggcaactgtgtggtgctgtttgctgccctgtttgctgtgattggccgcagcagcctgaaccctggcctggtgggcctgtctgtgtcctacagcctgcaggtgacctttgccctgaactggatgatccgcatgatgtctgacctggagagcaacatcgtggccgtggagcgggtgaaggagtacagcaagacagaaacagaggccccctgggtggtggagggcagcaggcctcctgagggctggcccccaagaggagaggtggagttcaggaactacagcgtgcgctaccggcccggcctggacctggtgctgcgggacctgagcctgcacgtgcacggcggggagaaggtgggcatcgtgggccgcactggagctgggaagagctccatgaccctgtgcctcttccgcatcctggaggccgccaagggggagatcagaattgatggcctgaatgtggccgacatcggcctgcatgacctgcggagccagctgaccatcatcccccaggaccccatcctcttcagcggcaccctgaggatgaacctggaccccttcggcagctacagcgaggaggacatctggtgggccctggagctgagccacctgcacacctttgtgagcagccagcctgctggcctggacttccagtgcagcgagggcggggagaacctgtctgtgggccagaggcagctggtgtgcctggcccgggccctgctgaggaagagccgcatcctggtgctggatgaggccacagctgccatcgacctggagacagacaacctgatccaggccaccatccgcacccagtttgacacctgcaccgtgctgaccatcgcccaccggctgaacaccatcatggactacaccagggtgctggtgctggacaagggcgtggtggccgagtttgacagccctgccaacctgattgctgcccggggcatcttctacggcatggccagagatgctggcctggcctag

SEQ ID NO: 144615 - DNA, 1719 bp, synthetic construct
  misc_feature 1..1719: note = Description of Artificial Sequence: Synthetic coding sequence
  source 1..1719: mol_type = other DNA
atggatgccctgtgtggcagcggggagctgggcagcaagttctgggacagcaacctgtctgtgcacacagagaacccagacctgaccccctgcttccagaacagcctgctggcctgggtgccctgcatctacctgtgggtggccctgccctgctacctgctgtacctgcggcaccactgccggggctacatcatcctgagccacctgagcaagctgaagatggtgctgggcgtgctgctgtggtgtgtgtcctgggccgacctcttctacagcttccacggcctggtgcacggccgggccccagcccctgtgttctttgtgacccccctggtggtgggcgtgaccatgctgctggccaccctgctgatccagtatgagcggctgcagggcgtgcagagcagcggcgtgctgatcatcttctggttcctgtgtgtggtgtgtgccatcgtgcccttccgcagcaagatcctgctggccaaggccgagggggagatcagtgaccccttccgcttcaccaccttctacatccactttgccctggtgctgagcgccctgatcctggcctgcttccgggagaagccacccttcttcagcgccaagaatgtggaccccaacccctacccagagaccagcgctggcttcctgagccgcctcttcttctggtggttcaccaagatggccatctacggctaccgccaccccctggaggagaaggacctgtggagcctgaaggaggaggacaggagccagatggtggtgcagcagctgctggaggcctggaggaagcaggagaagcagacagcccggcacaaggccagcgctgcccctgggaagaatgccagcggagaagatgaggtgctgctgggcgcccggccccggcccaggaagcccagcttcctgaaggccctgctggccaccttcggcagcagcttcctgatcagcgcctgcttcaagctgatccaggacctgctgtccttcatcaacccccagctgctgagcatcctgatccgcttcatcagcaaccccatggcccccagctggtggggcttcctggtggccggcctgatgttcctgtgcagcatgatgcagagcctcatcctgcagcactactaccactacatctttgtgactggagtgaagttcagaacaggcatcatgggcgtcatctacaggaaggccctggtgatcaccaacagcgtgaagagggccagcacagtgggggagatcgtgaacctgatgtctgtggatgcccagcgcttcatggacctggcccccttcctgaacctgctgtggagcgcccccctgcagatcatcctggccatctacttcctgtggcagaacctgggccccagcgtgctggccggcgtggccttcatggtgctgctgatccccctgaatggagctgtggccgtgaagatgagggccttccaggtgaagcagatgaagctgaaggacagccgcatcaagctgatgtctgagatcctgaatggcatcaaggtgctgaagctgtatgcctgggagcccagcttcctgaagcaggtggagggcatccggcagggcgagctgcagctgctgaggacagctgcctacctgcacaccaccaccaccttcacctggatgtgcagccccttcctggtgcggctgggcaccggcctgggcccctgcctgcagggcagcggctgccccggcatggcccgggcccactggaccctgccctag

SEQ ID NO: 144616 - DNA, 3717 bp, synthetic construct
  misc_feature 1..3717: note = Description of Artificial Sequence: Synthetic coding sequence
  source 1..3717: mol_type = other DNA
atggatgccctgtgtggcagcggggagctgggcagcaagttctgggacagcaacctgtctgtgcacacagagaacccagacctgaccccctgcttccagaacagcctgctggcctgggtgccctgcatctacctgtgggtggccctgccctgctacctgctgtacctgcggcaccactgccggggctacatcatcctgagccacctgagcaagctgaagatggtgctgggcgtgctgctgtggtgtgtgtcctgggccgacctcttctacagcttccacggcctggtgcacggccgggccccagcccctgtgttctttgtgacccccctggtggtgggcgtgaccatgctgctggccaccctgctgatccagtatgagcggctgcagggcgtgcagagcagcggcgtgctgatcatcttctggttcctgtgtgtggtgtgtgccatcgtgcccttccgcagcaagatcctgctggccaaggccgagggggagatcagtgaccccttccgcttcaccaccttctacatccactttgccctggtgctgagcgccctgatcctggcctgcttccgggagaagccacccttcttcagcgccaagaatgtggaccccaacccctacccagagaccagcgctggcttcctgagccgcctcttcttctggtggttcaccaagatggccatctacggctaccgccaccccctggaggagaaggacctgtggagcctgaaggaggaggacaggagccagatggtggtgcagcagctgctggaggcctggaggaagcaggagaagcagacagcccggcacaaggccagcgctgcccctgggaagaatgccagcggagaagatgaggtgctgctgggcgcccggccccggcccaggaagcccagcttcctgaaggccctgctggccaccttcggcagcagcttcctgatcagcgcctgcttcaagctgatccaggacctgctgtccttcatcaacccccagctgctgagcatcctgatccgcttcatcagcaaccccatggcccccagctggtggggcttcctggtggccggcctgatgttcctgtgcagcatgatgcagagcctcatcctgcagcactactaccactacatctttgtgactggagtgaagttcagaacaggcatcatgggcgtcatctacaggaaggccctggtgatcaccaacagcgtgaagagggccagcacagtgggggagatcgtgaacctgatgtctgtggatgcccagcgcttcatggacctggcccccttcctgaacctgctgtggagcgcccccctgcagatcatcctggccatctacttcctgtggcagaacctgggccccagcgtgctggccggcgtggccttcatggtgctgctgatccccctgaatggagctgtggccgtgaagatgagggccttccaggtgaagcagatgaagctgaaggacagccgcatcaagctgatgtctgagatcctgaatggcatcaaggtgctgaagctgtatgcctgggagcccagcttcctgaagcaggtggagggcatccggcagggcgagctgcagctgctgaggacagctgcctacctgcacaccaccaccaccttcacctggatgtgcagccccttcctggtgaccctcatcaccctgtgggtgtatgtgtatgtggaccccaacaacgtgctggatgctgagaaggcctttgtgtctgtgtccctcttcaacatcctgcggctgcccctgaacatgctgccccagctgatcagcaacctgacccaggcctctgtgtccctgaagaggatccagcagttcctgagccaggaggagctggacccccagagcgtggagaggaagaccatcagccctggctacgccatcaccatccacagcggcaccttcacctgggcccaggacctgccccccaccctgcacagcctggacatccaggtgcccaagggggccctggtggccgtggtgggccctgtgggctgcggcaagagcagcctggtgtctgccctgctgggggagatggagaagctggagggcaaggtgcacatgaagggctctgtggcctacgtgccccagcaggcctggatccagaactgcaccctgcaggagaatgtgctgtttgggaaggccctgaaccccaagcgctaccagcagaccctggaggcctgtgccctgctggccgacctggagatgctgcctggaggagaccagacagagatcggggagaagggcatcaacctgagcggcggccagaggcagagggtgtccctggcccgggctgtgtacagtgatgctgacatcttcctgctggatgaccccctgtctgctgtggacagccacgtggccaagcacatctttgaccacgtgattggccctgagggcgtgctggccggcaagaccagggtgctggtgacccacggcatctccttcctgccccagacagacttcatcatcgtgctggctgatggccaggtgtctgagatgggcccctacccagccctgctgcagagaaatggcagctttgccaacttcctgtgcaactatgccccagatgaggaccagggccacctggaggacagctggacagccctggagggcgctgaggacaaggaggccctgctgattgaggacaccctgagcaaccacacagacctgacagacaatgaccctgtgacctacgtggtgcagaagcagttcatgaggcagctgagcgccctgagcagtgatggagagggccagggccggcctgtgcccaggaggcacctgggccccagcgagaaggtgcaggtgacagaggccaaggcagatggagccctgacccaggaggagaaggccgccatcggcaccgtggagctgtctgtgttctgggactatgccaaggctgtgggcctgtgcaccaccctggccatctgcctgctgtatgtgggccagagcgctgctgccatcggggccaacgtgtggctgagcgcctggaccaatgatgccatggctgacagccggcagaacaacaccagcctgcggctgggcgtgtatgctgccctgggcatcctgcagggcttcctggtgatgctggccgccatggccatggctgctgggggcatccaggccgcccgggtgctgcaccaggccctgctgcacaacaagatccgcagcccccagagcttctttgacaccaccccatctggccgcatcctgaactgcttcagcaaggacatctacgtggtggatgaggtgctggcccctgtgatcctgatgctgctgaacagcttcttcaatgccatcagcaccctggtggtgatcatggccagcacccccctcttcaccgtggtgatcctgcccctggccgtgctgtacaccctggtgcagcgcttctacgccgccaccagccggcagctgaagaggctggagagcgtgagccgcagccccatctacagccacttcagcgagaccgtgactggagccagcgtcatccgggcctacaacagaagccgggactttgagatcatcagtgacaccaaggtggatgccaaccagaggagctgctacccctacatcatcagcaacagaagtgaggccgccagcctggccccctgcagcagcaggaacagccagcaggccctgtggtgcagcggcagcctgagcctgctgagccccaagcagaagacaggccctgccctgcccctgccccacttcctgctgatctag

SEQ ID NO: 144617 - DNA, 3978 bp, synthetic construct
  misc_feature 1..3978: note = Description of Artificial Sequence: Synthetic coding sequence
  source 1..3978: mol_type = other DNA
atgctgcctgtgtaccaggaggtgaagcccaaccccctgcaggatgccaacctgtgcagcagggtcttcttctggtggctgaaccccctcttcaagattggccacaagaggcggctggaggaggatgacatgtacagcgtgctgcctgaggacaggagccagcacctgggggaggagctgcagggcttctgggacaaggaggtgctgcgggcagaaaatgatgcccagaagcccagcctgacccgggccatcatcaagtgctactggaagagctacctggtgctgggcatcttcaccctgattgaggagagcgccaaggtgatccagcccatcttcctgggcaagatcatcaactactttgaaaattatgaccccatggacagcgtggccctgaacacagcctatgcctatgccaccgtgctgaccttctgcaccctcatcctggccatcctgcaccacctgtacttctaccacgtgcagtgtgccggcatgaggctgcgggtggccatgtgccacatgatctacaggaaggccctgcggctgagcaacatggccatgggcaagaccaccaccggccagatcgtgaacctgctgagcaatgatgtgaacaagtttgaccaggtgacagtgttcctgcacttcctgtgggccggccccctgcaggccatcgctgtgacagccctgctgtggatggagatcggcatcagctgcctggccggcatggctgtgctgatcatcctgctgcccctgcagagctgcttcggcaagctgttcagcagcctgcggagcaagacagccaccttcacagatgcccgcatccgcaccatgaatgaagtcatcaccggcatccgcatcatcaagatgtatgcctgggagaagagcttcagcaacctgatcaccaacctgaggaagaaggagatcagcaagatcctgcggagcagctgcctgcggggcatgaacctggccagcttcttcagcgccagcaagatcatcgtgtttgtgaccttcaccacctacgtgctgctgggcagcgtcatcacagccagccgggtgtttgtggccgtgaccctgtatggagctgtgcggctgactgtgaccctcttcttccccagcgccatcgagcgggtgtctgaggccatcgtgtccatccgccgcatccagaccttcctgctgctggatgagatcagccagaggaaccggcagctgcccagtgatggcaagaagatggtgcacgtgcaggacttcaccgccttctgggacaaggccagcgagacccccaccctgcagggcctgtccttcaccgtgcggcctggagagctgctggccgtggtgggccctgtgggcgccggcaagagcagcctgctgtctgctgtgctgggggagctggcccccagccacggcctggtgtctgtgcacggcagaattgcctacgtgtcccagcagccctgggtgttcagcggcaccctgcggagcaacatcctgtttgggaagaagtatgagaaggagagatatgagaaggtgatcaaggcctgtgccctgaagaaggacctgcagctgctggaggatggagacctgaccgtcatcggggaccggggcaccaccctgagcggcggccagaaggcccgggtgaacctggcccgggctgtgtaccaggatgctgacatctacctgctggatgaccccctgtctgctgtggatgctgaggtgagccgccacctgtttgagctgtgcatctgccagatcctgcacgagaagatcaccatcctggtgacccaccagctgcagtacctgaaggccgccagccagatcctgatcctgaaggatggcaagatggtgcagaagggcacctacacagagttcctgaagtctggaattgactttggcagcctgctgaagaaggacaatgaggagagcgagcagccccctgtgcccggcacccccaccctgaggaacagaaccttcagcgagagctctgtgtggagccagcagagcagccggcccagcctgaaggatggagccctggagagccaggacacagaaaatgtgcctgtgaccctgtctgaagaaaatagaagtgagggcaaggtgggcttccaggcctacaagaactacttccgggccggggcccactggatcgtgttcatcttcctgatcctgctgaacacagctgcccaggtggcctacgtgctgcaggactggtggctgagctactgggccaacaagcagagcatgctgaatgtgacagtgaatggaggcggcaatgtgacagagaagctggacctgaactggtacctgggcatctacagcggcctgactgtggccaccgtgctgtttggcatcgcccggagcctgctggtgttctacgtgctggtgaacagcagccagaccctgcacaacaagatgtttgagagcatcctgaaggcccctgtgctcttctttgacaggaaccccatcggccgcatcctgaaccgcttcagcaaggacatcggccacctggatgacctgctgcccctgaccttcctggacttcatccagaccctgctgcaggtggtgggcgtggtgtctgtggccgtggccgtcatcccctggatcgccatccccctggtgcccctgggcatcatcttcatcttcctgcggcgctacttcctggagaccagcagagatgtgaagaggctggagagcaccaccaggagccctgtgttcagccacctgagcagcagcctgcagggcctgtggaccatccgggcctacaaggccgaggagcgctgccaggagctgtttgatgcccaccaggacctgcacagcgaggcctggttcctgttcctgaccaccagccgctggtttgctgtgcggctggatgccatctgtgccatgtttgtgatcatcgtggccttcggcagcctcatcctggccaagaccctggatgctggccaggtgggcctggccctgtcctatgccctgaccctgatgggcatgttccagtggtgtgtgcggcagagcgctgaggtggagaacatgatgatctctgtggagagggtcatcgagtacacagacctggagaaggaggccccctgggagtaccagaagaggcctcctccagcctggccccatgaaggagtcatcatctttgacaacgtgaacttcatgtacagccctgggggccccctggtgctgaagcacctgacagccctgatcaagagccaggagaaggtgggcatcgtgggccgcactggagctgggaagagcagcctcatcagcgccctcttccggctgtctgagcctgagggcaagatctggattgacaagatcctgaccacagagatcggcctgcatgacctgaggaagaagatgagcatcatcccccaggagcctgtgctcttcaccggcaccatgaggaagaacctggaccccttcaatgagcacacagatgaggagctgtggaatgccctgcaggaggtgcagctgaaggagaccatcgaggacctgcccgggaagatggacacagagctggccgagagcggcagcaacttctctgtgggccagaggcagctggtgtgcctggcccgggccatcctgaggaagaaccagatcctgatcattgatgaggccacagccaacgtggaccccaggacagatgagctgatccagaagaagatccgggagaagtttgcccactgcaccgtgctgaccatcgcccaccggctgaacaccatcatcgacagcgacaagatcatggtgctggacagcggccgcctgaaggagtatgatgagccctacgtgctgctgcagaacaaggagagcctcttctacaagatggtgcagcagctgggcaaggccgaggccgccgccctgacagaaacagccaagcaggtgtacttcaagaggaactacccccacatcggccacacagaccacatggtgaccaacaccagcaatggccagcccagcaccctgaccatctttgaaacagccctgtag

SEQ ID NO: 144618 - DNA, 3837 bp, synthetic construct
  misc_feature 1..3837: note = Description of Artificial Sequence: Synthetic coding sequence
  source 1..3837: mol_type = other DNA
atgctgcctgtgtaccaggaggtgaagcccaaccccctgcaggatgccaacctgtgcagcagggtcttcttctggtggctgaaccccctcttcaagattggccacaagaggcggctggaggaggatgacatgtacagcgtgctgcctgaggacaggagccagcacctgggggaggagctgcagggcttctgggacaaggaggtgctgcgggcagaaaatgatgcccagaagcccagcctgacccgggccatcatcaagtgctactggaagagctacctggtgctgggcatcttcaccctgattgaggagagcgccaaggtgatccagcccatcttcctgggcaagatcatcaactactttgaaaattatgaccccatggacagcgtggccctgaacacagcctatgcctatgccaccgtgctgaccttctgcaccctcatcctggccatcctgcaccacctgtacttctaccacgtgcagtgtgccggcatgaggctgcgggtggccatgtgccacatgatctacaggaaggccctgcggctgagcaacatggccatgggcaagaccaccaccggccagatcgtgaacctgctgagcaatgatgtgaacaagtttgaccaggtgacagtgttcctgcacttcctgtgggccggccccctgcaggccatcgctgtgacagccctgctgtggatggagatcggcatcagctgcctggccggcatggctgtgctgatcatcctgctgcccctgcagagctgcttcggcaagctgttcagcagcctgcggagcaagacagccaccttcacagatgcccgcatccgcaccatgaatgaagtcatcaccggcatccgcatcatcaagatgtatgcctgggagaagagcttcagcaacctgatcaccaacctgaggaagaaggagatcagcaagatcctgcggagcagctgcctgcggggcatgaacctggccagcttcttcagcgccagcaagatcatcgtgtttgtgaccttcaccacctacgtgctgctgggcagcgtcatcacagccagccgggtgtttgtggccgtgaccctgtatggagctgtgcggctgactgtgaccctcttcttccccagcgccatcgagcgggtgtctgaggccatcgtgtccatccgccgcatccagaccttcctgctgctggatgagatcagccagaggaaccggcagctgcccagtgatggcaagaagatggtgcacgtgcaggacttcaccgccttctgggacaaggccagcgagacccccaccctgcagggcctgtccttcaccgtgcggcctggagagctgctggccgtggtgggccctgtgggcgccggcaagagcagcctgctgtctgctgtgctgggggagctggcccccagccacggcctggtgtctgtgcacggcagaattgcctacgtgtcccagcagccctgggtgttcagcggcaccctgcggagcaacatcctgtttgggaagaagtatgagaaggagagatatgagaaggtgatcaaggcctgtgccctgaagaaggacctgcagctgctggaggatggagacctgaccgtcatcggggaccggggcaccaccctgagcggcggccagaaggcccgggtgaacctggcccgggctgtgtaccaggatgctgacatctacctgctggatgaccccctgtctgctgtggatgctgaggtgagccgccacctgtttgagctgtgcatctgccagatcctgcacgagaagatcaccatcctggtgacccaccagctgcagtacctgaaggccgccagccagatcctgatcctgaaggatggcaagatggtgcagaagggcacctacacagagttcctgaagtctggaattgactttggcagcctgctgaagaaggacaatgaggagagcgagcagccccctgtgcccggcacccccaccctgaggaacagaaccttcagcgagagctctgtgtggagccagcagagcagccggcccagcctgaaggatggagccctggagagccaggatgtggcctacgtgctgcaggactggtggctgagctactgggccaacaagcagagcatgctgaatgtgacagtgaatggaggcggcaatgtgacagagaagctggacctgaactggtacctgggcatctacagcggcctgactgtggccaccgtgctgtttggaattgcccggagcctgctggtgttctacgtgctggtgaacagcagccagaccctgcacaacaagatgtttgagagcatcctgaaggcccctgtgctcttctttgacaggaaccccatcggccgcatcctgaaccgcttcagcaaggacatcggccacctggatgacctgctgcccctgaccttcctggacttcatccagaccctgctgcaggtggtgggcgtggtgtctgtggccgtggccgtcatcccctggatcgccatccccctggtgcccctgggcatcatcttcatcttcctgcggcgctacttcctggagaccagcagagatgtgaagaggctggagagcaccaccaggagccctgtgttcagccacctgagcagcagcctgcagggcctgtggaccatccgggcctacaaggccgaggagcgctgccaggagctgtttgatgcccaccaggacctgcacagcgaggcctggttcctgttcctgaccaccagccgctggtttgctgtgcggctggatgccatctgtgccatgtttgtgatcatcgtggccttcggcagcctcatcctggccaagaccctggatgctggccaggtgggcctggccctgtcctatgccctgaccctgatgggcatgttccagtggtgtgtgcggcagagcgctgaggtggagaacatgatgatctctgtggagcgggtgattgagtacacagacctggagaaggaggccccctgggagtaccagaagaggcctcctccagcctggccccatgagggcgtcatcatctttgacaacgtgaacttcatgtacagccctgggggccccctggtgctgaagcacctgacagccctgatcaagagccaggagaaggtgggcatcgtgggccgcactggagctgggaagagcagcctcatcagcgccctcttccggctgtctgagcctgagggcaagatctggattgacaagatcctgaccacagaaattggcctgcatgacctgaggaagaagatgagcatcatcccccaggagcctgtgctcttcaccggcaccatgaggaagaacctggaccccttcaatgagcacacagatgaggagctgtggaatgccctgcaggaggtgcagctgaaggagaccatcgaggacctgcccgggaagatggacacagagctggccgagagcggcagcaacttctctgtgggccagaggcagctggtgtgcctggcccgggccatcctgaggaagaaccagatcctgatcattgatgaggccacagccaacgtggaccccaggacagatgagctgatccagaagaagatccgggagaagtttgcccactgcaccgtgctgaccatcgcccaccggctgaacaccatcatcgacagcgacaagatcatggtgctggacagcggccgcctgaaggagtatgatgagccctacgtgctgctgcagaacaaggagagcctcttctacaagatggtgcagcagctgggcaaggccgaggccgccgccctgacagaaacagccaagcaggtgtacttcaagaggaactacccccacatcggccacacagaccacatggtgaccaacaccagcaatggccagcccagcaccctgaccatctttgaaacagccctgtag

SEQ ID NO: 144619 - DNA, 2580 bp, synthetic construct
  misc_feature 1..2580: note = Description of Artificial Sequence: Synthetic coding sequence
  source 1..2580: mol_type = other DNA
atgctgcctgtgtaccaggaggtgaagcccaaccccctgcaggatgccaacctgtgcagcagggtcttcttctggtggctgaaccccctcttcaagattggccacaagaggcggctggaggaggatgacatgtacagcgtgctgcctgaggacaggagccagcacctgggggaggagctgcagggcttctgggacaaggaggtgctgcgggcagaaaatgatgcccagaagcccagcctgacccgggccatcatcaagtgctactggaagagctacctggtgctgggcatcttcaccctgattgaggagagcgccaaggtgatccagcccatcttcctgggcaagatcatcaactactttgaaaattatgaccccatggacagcgtggccctgaacacagcctatgcctatgccaccgtgctgaccttctgcaccctcatcctggccatcctgcaccacctgtacttctaccacgtgcagtgtgccggcatgaggctgcgggtggccatgtgccacatgatctacaggaaggccctgcggctgagcaacatggccatgggcaagaccaccaccggccagatcgtgaacctgctgagcaatgatgtgaacaagtttgaccaggtgacagtgttcctgcacttcctgtgggccggccccctgcaggccatcgctgtgacagccctgctgtggatggagatcggcatcagctgcctggccggcatggctgtgctgatcatcctgctgcccctgcagagctgcttcggcaagctgttcagcagcctgcggagcaagacagccaccttcacagatgcccgcatccgcaccatgaatgaagtcatcaccggcatccgcatcatcaagatgtatgcctgggagaagagcttcagcaacctgatcaccaacctgaggaagaaggagatcagcaagatcctgcggagcagctgcctgcggggcatgaacctggccagcttcttcagcgccagcaagatcatcgtgtttgtgaccttcaccacctacgtgctgctgggcagcgtcatcacagccagccgggtgtttgtggccgtgaccctgtatggagctgtgcggctgactgtgaccctcttcttccccagcgccatcgagcgggtgtctgaggccatcgtgtccatccgccgcatccagaccttcctgctgctggatgagatcagccagaggaaccggcagctgcccagtgatggcaagaagatggtgcacgtgcaggacttcaccgccttctgggacaaggccagcgagacccccaccctgcagggcctgtccttcaccgtgcggcctggagagctgctggccgtggtgggccctgtgggcgccggcaagagcagcctgctgtctgctgtgctgggggagctggcccccagccacggcctggtgtctgtgcacggcagaattgcctacgtgtcccagcagccctgggtgttcagcggcaccctgcggagcaacatcctgtttgggaagaagtatgagaaggagagatatgagaaggtgatcaaggcctgtgccctgaagaaggacctgcagctgctggaggatggagacctgaccgtcatcggggaccggggcaccaccctgagcggcggccagaaggcccgggtgaacctggcccgggctgtgtaccaggatgctgacatctacctgctggatgaccccctgtctgctgtggatgctgaggtgagccgccacctgtttgagctgtgcatctgccagatcctgcacgagaagatcaccatcctggtgacccaccagctgcagtacctgaaggccgccagccagatcctgatcctgaaggatggcaagatggtgcagaagggcacctacacagagttcctgaagtctggaattgactttggcagcctgctgaagaaggacaatgaggagagcgagcagccccctgtgcccggcacccccaccctgaggaacagaaccttcagcgagagctctgtgtggagccagcagagcagccggcccagcctgaaggatggagccctggagagccaggacacagaaaatgtgcctgtgaccctgtctgaagaaaatagaagtgagggcaaggtgggcttccaggcctacaagaactacttccgggccggggcccactggatcgtgttcatcttcctgatcctgctgaacacagctgcccaggtggcctacgtgctgcaggactggtggctgagctactgggccaacaagcagagcatgctgaatgtgacagtgaatggaggcggcaatgtgacagagaagctggacctgaactggtacctgggcatctacagcggcctgactgtggccaccgtgctgtttggcatcgcccggagcctgctggtgttctacgtgctggtgaacagcagccagaccctgcacaacaagatgtttgagagcatcctgaaggcccctgtgctcttctttgacaggaaccccatcggccgcatcctgaaccgcttcagcaaggacatcggccacctggatgacctgctgcccctgaccttcctggacttcatccagcgctgggacctggccgtgctgtcctggctggtgagcaacagctag

SEQ ID NO: 144620 - DNA, 2355 bp, synthetic construct
  misc_feature 1..2355: note = Description of Artificial Sequence: Synthetic coding sequence
  source 1..2355: mol_type = other DNA
atgctgcctgtgtaccaggaggtgaagcccaaccccctgcaggatgccaacctgtgcagcagggtcttcttctggtggctgaaccccctcttcaagattggccacaagaggcggctggaggaggatgacatgtacagcgtgctgcctgaggacaggagccagcacctgggggaggagctgcagggcttctgggacaaggaggtgctgcgggcagaaaatgatgcccagaagcccagcctgacccgggccatcatcaagtgctactggaagagctacctggtgctgggcatcttcaccctgattgaggccctgcggctgagcaacatggccatgggcaagaccaccaccggccagatcgtgaacctgctgagcaatgatgtgaacaagtttgaccaggtgaccgtcttcctgcacttcctgtgggccggccccctgcaggccatcgctgtgacagccctgctgtggatggagatcggcatcagctgcctggccggcatggctgtgctgatcatcctgctgcccctgcagagctgcttcggcaagctgttcagcagcctgcggagcaagacagccaccttcacagatgcccgcatccgcaccatgaatgaggtgatcaccggcatccgcatcatcaagatgtatgcctgggagaagagcttcagcaacctgatcaccaacctgaggaagaaggagatcagcaagatcctgcggagcagctgcctgcggggcatgaacctggccagcttcttcagcgccagcaagatcatcgtgtttgtgaccttcaccacctacgtgctgctgggcagcgtcatcacagccagccgggtgtttgtggccgtgaccctgtatggagctgtgcggctgactgtgaccctcttcttccccagcgccatcgagcgggtgtctgaggccatcgtgtccatccgccgcatccagaccttcctgctgctggatgagatcagccagaggaaccggcagctgcccagtgatggcaagaagatggtgcacgtgcaggacttcaccgccttctgggacaaggccagcgagacccccaccctgcagggcctgtccttcaccgtgcggcctggagagctgctggccgtggtgggccctgtgggcgctgggaagagcagcctgctgtctgctgtgctgggggagctggcccccagccacggcctggtgtctgtgcacggccgcatcgcctacgtgtcccagcagccctgggtgttttctggcaccctgcggagcaacatcctgtttgggaagaagtatgagaaggagagatatgagaaggtgatcaaggcctgtgccctgaagaaggacctgcagctgctggaggatggagacctgactgtgattggagaccggggcaccaccctgagcggcggccagaaggcccgggtgaacctggcccgggctgtgtaccaggatgctgacatctacctgctggatgaccccctgtctgctgtggatgctgaggtgagccgccacctgtttgagctgtgcatctgccagatcctgcacgagaagatcaccatcctggtgacccaccagctgcagtacctgaaggccgccagccagatcctgatcctgaaggatggcaagatggtgcagaagggcacctacacagagttcctgaagagcggcatcgactttggcagcctgctgaagaaggacaatgaggagagcgagcagccccctgtgcccggcacccccaccctgaggaacagaaccttcagcgagagctctgtgtggagccagcagagcagccggcccagcctgaaggatggagccctggagagccaggacacagaaaatgtgcctgtgaccctgtctgaggagaacagaagtgagggcaaggtgggcttccaggcctacaagaactacttccgggccggggcccactggatcgtgttcatcttcctgatcctgctgaacacagctgcccaggtggcctacgtgctgcaggactggtggctgagctactgggccaacaagcagagcatgctgaatgtgacagtgaatggaggcggcaatgtgacagagaagctggacctgaactggtacctgggcatctacagcggcctgactgtggccaccgtgctgtttggaattgcccggagcctgctggtgttctacgtgctggtgaacagcagccagaccctgcacaacaagatgtttgagagcatcctgaaggcccctgtgctcttctttgacaggaaccccatcggccgcatcctgaaccgcttcagcaaggacatcggccacctggatgacctgctgcccctgaccttcctggacttcatccagcgctgggacctggccgtgctgtcctggctggtgagcaacagctag

SEQ ID NO: 144621 - DNA, 75 bp, synthetic construct
  misc_feature 1..75: note = Description of Artificial Sequence: Synthetic coding sequence
  source 1..75: mol_type = other DNA
atgctgcctgtgtaccaggaggtgaagcccaaccccctgcaggatgccaacctgtgcagcagggtcttcttctag

SEQ ID NO: 144622 - DNA, 4185 bp, synthetic construct
  misc_feature 1..4185: note = Description of Artificial Sequence: Synthetic coding sequence
  source 1..4185: mol_type = other DNA
atgaaggacatcgacatcggcaaggagtacatcatccccagccctggctacagatctgtgcgggagaggaccagcaccagcggcacccaccgggaccgggaggacagcaagttccggaggacccggcccctggagtgccaggatgccctggagacagctgcccgggcagagggcctgagcctggatgcctccatgcacagccagctgcgcatcctggatgaggagcaccccaagggcaagtaccaccacggcctgagcgccctgaagcccatccgcaccaccagcaagcaccagcaccctgtggacaatgccggcctcttcagctgcatgaccttctcctggctgagcagcctggcccgggtggcccacaagaagggggagctgtccatggaggatgtgtggagcctgagcaagcatgagagcagtgatgtgaactgccggcggctggagcggctgtggcaggaggagctgaatgaggtgggcccagatgctgccagcctgcggcgggtggtgtggatcttctgcaggaccaggctcatcctgagcatcgtgtgcctgatgatcacccagctggccggcttcagcggccctgccttcatggtgaagcacctgctggagtacacccaggccacagagagcaacctgcagtacagcctgctgctggtgctgggcctgctgctgacagagatcgtgcgctcctggagcctggccctgacctgggccctgaactacagaactggagtgcggctgcggggggccatcctgaccatggccttcaagaagatcctgaagctgaagaacatcaaggagaagagcctgggggagctgatcaacatctgcagcaatgatggccagaggatgtttgaggccgctgctgtgggcagcctgctggccggcggccctgtggtggccatcctgggcatgatctacaacgtcatcatcctgggccccaccggcttcctgggcagcgctgtgttcatcctcttctacccagccatgatgtttgccagccggctgacagcctacttccggaggaaatgtgtggccgccacagatgagcgggtgcagaagatgaatgaggtgctgacctacatcaagttcatcaagatgtatgcctgggtgaaggccttcagccagagcgtgcagaagatccgggaggaggagcggcgcatcctggagaaggccggctacttccagagcatcaccgtgggcgtggcccccatcgtggtggtgattgcctctgtggtgaccttctctgtgcacatgaccctgggctttgacctgacagctgcccaggccttcaccgtggtgaccgtcttcaacagcatgacctttgccctgaaggtgacccccttctctgtgaagagcctgtctgaggcctctgtggccgtggaccgcttcaagagcctcttcctgatggaggaggtgcacatgatcaagaacaagccagccagcccccacatcaagattgagatgaagaatgccaccctggcctgggacagcagccacagcagcatccagaacagccccaagctgacccccaagatgaagaaggacaagagggccagccggggcaagaaggagaaggtgcggcagctgcagaggacagagcaccaggccgtgctggccgagcagaagggccacctgctgctggacagtgatgagcggcccagccctgaggaggaggagggcaagcacatccacctgggccacctgcggctgcagaggaccctgcacagcattgacctggagatccaggagggcaagctggtgggcatctgtggctctgtgggcagcggcaagaccagcctcatcagcgccatcctgggccagatgaccctgctggagggcagcatcgccatcagcggcacctttgcctacgtggcccagcaggcctggatcctgaatgccaccctgcgggacaacatcctgtttgggaaggagtatgatgaggagcgctacaacagcgtgctgaacagctgctgcctgcggccagacctggccatcctgcccagcagtgacctgacagagatcggggagcggggggccaacctgagcggcggccagaggcagaggatcagcctggcccgggccctgtacagcgacaggagcatctacatcctggatgaccccctgagcgccctggatgcccacgtgggcaaccacatcttcaacagcgccatcaggaagcacctgaagagcaagacagtgctgtttgtgacccaccagctgcagtacctggtggactgtgatgaagtcatcttcatgaaggagggctgcatcacagagcggggcacccatgaggagctgatgaacctgaatggagactatgccaccatcttcaacaacctgctgctgggggagaccccacctgtggagatcaacagcaagaaggagaccagcggcagccagaagaagagccaggacaagggccccaagacaggctctgtgaagaaggagaaggctgtgaagccagaggagggccagctggtgcagctggaggagaagggccagggctctgtgccctggagcgtgtatggagtgtacatccaggccgccggcggccccctggccttcctggtgatcatggccctcttcatgctgaatgtgggcagcacagccttcagcacctggtggctgagctactggatcaagcagggcagcggcaacaccaccgtgaccagaggaaatgagacctctgtgtctgacagcatgaaggacaacccccacatgcagtactatgccagcatctatgccctgtccatggctgtgatgctgatcctgaaggccatccggggcgtggtgtttgtgaagggcaccctgcgggccagcagccggctgcatgatgagctgttccgccgcatcctgcggagccccatgaagttctttgacaccacccccaccggccgcatcctgaaccgcttcagcaaggacatggatgaggtggatgtgcggctgcccttccaggccgagatgttcatccagaatgtcatcctggtgttcttctgtgtgggcatgattgctggggtcttcccctggttcctggtggccgtgggccccctggtgatcctcttctctgtgctgcacatcgtgagccgctaccaggagctgctggatgacaaccaggcccccttcttcctgttcacctgtgccatgcgctggctggccgtgcggctggacctgatcagcatcgccctgatcaccaccaccggcctgatgattgtgctgatgcacggccagatccccccagcctatgccggcctggccatctcctatgctgtgcagctgaccggcctcttccagttcaccgtgcggctggccagcgagacagaggcccgcttcacctctgtggagcgcatcaaccactacatcaagaccctgagcctggaggccccagcccgcatcaagaacaaggcccccagcccagactggccccaggagggggaggtgacctttgaaaatgctgagatgagataccgggagaacctgcccctggtgctgaagaaggtgtccttcaccatcaagcccaaggagaagattggcatcgtgggccgcacaggcagcggcaagagcagcctgggcatggccctcttccggctggtggagctgagcggcggctgcatcaagattgatggagtgcgcatcagtgacatcggcctggccgacctgcggagcaagctgagcatcatcccccaggagcctgtgctcttcagcggcaccgtgcgcagcaacctggaccccttcaaccagtacacagaggaccagatctgggatgccctggagaggacccacatgaaggaatgtattgcccagctgcccctgaagctggagagcgaggtgatggagaatggagacaacttctctgtgggggagcggcagctgctgtgcatcgcccgggccctgctgcggcactgcaagatcctgatcctggatgaggccacagctgccatggacacagaaacagacctgctgatccaggagaccatccgggaggcctttgctgactgcaccatgctgaccatcgcccaccggctgcacacagtgctgggcagtgaccgcatcatggtgctggcccagggccaggtggtggagtttgacaccccatctgtgctgctgagcaatgacagcagccgcttctacgccatgtttgctgctgctgagaacaaggtggccgtgaagggctag

SEQ ID NO: 144623 - DNA, 4314 bp, synthetic construct
  misc_feature 1..4314: note = Description of Artificial Sequence: Synthetic coding sequence
  source 1..4314: mol_type = other DNA
atgaaggacatcgacatcggcaaggagtacatcatccccagccctggctacagatctgtgcgggagaggaccagcaccagcggcacccaccgggaccgggaggacagcaagttccggaggacccggcccctggagtgccaggatgccctggagacagctgcccgggcagagggcctgagcctggatgcctccatgcacagccagctgcgcatcctggatgaggagcaccccaagggcaagtaccaccacggcctgagcgccctgaagcccatccgcaccaccagcaagcaccagcaccctgtggacaatgccggcctcttcagctgcatgaccttctcctggctgagcagcctggcccgggtggcccacaagaagggggagctgtccatggaggatgtgtggagcctgagcaagcatgagagcagtgatgtgaactgccggcggctggagcggctgtggcaggaggagctgaatgaggtgggcccagatgctgccagcctgcggcgggtggtgtggatcttctgcaggaccaggctcatcctgagcatcgtgtgcctgatgatcacccagctggccggcttcagcggccctgccttcatggtgaagcacctgctggagtacacccaggccacagagagcaacctgcagtacagcctgctgctggtgctgggcctgctgctgacagagatcgtgcgctcctggagcctggccctgacctgggccctgaactacagaactggagtgcggctgcggggggccatcctgaccatggccttcaagaagatcctgaagctgaagaacatcaaggagaagagcctgggggagctgatcaacatctgcagcaatgatggccagaggatgtttgaggccgctgctgtgggcagcctgctggccggcggccctgtggtggccatcctgggcatgatctacaacgtcatcatcctgggccccaccggcttcctgggcagcgctgtgttcatcctcttctacccagccatgatgtttgccagccggctgacagcctacttccggaggaaatgtgtggccgccacagatgagcgggtgcagaagatgaatgaggtgctgacctacatcaagttcatcaagatgtatgcctgggtgaaggccttcagccagagcgtgcagaagatccgggaggaggagcggcgcatcctggagaaggccggctacttccagagcatcaccgtgggcgtggcccccatcgtggtggtgattgcctctgtggtgaccttctctgtgcacatgaccctgggctttgacctgacagctgcccaggccttcaccgtggtgaccgtcttcaacagcatgacctttgccctgaaggtgacccccttctctgtgaagagcctgtctgaggcctctgtggccgtggaccgcttcaagagcctcttcctgatggaggaggtgcacatgatcaagaacaagccagccagcccccacatcaagattgagatgaagaatgccaccctggcctgggacagcagccacagcagcatccagaacagccccaagctgacccccaagatgaagaaggacaagagggccagccggggcaagaaggagaaggtgcggcagctgcagaggacagagcaccaggccgtgctggccgagcagaagggccacctgctgctggacagtgatgagcggcccagccctgaggaggaggagggcaagcacatccacctgggccacctgcggctgcagaggaccctgcacagcattgacctggagatccaggagggcaagctggtgggcatctgtggctctgtgggcagcggcaagaccagcctcatcagcgccatcctgggccagatgaccctgctggagggcagcatcgccatcagcggcacctttgcctacgtggcccagcaggcctggatcctgaatgccaccctgcgggacaacatcctgtttgggaaggagtatgatgaggagcgctacaacagcgtgctgaacagctgctgcctgcggccagacctggccatcctgcccagcagtgacctgacagagatcggggagcggggggccaacctgagcggcggccagaggcagaggatcagcctggcccgggccctgtacagcgacaggagcatctacatcctggatgaccccctgagcgccctggatgcccacgtgggcaaccacatcttcaacagcgccatcaggaagcacctgaagagcaagacagtgctgtttgtgacccaccagctgcagtacctggtggactgtgatgaagtcatcttcatgaaggagggctgcatcacagagcggggcacccatgaggagctgatgaacctgaatggagactatgccaccatcttcaacaacctgctgctgggggagaccccacctgtggagatcaacagcaagaaggagaccagcggcagccagaagaagagccaggacaagggccccaagacaggctctgtgaagaaggagaaggctgtgaagccagaggagggccagctggtgcagctggaggagaagggccagggctctgtgccctggagcgtgtatggagtgtacatccaggccgccggcggccccctggccttcctggtgatcatggccctcttcatgctgaatgtgggcagcacagccttcagcacctggtggctgagctactggatcaagcagggcagcggcaacaccaccgtgaccagaggaaatgagacctctgtgtctgacagcatgaaggacaacccccacatgcagtactatgccagcatctatgccctgtccatggctgtgatgctgatcctgaaggccatccggggcgtggtgtttgtgaagggcaccctgcgggccagcagccggctgcatgatgagctgttccgccgcatcctgcggagccccatgaagttctttgacaccacccccaccggccgcatcctgaaccgcttcagcaaggacatggatgaggtggatgtgcggctgcccttccaggccgagatgttcatccagaatgtcatcctggtgttcttctgtgtgggcatgattgctggggtcttcccctggttcctggtggccgtgggccccctggtgatcctcttctctgtgctgcacatcgtgtcccgggtgctgatccgggagctgaagaggctggacaacatcacccagagccccttcctgagccacatcaccagcagcatccagggcctggccaccatccacgcctacaacaagggccaggagttcctgcaccgctaccaggagctgctggatgacaaccaggcccccttcttcctgttcacctgtgccatgcgctggctggccgtgcggctggacctgatcagcatcgccctgatcaccaccaccggcctgatgattgtgctgatgcacggccagatccccccagcctatgccggcctggccatctcctatgctgtgcagctgaccggcctcttccagttcaccgtgcggctggccagcgagacagaggcccgcttcacctctgtggagcgcatcaaccactacatcaagaccctgagcctggaggccccagcccgcatcaagaacaaggcccccagcccagactggccccaggagggggaggtgacctttgaaaatgctgagatgagataccgggagaacctgcccctggtgctgaagaaggtgtccttcaccatcaagcccaaggagaagattggaattgtgggccgcactggaagtggcaagagcagcctgggcatggccctcttccggctggtggagctgagcggcggctgcatcaagattgatggagtgcgcatcagtgacatcggcctggccgacctgcggagcaagctgagcatcatcccccaggagcctgtgctcttctctggaacagtgcgcagcaacctggaccccttcaaccagtacacagaggaccagatctgggatgccctggagaggacccacatgaaggagtgcatcgcccagctgcccctgaagctggagagcgaggtgatggagaatggagacaacttctctgtgggggagcggcagctgctgtgcatcgcccgggccctgctgcggcactgcaagatcctgatcctggatgaggccacagctgccatggacacagaaacagacctgctgatccaggagaccatccgggaggcctttgctgactgcaccatgctgaccatcgcccaccggctgcacacagtgctgggcagtgaccgcatcatggtgctggcccagggccaggtggtggagtttgacacccccagcgtgctgctgagcaatgacagcagccgcttctacgccatgtttgctgctgctgagaacaaggtggccgtgaagggctag

SEQ ID NO: 144624 - DNA, 627 bp, synthetic construct
  misc_feature 1..627: note = Description of Artificial Sequence: Synthetic coding sequence
  source 1..627: mol_type = other DNA
atgaaggacatcgacatcggcaaggagtacatcatccccagccctggctacagatctgtgcgggagaggaccagcaccagcggcacccaccgggaccgggaggacagcaagttccggaggacccggcccctggagtgccaggatgccctggagacagctgcccgggcagagggcctgagcctggatgcctccatgcacagccagctgcgcatcctggatgaggagcaccccaagggcaagtaccaccacggcctgagcgccctgaagcccatccgcaccaccagcaagcaccagcaccctgtggacaatgccggcctcttcagctgcatgaccttctcctggctgagcagcctggcccgggtggcccacaagaagggggagctgtccatggaggatgtgtggagcctgagcaagcatgagagcagtgatgtgaactgccggcggctggagcggctgtggcaggaggagctgaatgaggtgggcccagatgctgccagcctgcggcgggtggtgtggatcttctgcaggaccaggctcatcctgagcatcgtgtgcctgatgatcacccagctggccggcttcagcggccccaacttccaggacggctgcatcctgcggtctgagtag

SEQ ID NO: 144625 - DNA, 2511 bp, synthetic construct
  misc_feature 1..2511: note = Description of Artificial Sequence: Synthetic coding sequence
  source 1..2511: mol_type = other DNA
atgcacagccagctgcgcatcctggatgaggagcaccccaagggcaagtaccaccacggcctgagcgccctgaagcccatccgcaccaccagcaagcaccagcaccctgtggacaatgccggcctcttcagctgcatgaccttctcctggctgagcagcctggcccgggtggcccacaagaagggggagctgtccatggaggatgtgtggagcctgagcaagcatgagagcagtgatgtgaactgccggcggctggagcggctgtggcaggaggagctgaatgaggtgggcccagatgctgccagcctgcggcgggtggtgtggatcttctgcaggaccaggctcatcctgagcatcgtgtgcctgatgatcacccagctggccggcttcagcggccctgccttcatggtgaagcacctgctggagtacacccaggccacagagagcaacctgcagtacagcctgctgctggtgctgggcctgctgctgacagagatcgtgcgctcctggagcctggccctgacctgggccctgaactacagaactggagtgcggctgcggggggccatcctgaccatggccttcaagaagatcctgaagctgaagaacatcaaggagaagagcctgggggagctgatcaacatctgcagcaatgatggccagaggatgtttgaggccgctgctgtgggcagcctgctggccggcggccctgtggtggccatcctgggcatgatctacaacgtcatcatcctgggccccaccggcttcctgggcagcgctgtgttcatcctcttctacccagccatgatgtttgccagccggctgacagcctacttccggaggaaatgtgtggccgccacagatgagcgggtgcagaagatgaatgaggtgctgacctacatcaagttcatcaagatgtatgcctgggtgaaggccttcagccagagcgtgcagaagatccgggaggaggagcggcgcatcctggagaaggccggctacttccagagcatcaccgtgggcgtggcccccatcgtggtggtgattgcctctgtggtgaccttctctgtgcacatgaccctgggctttgacctgacagctgcccaggccttcaccgtggtgaccgtcttcaacagcatgacctttgccctgaaggtgacccccttctctgtgaagagcctgtctgaggcctctgtggccgtggaccgcttcaagagcctcttcctgatggaggaggtgcacatgatcaagaacaagccagccagcccccacatcaagattgagatgaagaatgccaccctggcctgggacagcagccacagcagcatccagaacagccccaagctgacccccaagatgaagaaggacaagagggccagccggggcaagaaggagaaggtgcggcagctgcagaggacagagcaccaggccgtgctggccgagcagaagggccacctgctgctggacagtgatgagcggcccagccctgaggaggaggagggcaagcacatccacctgggccacctgcggctgcagaggaccctgcacagcattgacctggagatccaggagggcaagctggtgggcatctgtggctctgtgggcagcggcaagaccagcctcatcagcgccatcctgggccagatgaccctgctggagggcagcatcgccatcagcggcacctttgcctacgtggcccagcaggcctggatcctgaatgccaccctgcgggacaacatcctgtttgggaaggagtatgatgaggagcgctacaacagcgtgctgaacagctgctgcctgcggccagacctggccatcctgcccagcagtgacctgacagagatcggggagcggggggccaacctgagcggcggccagaggcagaggatcagcctggcccgggccctgtacagcgacaggagcatctacatcctggatgaccccctgagcgccctggatgcccacgtgggcaaccacatcttcaacagcgccatcaggaagcacctgaagagcaagacagtgctgtttgtgacccaccagctgcagtacctggtggactgtgatgaagtcatcttcatgaaggagggctgcatcacagagcggggcacccatgaggagctgatgaacctgaatggagactatgccaccatcttcaacaacctgctgctgggggagaccccacctgtggagatcaacagcaagaaggagaccagcggcagccagaagaagagccaggacaagggccccaagacaggctctgtgaagaaggagaaggctgtgaagccagaggagggccagctggtgcagctggaggagaagggccagggctctgtgccctggagcgtgtatggccaccctggctgctggggccccctgggcatccctggctactacggccccttccacgcagaatgtcggcagcaccggctgcagcacctggtggtggagctgctggaccaggccaggaagcgggagcaccactgtgacagccgggagcgggacctgggggagtag

SEQ ID NO: 144626 - DNA, 678 bp, synthetic construct
  misc_feature 1..678: note = Description of Artificial Sequence: Synthetic coding sequence
  source 1..678: mol_type = other DNA
atgaaggacatcgacatcggcaaggagtacatcatccccagccctggctacagatctgtgcgggagaggaccagcaccagcggcacccaccgggaccgggaggacagcaagttccggaggacccggcccctggagtgccaggatgccctggagacagctgcccgggcagagggcctgagcctggatgcctccatgcacagccagctgcgcatcctggatgaggagcaccccaagggcaagtaccaccacggcctgagcgccctgaagcccatccgcaccaccagcaagcaccagcaccctgtggacaatgccggcctcttcagctgcatgaccttctcctggctgagcagcctggcccgggtggcccacaagaagggggagctgtccatggaggatgtgtggagcctgagcaagcatgagagcagtgatgtgaactgccggcggctggagcggctgtggcaggaggagctgaatgaggtgggcccagatgctgccagcctgcggcgggtggtgtggatcttctgcaggaccaggctcatcctgagcatcgtgtgcctgatgatcacccagctggccggcttcagcggccccccatcctttggagactgcagcatctctgctgaggtgtgtggcaaccggctgcactgcacagccatcctgctgagctgcttcacctag

SEQ ID NO: 144627 - DNA, 696 bp, synthetic construct
  misc_feature 1..696: note = Description of Artificial Sequence: Synthetic coding sequence
  source 1..696: mol_type = other DNA
atgaaggacatcgacatcggcaaggagtacatcatccccagccctggctacagatctgtgcgggagaggaccagcaccagcggcacccaccgggaccgggaggacagcaagttccggaggacccggcccctggagtgccaggatgccctggagacagctgcccgggcagagggcctgagcctggatgcctccatgcacagccagctgcgcatcctggatgaggagcaccccaagggcaagtaccaccacggcctgagcgccctgaagcccatccgcaccaccagcaagcaccagcaccctgtggacaatgccggcctcttcagctgcatgaccttctcctggctgagcagcctggcccgggtggcccacaagaagggggagctgtccatggaggatgtgtggagcctgagcaagcatgagagcagtgatgtgaactgccggcggctggagcggctgtggcaggaggagctgaatgaggtgggcccagatgctgccagcctgcggcgggtggtgtggatcttctgcaggaccaggctcatcctgagcatcgtgtgcctgatgatcacccagctggccggcttcagcggccctgtgagcagcaaccaccccttccggcagagccctggggcccggcccaggcctgccctgaccctgctcttctgctgccggggctgtgcccagctgtgggccaggtag

SEQ ID NO: 144628 - DNA, 444 bp, synthetic construct
  misc_feature 1..444: note = Description of Artificial Sequence: Synthetic coding sequence
  source 1..444: mol_type = other DNA
atgaaggacatcgacatcggcaaggagtacatcatccccagccctggctacagatctgtgcgggagaggaccagcaccagcggcacccaccgggaccgggaggacagcaagttccggaggacccggcccctggagtgccaggatgccctggagacagctgcccgggcagagggcctgagcctggatgcctccatgcacagccagctgcgcatcctggatgaggagcaccccaagggcaagtaccaccacggcctgagcgccctgaagcccatccgcaccaccagcaagcaccagcaccctgtggacaatgccggcctcttcagctgcatgaccttctcctggctgagcagcctggcccgggtggcccacaagaagggggagctgtccatggaggatgtgtggagcctgagcaagcatgagagcagtgatgtgaactgcaggtag

SEQ ID NO: 144629 - DNA, 639 bp, synthetic construct
  misc_feature 1..639: note = Description of Artificial Sequence: Synthetic coding sequence
  source 1..639: mol_type = other DNA
atgaaggacatcgacatcggcaaggagtacatcatccccagccctggctacagatctgtgcgggagaggaccagcaccagcggcacccaccgggaccgggaggacagcaagttccggaggacccggcccctggagtgccaggatgccctggagacagctgcccgggcagagggcctgagcctggatgcctccatgcacagccagctgcgcatcctggatgaggagcaccccaagggcaagtaccaccacggcctgagcgccctgaagcccatccgcaccaccagcaagcaccagcaccctgtggacaatgccggcctcttcagctgcatgaccttctcctggctgagcagcctggcccgggtggcccacaagaagggggagctgtccatggaggatgtgtggagcctgagcaagcatgagagcagtgatgtgaactgccggcggctggagcggctgtggcaggaggagctgaatgaggtgggcccagatgctgccagcctgcggcgggtggtgtggatcttctgcaggaccaggctcatcctgagcatcgtgtgcctgatgatcacccagctggccggcttcagcggccccctggcctggtgctgccaggacctggacctgggcggcgtgtccctgtag

SEQ ID NO: 144630 - DNA, 1530 bp, synthetic construct
  misc_feature 1..1530: note = Description of Artificial Sequence: Synthetic coding sequence
  source 1..1530: mol_type = other DNA
atgcagagctggagccgggtgtactgcagcctggccaagaggggccacttcaaccgcatcagccacggcctgcagggcctgtctgctgtgcccctgcggacctacgccgaccagcccattgatgctgatgtgacagtgattggcagcggccctgggggctacgtggccgccatcaaggccgcccagctgggcttcaagacagtgtgcatcgagaagaatgagaccctgggcggcacctgcctgaatgtgggctgcatccccagcaaggccctgctgaacaacagccactactaccacatggcccacggcaaggactttgccagccggggcatcgagatgtctgaggtgcggctgaacctggacaagatgatggagcagaagagcacagctgtgaaggccctgactggaggcatcgcccacctgttcaagcagaacaaggtggtgcacgtgaatggctacggcaagatcaccgggaagaaccaggtgacagccaccaaggcagatggcggcacccaggtgattgacaccaagaacatcctgattgccactggaagtgaggtgacccccttccctggcatcaccattgatgaggacaccatcgtgagcagcactggagccctgagcctgaagaaggtgcctgagaagatggtggtgattggagctggggtcatcggcgtggagctgggctctgtgtggcagaggctgggcgcagatgtgacagctgtggagttcctgggccacgtgggcggcgtgggcatcgacatggagatcagcaagaacttccagaggatcctgcagaagcagggcttcaagttcaagctgaacaccaaggtgactggagccaccaagaagagtgatggcaagattgatgtgtccattgaagctgccagcggcggcaaggccgaggtgatcacctgtgatgtgctgctggtgtgcattggaagaagacccttcaccaagaacctgggcctggaggagctgggcatcgagctggacccccggggccgcatccctgtgaacacccgcttccagaccaagatccccaacatctatgccatcggagatgtggtggccggccccatgctggcccacaaggcagaagatgagggcatcatctgtgtggagggcatggccggcggcgctgtgcacatcgactacaactgtgtgcccagcgtcatctacacccaccctgaggtggcctgggtgggcaagtctgaggagcagctgaaggaggagggcatcgagtacaaggtgggcaagttcccctttgctgccaacagccgggccaagaccaatgctgacacagatggcatggtgaagatcctgggccagaagagcacagacagagtgctgggcgcccacatcctgggccctggggccggggagatggtgaatgaagctgccctggccctggagtatggagccagctgtgaggacatcgcccgggtgtgccacgcccaccccaccctgtctgaggccttccgggaggccaacctggccgccagctttgggaagagcatcaacttctag

SEQ ID NO: 144631 - DNA, 4512 bp, synthetic construct
  misc_feature 1..4512: note = Description of Artificial Sequence: Synthetic coding sequence
  source 1..4512: mol_type = other DNA
atggccgccccagctgagccctgtgccggccagggcgtgtggaaccagacagagcctgagcctgctgccaccagcctgctgagcctgtgcttcctgaggacagctggggtgtgggtgccccccatgtacctgtgggtgctgggccccatctacctgctcttcatccaccaccacggccggggctacctgaggatgagccccctcttcaaggccaagatggtgctgggctttgccctgattgtgctgtgcaccagctctgtggccgtggccctgtggaagatccagcagggcaccccagaggcccctgagttcctgatccaccccaccgtgtggctgaccaccatgagctttgctgtgttcctgatccacacagagaggaagaagggcgtgcagagcagtggagtgctgtttggctactggctgctgtgctttgtgctgcctgccaccaatgctgcccagcaggccagcggggccggcttccagagcgaccctgtgcgccacctgagcacctacctgtgcctgagcctggtggtggcccagtttgtgctgagctgcctggccgaccagccccccttcttccctgaggacccccagcagagcaacccctgcccagagaccggggccgccttccccagcaaggccaccttctggtgggtgtctggcctggtgtggaggggctaccgccggcccctgcggcccaaggacctgtggagcctgggccgggagaacagcagcgaggagctggtgtcccggctggagaaggagtggatgaggaacagatctgctgcccggcggcacaacaaggccatcgccttcaagaggaaaggaggcagcggcatgaaggcccctgagacagagcccttcctgcggcaggagggcagccagtggaggcccctgctgaaggccatctggcaggtgttccacagcaccttcctgctgggcaccctgagcctcatcatcagtgatgtgttccgcttcaccgtgcccaagctgctgagcctcttcctggagttcatcggggaccccaagcccccagcctggaagggctacctgctggccgtgctgatgttcctgagcgcctgcctgcagaccctgtttgagcagcagaacatgtaccgcctgaaggtgctgcagatgaggctgcggagcgccatcaccggcctggtgtacaggaaggtgctggccctgagcagcggcagcaggaaggccagcgctgtgggagatgtggtgaacctggtgtctgtggatgtgcagaggctgacagaatctgtgctgtacctgaatggcctgtggctgcccctggtgtggatcgtggtgtgctttgtgtacctgtggcagctgctgggccccagcgccctgacagccatcgctgtgttcctgagcctgctgcccctgaacttcttcatcagcaagaagaggaaccaccaccaggaggagcagatgaggcagaaggacagccgggcccggctgaccagcagcatcctgaggaacagcaagaccatcaagttccacggctgggagggcgccttcctggacagagtgctgggcatccggggccaggagctgggcgccctgcggaccagcggcctgctcttctctgtgtccctggtgtccttccaggtgtccaccttcctggtggccctggtggtgtttgctgtgcacaccctggtggctgaaaatgccatgaatgctgagaaggcctttgtgaccctgactgtgctgaacatcctgaacaaggcccaggccttcctgcccttcagcatccacagcctggtgcaggcccgggtgtcctttgaccggctggtgaccttcctgtgcctggaggaggtggaccccggggtggtggacagcagcagcagcggcagcgctgctgggaaggactgcatcaccatccacagcgccacctttgcctggagccaggagagccccccctgcctgcaccgcatcaacctgactgtgccccagggctgcctgctggccgtggtgggccctgtgggcgccggcaagagcagcctgctgagcgccctgctgggggagctgagcaaggtggagggctttgtgtccattgaaggagctgtggcctacgtgccccaggaggcctgggtgcagaacacctctgtggtggagaatgtgtgcttcggccaggagctggaccccccctggctggagcgggtgctggaggcctgtgccctgcagccagatgtggacagcttccctgagggcatccacaccagcatcggggagcagggcatgaacctgagcggcggccagaagcagaggctgagcctggcccgggctgtgtacaggaaggctgctgtgtacctgctggatgaccccctggccgccctggatgcccacgtgggccagcacgtgttcaaccaggtgattggccctgggggcctgctgcagggcaccacccgcatcctggtgacccacgccctgcacatcctgccccaggccgactggatcatcgtgctggccaacggggccatcgccgagatgggcagctaccaggagctgctgcagaggaagggggccctgatgtgcctgctggaccaggcccggcagcccggggacagaggagagggggagacagagcccggcaccagcaccaaggacccccggggcaccagcgctggaagaagacctgagctgcggcgggagaggagcatcaagtctgtgcctgagaaggacaggaccaccagcgaggcccagacagaggtgcccctggatgatcctgaccgggccggctggccagctgggaaggacagcatccagtatggccgggtgaaggccaccgtgcacctggcctacctgcgggctgtgggcacccccctgtgcctgtatgccctcttcctgttcctgtgccagcaggtggccagcttctgccggggctactggctgagcctgtgggcagatgatcctgctgtgggcggccagcagacccaggccgccctgcggggcggcatcttcggcctgctgggctgcctgcaggccatcggcctgtttgcctccatggctgctgtgctgctgggcggggcccgggccagccggctgctcttccagaggctgctgtgggatgtggtgcgcagccccatctccttctttgagaggacccccatcggccacctgctgaaccgcttcagcaaggagacagacacagtggatgtggacatcccagacaagctgcggagcctgctgatgtatgccttcggcctgctggaggtgtccctggtggtggccgtggccacccccctggccaccgtggccatcctgcccctcttcctgctgtatgccggcttccagagcctgtatgtggtgagcagctgccagctgcggcggctggagagcgccagctacagctctgtgtgcagccacatggccgagaccttccagggcagcacagtggtgcgggccttccgcacccaggccccctttgtggcccagaacaatgcccgggtggatgagagccagaggatctccttcccccggctggtggccgaccgctggctggccgccaacgtggagctgctgggcaatggcctggtgtttgctgctgccacctgtgctgtgctgagcaaggcccacctgtctgctggcctggtgggcttctctgtgtctgctgccctgcaggtgacccagaccctgcagtgggtggtgaggaactggacagacctggagaacagcatcgtgtctgtggagaggatgcaggactatgcctggacccccaaggaggccccctggaggctgcccacctgtgccgcccagcccccctggccccagggcggccagatcgagttccgggactttggcctgcgctacagacctgagctgcccctggccgtgcagggcgtgtccttcaagatccatgctggggagaaggtgggcatcgtgggccgcactggagctgggaagagcagcctggccagcggcctgctgcggctgcaggaggccgctgagggcggcatctggattgatggagtgcccatcgcccacgtgggcctgcacaccctgcggagccgcatcagcatcatcccccaggaccccatcctcttccctggcagcctgaggatgaacctggacctgctgcaggagcacagtgatgaggccatctgggccgccctggagaccgtgcagctgaaggccctggtggccagcctgcccggccagctgcagtacaagtgtgccgacagaggagaggacctgtctgtgggccagaagcagctgctgtgcctggcccgggccctgctgaggaagacccagatcctgatcctggatgaggccacagctgctgtggaccccggcacagagctgcagatgcaggccatgctgggctcctggtttgcccagtgcaccgtgctgctgattgcccaccggctgcggtctgtgatggactgtgcccgggtgctggtgatggacaagggccaggtggccgagagcggcagccctgcccagctgctggcccagaagggcctcttctaccgcctggcccaggagagcggcctggtgtag

SEQ ID NO: 144632 - DNA, 2616 bp, synthetic construct
  misc_feature 1..2616: note = Description of Artificial Sequence: Synthetic coding sequence
  source 1..2616: mol_type = other DNA
atggccgccccagctgagccctgtgccggccagggcgtgtggaaccagacagagcctgagcctgctgccaccagcctgctgagcctgtgcttcctgaggacagctggggtgtgggtgccccccatgtacctgtgggtgctgggccccatctacctgctcttcatccaccaccacggccggggctacctgaggatgagccccctcttcaaggccaagatggtgctgggctttgccctgattgtgctgtgcaccagctctgtggccgtggccctgtggaagatccagcagggcaccccagaggcccctgagttcctgatccaccccaccgtgtggctgaccaccatgagctttgctgtgttcctgatccacacagagaggaagaagggcgtgcagagcagtggagtgctgtttggctactggctgctgtgctttgtgctgcctgccaccaatgctgcccagcaggccagcggggccggcttccagagcgaccctgtgcgccacctgagcacctacctgtgcctgagcctggtggtggcccagtttgtgctgagctgcctggccgaccagccccccttcttccctgaggacccccagcagagcaacccctgcccagagaccggggccgccttccccagcaaggccaccttctggtgggtgtctggcctggtgtggaggggctaccgccggcccctgcggcccaaggacctgtggagcctgggccgggagaacagcagcgaggagctggtgtcccggctggagaaggagtggatgaggaacagatctgctgcccggcggcacaacaaggccatcgccttcaagaggaaaggaggcagcggcatgaaggcccctgagacagagcccttcctgcggcaggagggcagccagtggaggcccctgctgaaggccatctggcaggtgttccacagcaccttcctgctgggcaccctgagcctcatcatcagtgatgtgttccgcttcaccgtgcccaagctgctgagcctcttcctggagttcatcggggaccccaagcccccagcctggaagggctacctgctggccgtgctgatgttcctgagcgcctgcctgcagaccctgtttgagcagcagaacatgtaccgcctgaaggtgctgcagatgaggctgcggagcgccatcaccggcctggtgtacaggaaggtgctggccctgagcagcggcagcaggaaggccagcgctgtgggagatgtggtgaacctggtgtctgtggatgtgcagaggctgacagaatctgtgctgtacctgaatggcctgtggctgcccctggtgtggatcgtggtgtgctttgtgtacctgtggcagctgctgggccccagcgccctgacagccatcgctgtgttcctgagcctgctgcccctgaacttcttcatcagcaagaagaggaaccaccaccaggaggagcagatgaggcagaaggacagccgggcccggctgaccagcagcatcctgaggaacagcaagaccatcaagttccacggctgggagggcgccttcctggacagagtgctgggcatccggggccaggagctgggcgccctgcggaccagcggcctgctcttctctgtgtccctggtgtccttccaggtgtccaccttcctggtggccctggtggtgtttgctgtgcacaccctggtggctgaaaatgccatgaatgctgagaaggcctttgtgaccctgactgtgctgaacatcctgaacaaggcccaggccttcctgcccttcagcatccacagcctggtgcaggcccgggtgtcctttgaccggctggtgaccttcctgtgcctggaggaggtggaccccggggtggtggacagcagcagcagcggcagcgctgctgggaaggactgcatcaccatccacagcgccacctttgcctggagccaggagagccccccctgcctgcaccgcatcaacctgactgtgccccagggctgcctgctggccgtggtgggccctgtgggcgccggcaagagcagcctgctgagcgccctgctgggggagctgagcaaggtggagggctttgtgtccattgaaggagctgtggcctacgtgccccaggaggcctgggtgcagaacacctctgtggtggagaatgtgtgcttcggccaggagctggaccccccctggctggagcgggtgctggaggcctgtgccctgcagccagatgtggacagcttccctgagggcatccacaccagcatcggggagcagggcatgaacctgagcggcggccagaagcagaggctgagcctggcccgggctgtgtacaggaaggctgctgtgtacctgctggatgaccccctggccgccctggatgcccacgtgggccagcacgtgttcaaccaggtgattggccctgggggcctgctgcagggcaccaagcagaacctgggccctgcccccaggaccccagaggcccccctgcaggccggcggccccagcctggatgcccggggccccagcagccagagcctgcggaggacagtgcccctgcagaagccccggcagcgcttcctgtggatgaccctgaccggccaggacggccagcaggagaggacagccagcaacacagctggatag

SEQ ID NO: 144633 - DNA, 2019 bp, synthetic construct
  misc_feature 1..2019: note = Description of Artificial Sequence: Synthetic coding sequence
  source 1..2019: mol_type = other DNA
atggccgccccagctgagccctgtgccggccagggcgtgtggaaccagacagagcctgagcctgctgccaccagcctgctgagcctgtgcttcctgaggacagctggggtgtgggtgccccccatgtacctgtgggtgctgggccccatctacctgctcttcatccaccaccacggccggggctacctgaggatgagccccctcttcaaggccaagatggtggccgccatccctggcagcctggagcctggaaatgtgctgggctttgccctgattgtgctgtgcaccagctctgtggccgtggccctgtggaagatccagcagggcaccccagaggcccctgagttcctgatccaccccaccgtgtggctgaccaccatgagctttgctgtgttcctgatccacacagagaggaagaagggcgtgcagagcagtggagtgctgtttggctactggctgctgtgctttgtgctgcctgccaccaatgctgcccagcaggccagcggggccggcttccagagcgaccctgtgcgccacctgagcacctacctgtgcctgagcctggtggtggcccagtttgtgctgagctgcctggccgaccagccccccttcttccctgaggacccccagcagagcaacccctgcccagagaccggggccgccttccccagcaaggccaccttctggtgggtgtctggcctggtgtggaggggctaccgccggcccctgcggcccaaggacctgtggagcctgggccgggagaacagcagcgaggagctggtgtcccggctggagaaggagtggatgaggaacagatctgctgcccggcggcacaacaaggccatcgccttcaagaggaaaggaggcagcggcatgaaggcccctgagacagagcccttcctgcggcaggagggcagccagtggaggcccctgctgaaggccatctggcaggtgttccacagcaccttcctgctgggcaccctgagcctcatcatcagtgatgtgttccgcttcaccgtgcccaagctgctgagcctcttcctggagttcatcggggaccccaagcccccagcctggaagggctacctgctggccgtgctgatgttcctgagcgcctgcctgcagaccctgtttgagcagcagaacatgtaccgcctgaaggtgctgcagatgaggctgcggagcgccatcaccggcctggtgtacaggaaggtgctggccctgagcagcggcagcaggaaggccagcgctgtgggagatgtggtgaacctggtgtctgtggatgtgcagaggctgacagaatctgtgctgtacctgaatggcctgtggctgcccctggtgtggatcgtggtgtgctttgtgtacctgtggcagctgctgggccccagcgccctgacagccatcgctgtgttcctgagcctgctgcccctgaacttcttcatcagcaagaagaggaaccaccaccaggaggagcagatgaggcagaaggacagccgggcccggctgaccagcagcatcctgaggaacagcaagaccatcaagttccacggctgggagggcgccttcctggacagagtgctgggcatccggggccaggagctgggcgccctgcggaccagcggcctgctcttctctgtgtccctggtgtccttccaggtgtccaccttcctggtggccctggtggtgtttgctgtgcacaccctggtggctgaaaatgccatgaatgctgagaaggcctttgtgaccctgactgtgctgaacatcctgaacaaggcccaggccttcctgcccttcagcatccacagcctggtgcaggcccgggtgtcctttgaccggctggtgaccttcctgtgcctggaggaggtggaccccggggtggtggacagcagcagcagcggcagcgctgctgggaaggactgcatcaccatccacagcgccacctttgcctggagccaggagagccccccctgcctgcaccgggtgctgctgtaccacgccggctggagcgccatggcctag

SEQ ID NO: 144634 - DNA, 4650 bp, synthetic construct
  misc_feature 1..4650: note = Description of Artificial Sequence: Synthetic coding sequence
  source 1..4650: mol_type = other DNA
atgagcctgtccttctgtggcaacaacatcagcagctacaacatcaatgatggagtgctgcagaacagctgctttgtggatgccctgaacctggtgccccacgtgttcctgctcttcatcaccttccccatcctcttcatcggctggggcagccagagcagcaaggtgcagatccaccacaacacctggctgcacttccctggccacaacctgcgctggatcctgacctttgccctgctgtttgtgcacgtgtgtgaaattgctgagggcatcgtgtctgacagccggcgggagagccgccacctgcacctgttcatgcctgctgtgatgggctttgtggccaccaccaccagcatcgtgtactaccacaacatcgagaccagcaacttccccaagctgctgctggccctcttcctgtactgggtgatggccttcatcaccaagaccatcaagctggtgaagtactgccagagcggcctggacatcagcaacctgcgcttctgcatcaccggcatgatggtgatcctgaatggcctgctgatggctgtggagatcaacgtcatccgggtgagaagatatgtgttcttcatgaacccccagaaggtgaagcccccagaggacctgcaggacctgggcgtgcgcttcctgcagccctttgtgaacctgctgagcaaggccacctactggtggatgaacaccctcatcatcagcgcccacaagaagcccatcgacctgaaggccatcggcaagctgcccatcgccatgagagctgtgaccaactacgtgtgcctgaaggatgcctatgaggagcagaagaagaaggtggccgaccaccccaacagaacacccagcatctggctggccatgtaccgggccttcggccggcccatcctgctgagcagcaccttccgctacctggccgacctgctgggctttgctggccccctgtgcatctctggaattgtgcagagggtgaatgagacccagaatggcaccaacaacaccaccggcatcagcgagaccctgagcagcaaggagttcctggagaatgcctacgtgctggccgtgctgctcttcctggccctgatcctgcagaggaccttcctgcaggccagctactacgtgaccattgaaacaggcatcaacctgcggggggccctgctggccatgatctacaacaagatcctgcggctgagcaccagcaacctgtccatgggagagatgaccctgggccagatcaacaacctggtggccatcgagaccaaccagctgatgtggttcctgttcctgtgccccaacctgtgggccatgcctgtgcagatcatcatgggcgtcatcctgctgtacaacctgctgggcagcagcgccctggtgggcgctgctgtgattgtgctgctggcccccatccagtacttcatcgccaccaagctggccgaggcccagaagagcaccctggactacagcacagagcggctgaagaagaccaatgagatcctgaagggcatcaagctgctgaagctgtatgcctgggagcacatcttctgcaagtctgtggaggagaccaggatgaaggagctgagcagcctgaagacctttgccctgtacaccagcctgagcatcttcatgaatgctgccatccccatcgctgctgtgctggccacctttgtgacccacgcctatgccagcggcaacaacctgaagccagctgaggcctttgccagcctgagcctcttccacatcctggtgacccccctcttcctgctgagcacagtggtgcgctttgctgtgaaggccatcatctctgtgcagaagctgaatgagttcctgctgagtgatgaaattggagatgacagctggaggactggagagagcagcctgccctttgagagctgcaagaagcacactggagtgcagcccaagaccatcaacaggaagcagcccggccgctaccacctggacagctatgagcagagcacccggcggctgcggcctgctgagacagaggacatcgccatcaaggtgaccaacggctacttctcctggggcagcggcctggccaccctgagcaacatcgacatccgcatccccaccggccagctgaccatgattgtgggccaggtgggctgcggcaagagcagcctgctgctggccatcctgggggagatgcagaccctggagggcaaggtgcactggagcaatgtgaatgaaagtgagcccagctttgaggccaccaggagcaggaaccgctacagcgtggcctatgctgcccagaagccctggctgctgaatgccaccgtggaggagaacatcaccttcggcagccccttcaacaagcagcgctacaaggctgtgacagatgcctgcagcctgcagcctgacatcgacctgctgccctttggagaccagacagaaattggagagcggggcatcaacctgagcggcggccagaggcagaggatctgtgtggcccgggccctgtaccagaacaccaacatcgtgttcctggatgaccccttcagcgccctggacatccacctgagtgaccacctgatgcaggagggcatcctgaagttcctgcaggatgacaagaggaccctggtgctggtgacccacaagctgcagtacctgacccatgctgactggatcatcgccatgaaggatggctctgtgctgcgggagggcaccctgaaggacatccagaccaaggatgtggagctgtatgagcactggaagaccctgatgaaccggcaggaccaggagctggagaaggacatggaggccgaccagaccaccctggagaggaagaccctgcggcgggccatgtacagccgggaggccaaggcccagatggaggatgaagatgaggaggaggaggaggaggaggatgaagatgacaacatgagcacagtgatgaggctgcggaccaagatgccctggaagacctgctggagatacctgaccagcggcggcttcttcctgctgatcctgatgatcttcagcaagctgctgaagcacagcgtcatcgtggccatcgactactggctggccacctggaccagcgagtacagcatcaacaacacaggcaaggctgaccagacctactacgtggccggcttcagcatcctgtgtggggccggcatcttcctgtgcctggtgaccagcctgactgtggagtggatgggcctgacagctgccaagaacctgcaccacaacctgctgaacaagatcatcctgggccccatccgcttctttgacaccacccccctgggcctcatcctgaaccgcttctctgctgacaccaacatcatcgaccagcacatcccccccaccctggagagcctgaccaggagcaccctgctgtgcctgagcgccatcggcatgatctcctatgccacccctgtgttcctggtggccctgctgcccctgggcgtggccttctacttcatccagaagtacttccgggtggccagcaaggacctgcaggagctggatgacagcacccagctgcccctgctgtgccacttcagcgagacagctgagggcctgaccaccatccgggccttcagacatgagacccgcttcaagcagaggatgctggagctgacagacaccaacaacatcgcctacctgttcctgtctgctgccaaccgctggctggaggtgaggacagactacctgggcgcctgcatcgtgctgacagccagcatcgccagcatcagcggcagcagcaacagcggcctggtgggcctgggcctgctgtatgccctgaccatcaccaactacctgaactgggtggtgaggaacctggccgacctggaggtgcagatgggcgctgtgaagaaggtgaacagcttcctgaccatggagagtgaaaattatgagggcaccatggaccccagccaggtgcctgagcactggccccaggagggggagatcaagatccatgacctgtgtgtgcgctatgagaacaacctgaagcctgtgctgaagcacgtgaaggcctacatcaagccaggccagaaggtgggcatctgtggccgcacaggcagcggcaagagcagcctgagcctggccttcttcaggatggtggacatctttgatggcaagatcgtgattgatggcatcgacatcagcaagctgcccctgcacaccctgcggagccggctgagcatcatcctgcaggaccccatcctcttcagcggcagcatccgcttcaacctggaccctgagtgcaagtgcacagatgaccggctgtgggaggccctggagatcgcccagctgaagaacatggtgaagagcctgcccggcggcctggatgctgtggtgacagaaggaggagagaacttctctgtgggccagaggcagctgttctgcctggcccgggcctttgtgaggaagagcagcatcctgatcatggatgaggccacagccagcattgacatggccacagagaacatcctgcagaaggtggtgatgacagcctttgctgacagaacagtggtgaccatcgcccaccgggtgcacaccatcctgacagctgacctggtgattgtgatgaagaggggcaacatcctggagtatgacaccccagagagcctgctggcccaggagaatggagtgtttgccagctttgtgcgggctgacatgtag

SEQ ID NO: 144635 - DNA, 4650 bp, synthetic construct
  misc_feature 1..4650: note = Description of Artificial Sequence: Synthetic coding sequence
  source 1..4650: mol_type = other DNA
atgagcctgtccttctgtggcaacaacatcagcagctacaacatcaatgatggagtgctgcagaacagctgctttgtggatgccctgaacctggtgccccacgtgttcctgctcttcatcaccttccccatcctcttcatcggctggggcagccagagcagcaaggtgcagatccaccacaacacctggctgcacttccctggccacaacctgcgctggatcctgacctttgccctgctgtttgtgcacgtgtgtgaaattgctgagggcatcgtgtctgacagccggcgggagagccgccacctgcacctgttcatgcctgctgtgatgggctttgtggccaccaccaccagcatcgtgtactaccacaacatcgagaccagcaacttccccaagctgctgctggccctcttcctgtactgggtgatggccttcatcaccaagaccatcaagctggtgaagtactgccagagcggcctggacatcagcaacctgcgcttctgcatcaccggcatgatggtgatcctgaatggcctgctgatggctgtggagatcaacgtcatccgggtgagaagatatgtgttcttcatgaacccccagaaggtgaagcccccagaggacctgcaggacctgggcgtgcgcttcctgcagccctttgtgaacctgctgagcaaggccacctactggtggatgaacaccctcatcatcagcgcccacaagaagcccatcgacctgaaggccatcggcaagctgcccatcgccatgagagctgtgaccaactacgtgtgcctgaaggatgcctatgaggagcagaagaagaaggtggccgaccaccccaacagaacacccagcatctggctggccatgtaccgggccttcggccggcccatcctgctgagcagcaccttccgctacctggccgacctgctgggctttgctggccccctgtgcatctctggaattgtgcagagggtgaatgagacccagaatggcaccaacaacaccaccggcatcagcgagaccctgagcagcaaggagttcctggagaatgcctacgtgctggccgtgctgctcttcctggccctgatcctgcagaggaccttcctgcaggccagctactacgtgaccattgaaacaggcatcaacctgcggggggccctgctggccatgatctacaacaagatcctgcggctgagcaccagcaacctgtccatgggagagatgaccctgggccagatcaacaacctggtggccatcgagaccaaccagctgatgtggttcctgttcctgtgccccaacctgtgggccatgcctgtgcagatcatcatgggcgtcatcctgctgtacaacctgctgggcagcagcgccctggtgggcgctgctgtgattgtgctgctggcccccatccagtacttcatcgccaccaagctggccgaggcccagaagagcaccctggactacagcacagagcggctgaagaagaccaatgagatcctgaagggcatcaagctgctgaagctgtatgcctgggagcacatcttctgcaagtctgtggaggagaccaggatgaaggagctgagcagcctgaagacctttgccctgtacaccagcctgagcatcttcatgaatgctgccatccccatcgctgctgtgctggccacctttgtgacccacgcctatgccagcggcaacaacctgaagccagctgaggcctttgccagcctgagcctcttccacatcctggtgacccccctcttcctgctgagcacagtggtgcgctttgctgtgaaggccatcatctctgtgcagaagctgaatgagttcctgctgagtgatgaaattggagatgacagctggaggactggagagagcagcctgccctttgagagctgcaagaagcacactggagtgcagcccaagaccatcaacaggaagcagcccggccgctaccacctggacagctatgagcagagcacccggcggctgcggcctgctgagacagaggacatcgccatcaaggtgaccaacggctacttctcctggggcagcggcctggccaccctgagcaacatcgacatccgcatccccaccggccagctgaccatgattgtgggccaggtgggctgcggcaagagcagcctgctgctggccatcctgggggagatgcagaccctggagggcaaggtgcactggagcaatgtgaatgaaagtgagcccagctttgaggccaccaggagcaggaaccgctacagcgtggcctatgctgcccagaagccctggctgctgaatgccaccgtggaggagaacatcaccttcggcagccccttcaacaagcagcgctacaaggctgtgacagatgcctgcagcctgcagcctgacatcgacctgctgccctttggagaccagacagaaattggagagcggggcatcaacctgagcggcggccagaggcagaggatctgtgtggcccgggccctgtaccagaacaccaacatcgtgttcctggatgaccccttcagcgccctggacatccacctgagtgaccacctgatgcaggagggcatcctgaagttcctgcaggatgacaagaggaccctggtgctggtgacccacaagctgcagtacctgacccatgctgactggatcatcgccatgaaggatggctctgtgctgcgggagggcaccctgaaggacatccagaccaaggatgtggagctgtatgagcactggaagaccctgatgaaccggcaggaccaggagctggagaaggacatggaggccgaccagaccaccctggagaggaagaccctgcggcgggccatgtacagccgggaggccaaggcccagatggaggatgaagatgaggaggaggaggaggaggaggatgaagatgacaacatgagcacagtgatgaggctgcggaccaagatgccctggaagacctgctggagatacctgaccagcggcggcttcttcctgctgatcctgatgatcttcagcaagctgctgaagcacagcgtcatcgtggccatcgactactggctggccacctggaccagcgagtacagcatcaacaacacaggcaaggctgaccagacctactacgtggccggcttcagcatcctgtgtggggccggcatcttcctgtgcctggtgaccagcctgactgtggagtggatgggcctgacagctgccaagaacctgcaccacaacctgctgaacaagatcatcctgggccccatccgcttctttgacaccacccccctgggcctcatcctgaaccgcttctctgctgacaccaacatcatcgaccagcacatcccccccaccctggagagcctgaccaggagcaccctgctgtgcctgagcgccatcggcatgatctcctatgccacccctgtgttcctggtggccctgctgcccctgggcgtggccttctacttcatccagaagtacttccgggtggccagcaaggacctgcaggagctggatgacagcacccagctgcccctgctgtgccacttcagcgagacagctgagggcctgaccaccatccgggccttcagacatgagacccgcttcaagcagaggatgctggagctgacagacaccaacaacatcgcctacctgttcctgtctgctgccaaccgctggctggaggtgaggacagactacctgggcgcctgcatcgtgctgacagccagcatcgccagcatcagcggcagcagcaacagcggcctggtgggcctgggcctgctgtatgccctgaccatcaccaactacctgaactgggtggtgaggaacctggccgacctggaggtgcagatgggcgctgtgaagaaggtgaacagcttcctgaccatggagagtgaaaattatgagggcaccatggaccccagccaggtgcctgagcactggccccaggagggggagatcaagatccatgacctgtgtgtgcgctatgagaacaacctgaagcctgtgctgaagcacgtgaaggcctacatcaagccaggccagaaggtgggcatctgtggccgcacaggcagcggcaagagcagcctgagcctggccttcttcaggatggtggacatctttgatggcaagatcgtgattgatggcatcgacatcagcaagctgcccctgcacaccctgcggagccggctgagcatcatcctgcaggaccccatcctcttcagcggcagcatccgcttcaacctggaccctgagtgcaagtgcacagatgaccggctgtgggaggccctggagatcgcccagctgaagaacatggtgaagagcctgcccggcggcctggatgctgtggtgacagaaggaggagagaacttctctgtgggccagaggcagctgttctgcctggcccgggcctttgtgaggaagagcagcatcctgatcatggatgaggccacagccagcattgacatggccacagagaacatcctgcagaaggtggtgatgacagcctttgctgacagaacagtggtgaccatcgcccaccgggtgagcagcatcatggatgctggcctggtgctggtgttcagcgagggcatcctggtggagtgtgacacagtgcccaacctgctggcccacaagaatggcctcttcagcaccctggtgatgaccaacaagtag

SEQ ID NO: 144636 - DNA, 450 bp, synthetic construct
  misc_feature 1..450: note = Description of Artificial Sequence: Synthetic coding sequence
  source 1..450: mol_type = other DNA
atgagcctgtccttctgtggcaacaacatcagcagctacaacatcaatgatggagtgctgcagaacagctgctttgtggatgccctgaacctggtgccccacgtgttcctgctcttcatcaccttccccatcctcttcatcggctggggcagccagagcagcaaggtgcagatccaccacaacacctggctgcacttccctggccacaacctgcgctggatcctgacctttgccctgctgtttgtgcacgtgtgtgaaattgctgagggcatcgtgtctgacagccggcgggagagccgccacctgcacctgttcatgcctgctgtgatgggctttgtggccaccaccaccagcatcgtgtactaccacaacatcgagaccagcaacttccccaagctgctgctgggcttcagccaccacgagagcaagagctgctaccagcacagctag

SEQ ID NO: 144637 - DNA, 4542 bp, synthetic construct
  misc_feature 1..4542: note = Description of Artificial Sequence: Synthetic coding sequence
  source 1..4542: mol_type = other DNA
atgagcctgtccttctgtggcaacaacatcagcagctacaacatcaatgatggagtgctgcagaacagctgctttgtggatgccctgaacctggtgccccacgtgttcctgctcttcatcaccttccccatcctcttcatcggctggggcagccagagcagcaaggtgcagatccaccacaacacctggctgcacttccctggccacaacctgcgctggatcctgacctttgccctgctgtttgtgcacgtgtgtgaaattgctgagggcatcgtgtctgacagccggcgggagagccgccacctgcacctgttcatgcctgctgtgatgggctttgtggccaccaccaccagcatcgtgtactaccacaacatcgagaccagcaacttccccaagctgctgctggccctcttcctgtactgggtgatggccttcatcaccaagaccatcaagctggtgaagtactgccagagcggcctggacatcagcaacctgcgcttctgcatcaccggcatgatggtgatcctgaatggcctgctgatggctgtggagatcaacgtcatccgggtgagaagatatgtgttcttcatgaacccccagaaggtgaagcccccagaggacctgcaggacctgggcgtgcgcttcctgcagccctttgtgaacctgctgagcaaggccacctactggtggatgaacaccctcatcatcagcgcccacaagaagcccatcgacctgaaggccatcggcaagctgcccatcgccatgagagctgtgaccaactacgtgtgcctgaaggatgcctatgaggagcagaagaagaaggtggccgaccaccccaacagaacacccagcatctggctggccatgtaccgggccttcggccggcccatcctgctgagcagcaccttccgctacctggccgacctgctgggctttgctggccccctgtgcatctctggaattgtgcagagggtgaatgagacccagaatggcaccaacaacaccaccggcatcagcgagaccctgagcagcaaggagttcctggagaatgcctacgtgctggccgtgctgctcttcctggccctgatcctgcagaggaccttcctgcaggccagctactacgtgaccattgaaacaggcatcaacctgcggggggccctgctggccatgatctacaacaagatcctgcggctgagcaccagcaacctgtccatgggagagatgaccctgggccagatcaacaacctggtggccatcgagaccaaccagctgatgtggttcctgttcctgtgccccaacctgtgggccatgcctgtgcagatcatcatgggcgtcatcctgctgtacaacctgctgggcagcagcgccctggtgggcgctgctgtgattgtgctgctggcccccatccagtacttcatcgccaccaagctggccgaggcccagaagagcaccctggactacagcacagagcggctgaagaagaccaatgagatcctgaagggcatcaagctgctgaagctgtatgcctgggagcacatcttctgcaagtctgtggaggagaccaggatgaaggagctgagcagcctgaagacctttgccctgtacaccagcctgagcatcttcatgaatgctgccatccccatcgctgctgtgctggccacctttgtgacccacgcctatgccagcggcaacaacctgaagccagctgaggcctttgccagcctgagcctcttccacatcctggtgacccccctcttcctgctgagcacagtggtgcgctttgctgtgaaggccatcatctctgtgcagaagctgaatgagttcctgctgagtgatgaaattggagatgacagctggaggactggagagagcagcctgccctttgagagctgcaagaagcacactggagtggtgaccaacggctacttctcctggggcagcggcctggccaccctgagcaacatcgacatccgcatccccaccggccagctgaccatgattgtgggccaggtgggctgcggcaagagcagcctgctgctggccatcctgggggagatgcagaccctggagggcaaggtgcactggagcaatgtgaatgaaagtgagcccagctttgaggccaccaggagcaggaaccgctacagcgtggcctatgctgcccagaagccctggctgctgaatgccaccgtggaggagaacatcaccttcggcagccccttcaacaagcagcgctacaaggctgtgacagatgcctgcagcctgcagcctgacatcgacctgctgccctttggagaccagacagaaattggagagcggggcatcaacctgagcggcggccagaggcagaggatctgtgtggcccgggccctgtaccagaacaccaacatcgtgttcctggatgaccccttcagcgccctggacatccacctgagtgaccacctgatgcaggagggcatcctgaagttcctgcaggatgacaagaggaccctggtgctggtgacccacaagctgcagtacctgacccatgctgactggatcatcgccatgaaggatggctctgtgctgcgggagggcaccctgaaggacatccagaccaaggatgtggagctgtatgagcactggaagaccctgatgaaccggcaggaccaggagctggagaaggacatggaggccgaccagaccaccctggagaggaagaccctgcggcgggccatgtacagccgggaggccaaggcccagatggaggatgaagatgaggaggaggaggaggaggaggatgaagatgacaacatgagcacagtgatgaggctgcggaccaagatgccctggaagacctgctggagatacctgaccagcggcggcttcttcctgctgatcctgatgatcttcagcaagctgctgaagcacagcgtcatcgtggccatcgactactggctggccacctggaccagcgagtacagcatcaacaacacaggcaaggctgaccagacctactacgtggccggcttcagcatcctgtgtggggccggcatcttcctgtgcctggtgaccagcctgactgtggagtggatgggcctgacagctgccaagaacctgcaccacaacctgctgaacaagatcatcctgggccccatccgcttctttgacaccacccccctgggcctcatcctgaaccgcttctctgctgacaccaacatcatcgaccagcacatcccccccaccctggagagcctgaccaggagcaccctgctgtgcctgagcgccatcggcatgatctcctatgccacccctgtgttcctggtggccctgctgcccctgggcgtggccttctacttcatccagaagtacttccgggtggccagcaaggacctgcaggagctggatgacagcacccagctgcccctgctgtgccacttcagcgagacagctgagggcctgaccaccatccgggccttcagacatgagacccgcttcaagcagaggatgctggagctgacagacaccaacaacatcgcctacctgttcctgtctgctgccaaccgctggctggaggtgaggacagactacctgggcgcctgcatcgtgctgacagccagcatcgccagcatcagcggcagcagcaacagcggcctggtgggcctgggcctgctgtatgccctgaccatcaccaactacctgaactgggtggtgaggaacctggccgacctggaggtgcagatgggcgctgtgaagaaggtgaacagcttcctgaccatggagagtgaaaattatgagggcaccatggaccccagccaggtgcctgagcactggccccaggagggggagatcaagatccatgacctgtgtgtgcgctatgagaacaacctgaagcctgtgctgaagcacgtgaaggcctacatcaagccaggccagaaggtgggcatctgtggccgcacaggcagcggcaagagcagcctgagcctggccttcttcaggatggtggacatctttgatggcaagatcgtgattgatggcatcgacatcagcaagctgcccctgcacaccctgcggagccggctgagcatcatcctgcaggaccccatcctcttcagcggcagcatccgcttcaacctggaccctgagtgcaagtgcacagatgaccggctgtgggaggccctggagatcgcccagctgaagaacatggtgaagagcctgcccggcggcctggatgctgtggtgacagaaggaggagagaacttctctgtgggccagaggcagctgttctgcctggcccgggcctttgtgaggaagagcagcatcctgatcatggatgaggccacagccagcattgacatggccacagagaacatcctgcagaaggtggtgatgacagcctttgctgacagaacagtggtgaccatcgcccaccgggtgagcagcatcatggatgctggcctggtgctggtgttcagcgagggcatcctggtggagtgtgacacagtgcccaacctgctggcccacaagaatggcctcttcagcaccctggtgatgaccaacaagtag

SEQ ID NO: 144638 - DNA, 1386 bp, synthetic construct
  misc_feature 1..1386: note = Description of Artificial Sequence: Synthetic coding sequence
  source 1..1386: mol_type = other DNA
atgcagagggtgaacatgatcatggccgagagccctggcctcatcaccatctgcctgctgggctacctgctgtctgcagaatgtactgtgttcctggaccatgaaaatgccaacaagatcctgaaccggcccaagcgctacaacagcggcaagctggaggagtttgtgcagggcaacctggagcgggagtgcatggaggagaagtgcagctttgaggaggcccgggaggtgtttgaaaatacagagaggaccacagagttctggaagcagtatgtggatggagaccagtgtgagagcaacccctgcctgaatggaggcagctgcaaggatgacatcaacagctatgagtgctggtgcccctttggatttgagggcaagaactgtgagctggatgtgacctgcaacatcaagaatggccgctgtgagcagttctgcaagaacagcgctgacaacaaggtggtgtgcagctgcacagagggctaccgcctggccgagaaccagaagagctgtgagcctgctgtgcccttcccctgtggccgggtgtctgtgtcccagaccagcaagctgaccagggctgagaccgtcttcccagatgtggactatgtgaacagcacagaagctgagaccatcctggacaacatcacccagagcacccagagcttcaatgacttcaccagggtggtgggcggagaagatgccaagccaggccagttcccctggcaggtggtgctgaatggcaaggtggatgccttctgtggcggcagcatcgtgaatgagaagtggatcgtgacagctgcccactgtgtggagactggagtgaagatcaccgtggtggccggggagcacaacatcgaggagacagagcacacagagcagaagagaaatgtcatccgcatcatcccccaccacaactacaatgctgccatcaacaagtacaaccacgacatcgccctgctggagctggatgagcccctggtgctgaacagctatgtgacccccatctgcatcgctgacaaggagtacaccaacatcttcctgaagtttggcagcggctacgtgtctggctggggccgggtcttccacaagggccgcagcgccctggtgctgcagtacctgcgggtgcccctggtggaccgggccacctgcctgcggagcaccaagttcaccatctacaacaacatgttctgtgccggcttccacgagggcggccgggacagctgccagggcgacagcggcggcccccacgtgacagaggtggagggcaccagcttcctgaccggcatcatctcctggggcgaggagtgtgccatgaagggcaagtatggcatctacaccaaggtgagccgctacgtgaactggatcaaggagaagaccaagctgacctag

SEQ ID NO: 144639 - DNA, 684 bp, synthetic construct
  misc_feature 1..684: note = Description of Artificial Sequence: Synthetic coding sequence
  source 1..684: mol_type = other DNA
atggatggccgcctgaggaacccagaccagagcctgacagaagatgtggtggcctttgctgcctctgtggcccacctgtacagcaacctgaccaagcccctgctggatgtggccgtgaccagctacaccctgctgcgggccgcccggagcagaggagctggaacagcctggcccagcgccatcgccggcctggtggtgttcctgacagccaacgtgctgcgggccttcagccccaagtttggagagctggtggccgaggaggcccggaggaaaggagagctgcgctacatgcacagccgggtggtggccaacagcgaggagatcgccttctatggaggccacgaggtggagctggccctgctgcagaggagctaccaggacctggccagccagatcaacctgatcctgctggagcggctgtggtacgtgatgctggagcagttcctgatgaagtatgtgtggagcgccagcggcctgctgatggtggccgtgcccatcatcacagccaccggctacagcgagagcggggagacccagggcagcaagaggatccaggcccggggcctgagccccatccccctgggcgctgagctgacccgggcccagctgagccagcctgctgcccacttctgctgccggggccaccggggccctgctgccagcctggatgccttccggggctag

SEQ ID NO: 144640 - DNA, 672 bp, synthetic construct
  misc_feature 1..672: note = Description of Artificial Sequence: Synthetic coding sequence
  source 1..672: mol_type = other DNA
tgactcttcagcacagtggccgcccccttctacctgcctgccagctctgtgggcggcttccacctgttcatcgtggccagcacagatgctgaggccgtgaagaaggccgccctggagaagaaggaggaggagctggtgtctgagaggacagaggccttcaccatcgccaggaacctgctgacagctgctgctgatgccatcgagcgcatcatgagcagctacaaggaggtgacagagctggccggctacacagcccgggtgcatgagatgttccaggtgtttgaagatgtgcagcgctgccacttcaagaggccccgggagctggaggatgcccaggccggcagcggcaccatcggccgctctggagtgcgggtggagggccccctgaagatccggggccaggtggtggatgtggagcagggcatcatctgtgagaacatccccatcgtgaccccatctggagaggtggtggtggccagcctgaacatccgggtggaggagggcatgcacctgctgatcaccggccccaacggctgcggcaagagcagcctcttccgcatcctgggcggcctgtggcccacctatggaggagtgctgtacaagcccccaccccagaggatgttctacatcccccagaggccctacatgtctgtgggcagcctgcgggactag

SEQ ID NO: 144641 - DNA, 2223 bp, synthetic construct
  misc_feature 1..2223: note = Description of Artificial Sequence: Synthetic coding sequence
  source 1..2223: mol_type = other DNA
atgacccacatgctgaatgctgctgctgacagagtgaagtggaccaggagcagcgctgccaagagagctgcctgcctggtggccgccgcctatgccctgaagaccctgtaccccatcatcggcaagaggctgaagcagagcggccacggcaagaagaaggctgctgcctacccagctgctgaaaatacagagatcctgcactgcacagagaccatctgtgagaagcccagccctggggtgaatgctgacttcttcaagcagctgctggagctgaggaagatcctcttccccaagctggtgaccacagagaccggctggctgtgcctgcacagcgtggccctgatcagcaggaccttcctgagcatctacgtggccggcctggatggcaagatcgtgaagagcatcgtggagaagaagcccaggaccttcatcatcaagctgatcaagtggctgatgattgccatcccagccacctttgtgaacagcgccatccgctacctggagtgcaagctggccctggccttccgcacccggctggtggaccacgcctatgagacctacttcaccaaccagacctactacaaggtgatcaacatggatggccgcctggccaacccagaccagagcctgacagaggacatcatgatgttcagccagagcgtggcccacctgtacagcaacctgaccaagcccatcctggatgtgatgctgaccagctacaccctcatccagacagccaccagcagaggagccagccccatcggccccaccctgctggccggcctggtggtgtatgccacagccaaggtgctgaaggcctgcagccccaagtttgggaagctggtggccgaggaggcccacaggaagggctacctgcgctacgtgcacagccgcatcatcgccaacgtggaggagatcgccttctaccggggccacaaggtggagatgaagcagctgcagaagagctacaaggccctggccgaccagatgaacctgatcctgagcaagaggctgtggtacatcatgattgagcagttcctgatgaagtatgtgtggagcagcagcggcctcatcatggtggccatccccatcatcacagccaccggctttgctgatggagaagatggccagaagcaggtgatggtgtctgagaggacagaggccttcaccacagccaggaacctgctggccagcggggctgatgccatcgagcgcatcatgagcagctacaaggaggtgacagagctggccggctacacagcccgggtgtacaacatgttctgggtgtttgatgaggtgaagaggggcatctacaagaggacagctgtgatccaggagagcgagagccacagcaagaatggagccaaggtggagctgcccctgagtgacaccctggccatcaagggcaaggtgattgatgtggaccacggcatcatctgtgaaaatgtgcccatcatcaccccagctggggaggtggtggccagccggctgaacttcaaggtggaggagggcatgcacctgctgatcaccggccccaacggctgcggcaagagcagcctcttccgcatcctgagcggcctgtggcctgtgtatgaaggagtgctgtacaagcccccaccccagcacatgttctacatcccccagaggccctacatgagcctgggcagcctgcgggaccaggtgatctacccagacagcgtggatgacatgcatgacaagggctacacagaccaggacctggagcgcatcctgcacaacgtgcacctgtaccacatcgtgcagcgggagggcggctgggatgctgtgatggactggaaggatgtgctgagcggcggggagaagcagaggatgggcatggccaggatgttctaccacaagcccaagtatgccctgctggatgagtgcaccagcgctgtgtccattgatgtggagggcaagatcttccaggccgccaagggggccggcatcagcctgctgagcatcacccaccggcccagcctgtggaagtaccacacccacctgctgcagtttgatggagagggcggctggaggtttgagcagctggacacagccatccggctgaccctgtctgaggagaagcagaagctggagagccagctggccggcatccccaagatgcagcagaggctgaatgagctgtgcaagatcctgggggaggacagcgtgctgaagaccatcaagaatgaagatgagaccagctag

SEQ ID NO: 144642 - DNA, 711 bp, synthetic construct
  misc_feature 1..711: note = Description of Artificial Sequence: Synthetic coding sequence
  source 1..711: mol_type = other DNA
atggccgccttcagcaagtacctgacagccaggaacagcagcctggccggggccgccttcctgctgctgtgcctgctgcacaagagaagaagagccctgggcctgcacggcaagaagagcggcaagccacccctgcagaacaatgagaaggagggcaagaaggagagagctgtggtggacaaggtgttcttcagccgcctcatccagatcctgaagatcatggtgcccaggaccttctgcaaggagaccggctacctggtgctgattgctgtgatgctggtgtccaggacctactgtgatgtgtggatgatccagaatggcaccctcatcgagagcggcatcatcggccgcagcaggaaggacttcaagcgctacctgctgaacttcatcgccgccatgcccctcatcagcctggtgaacaacttcctgaagtatggcctgaatgagctgaagctgtgcttccgggtgcggctgaccaagtacctgtatgaggagtacctgcaggccttcacctactacaagatgggcaacctggacaaccgcatcgccaacccagaccagctgctgacccaggatgtggagaagttctgcaacagcgtggtggacctgtacagcaacctgagcaagcccttcctggacatcgtgctgtacatcttcaagctgaccagcgccatcggggcccaggtgctgggcaagatcctgtggcactag

SEQ ID NO: 144643 - DNA, 1980 bp, synthetic construct
  misc_feature 1..1980: note = Description of Artificial Sequence: Synthetic coding sequence
  source 1..1980: mol_type = other DNA
atggccgccttcagcaagtacctgacagccaggaacagcagcctggccggggccgccttcctgctgctgtgcctgctgcacaagagaagaagagccctgggcctgcacggcaagaagagcggcaagccacccctgcagaacaatgagaaggagggcaagaaggagagagctgtggtggacaaggtgttcttcagccgcctcatccagatcctgaagatcatggtgcccaggaccttctgcaaggagaccggctacctggtgctgattgctgtgatgctggtgtccaggacctactgtgatgtgtggatgatccagaatggcaccctcatcgagagcggcatcatcggccgcagcaggaaggacttcaagcgctacctgctgaacttcatcgccgccatgcccctcatcagcctggtgaacaacttcctgaagtatggcctgaatgagctgaagctgtgcttccgggtgcggctgaccaagtacctgtatgaggagtacctgcaggccttcacctactacaagatgggcaacctggacaaccgcatcgccaacccagaccagctgctgacccaggatgtggagaagttctgcaacagcgtggtggacctgtacagcaacctgagcaagcccttcctggacatcgtgctgtacatcttcaagctgaccagcgccatcggggcccagggccctgcctccatgatggcctacctggtggtgtctggcctcttcctgacccggctgcggcggcccatcggcaagatgaccatcacagagcagaagtatgaaggagagtaccgctacgtgaacagccgcctcatcaccaacagcgaggagatcgccttctacaatggaaacaagcgggagaagcagacagtgcacagcgtcttcaggaagctggtggagcacctgcacaacttcatcctcttccgcttctccatgggcttcatcgacagcatcatcgccaagtacctggccaccgtggtgggctacctggtggtgtcccggcccttcctggacctgagccaccccaggcacctgaagagcacccacagcgagctgctggaggactactaccagagcggccgcatgctgctgaggatgagccaggccctgggccgcatcgtgctggccggccgggagatgacccggctggccggcttcaccgcccgcatcacagagctgatgcaggtgctgaaggacctgaaccacggcaagtatgaaagaaccatggtgtcccagcaggagaagggcatcgagggcgtgcaggtgatccccctcatccctggggccggggagatcatcatcgctgacaacatcatcaagtttgaccacgtgcccctggccaccccaaatggagatgtgctgatccgggacctgaactttgaggtgcgcagcggggccaacgtgctgatctgtggccccaacggctgcggcaagagcagcctcttccgggtgctgggggagctgtggcccctgtttggaggccgcctgaccaagccagagcggggcaagctgttctacgtgccccagaggccctacatgaccctgggcaccctgcgggaccaggtgatctacccagatggccgggaggaccagaagaggaagggcatcagtgacctggtgctgaaggagtacctggacaacgtgcagctgggccacatcctggagcgggagggcggctgggacagcgtgcaggactggatggatgtgctgagcggcggggagaagcagaggatggccatggcccggctcttctaccacaagccccagtttgccatcctggatgagtgcaccagcgctgtgtctgtggatgtggagggctacatctacagccactgcaggaaggtgggcatcaccctcttcaccgtgagccacaggaagagcctgtggaagcaccacgagtactacctgcacatggatggccggggcaactatgagttcaagcagatcacagaggacacagtggagtttggcagctag

SEQ ID NO: 144644 - DNA, 1650 bp, synthetic construct
  misc_feature 1..1650: note = Description of Artificial Sequence: Synthetic coding sequence
  source 1..1650: mol_type = other DNA
atggccgccttcagcaagtacctgacagccaggaacagcagcctggccggggccgccttcctgctgctgtgcctgctgcacaagagaagaagagccctgggcctgcacggcaagaagagcggcaagccacccctgcagaacaatgagaaggagggcaagaaggagagagctgtggtggacaaggtgttcttcagccgcctcatccagatcctgaagatcatggtgcccaggaccttctgcaaggagaccggctacctggtgctgattgctgtgatgctggtgtccaggacctactgtgatgtgtggatgatccagaatggcaccctcatcgagagcggcatcatcggccgcagcaggaaggacttcaagcgctacctgctgaacttcatcgccgccatgcccctcatcagcctggtgaacaacttcctgaagtatggcctgaatgagctgaagctgtgcttccgggtgcggctgaccaagtacctgtatgaggagtacctgcaggccttcacctactacaagatgggcaacctggacaaccgcatcgccaacccagaccagctgctgacccaggatgtggagaagttctgcaacagcgtggtggacctgtacagcaacctgagcaagcccttcctggacatcgtgctgtacatcttcaagctgaccagcgccatcggggcccagggccctgcctccatgatggcctacctggtggtgtctggcctcttcctgacccggctgcggcggcccatcggcaagatgaccatcacagagcagaagtatgaaggagagtaccgctacgtgaacagccgcctcatcaccaacagcttcaccgcccgcatcacagagctgatgcaggtgctgaaggacctgaaccacggcaagtatgaaagaaccatggtgtcccagcaggagaagggcatcgagggcgtgcaggtgatccccctcatccctggggccggggagatcatcatcgctgacaacatcatcaagtttgaccacgtgcccctggccaccccaaatggagatgtgctgatccgggacctgaactttgaggtgcgcagcggggccaacgtgctgatctgtggccccaacggctgcggcaagagcagcctcttccgggtgctgggggagctgtggcccctgtttggaggccgcctgaccaagccagagcggggcaagctgttctacgtgccccagaggccctacatgaccctgggcaccctgcgggaccaggtgatctacccagatggccgggaggaccagaagaggaagggcatcagtgacctggtgctgaaggagtacctggacaacgtgcagctgggccacatcctggagcgggagggcggctgggacagcgtgcaggactggatggatgtgctgagcggcggggagaagcagaggatggccatggcccggctcttctaccacaagccccagtttgccatcctggatgagtgcaccagcgctgtgtctgtggatgtggagggctacatctacagccactgcaggaaggtgggcatcaccctcttcaccgtgagccacaggaagagcctgtggaagcaccacgagtactacctgcacatggatggccggggcaactatgagttcaagcagatcacagaggacacagtggagtttggcagctag

SEQ ID NO: 144645 - DNA, 2052 bp, synthetic construct
  misc_feature 1..2052: note = Description of Artificial Sequence: Synthetic coding sequence
  source 1..2052: mol_type = other DNA
atggccgccttcagcaagtacctgacagccaggaacagcagcctggccggggccgccttcctgctgctgtgcctgctgcacaagagaagaagagccctgggcctgcacggctacttcatggagacctggagggagaagagtgatgaggtgatgggagagctgacagaccacgtgacccactgcaagaagagcggcaagccacccctgcagaacaatgagaaggagggcaagaaggagagagctgtggtggacaaggtgttcttcagccgcctcatccagatcctgaagatcatggtgcccaggaccttctgcaaggagaccggctacctggtgctgattgctgtgatgctggtgtccaggacctactgtgatgtgtggatgatccagaatggcaccctcatcgagagcggcatcatcggccgcagcaggaaggacttcaagcgctacctgctgaacttcatcgccgccatgcccctcatcagcctggtgaacaacttcctgaagtatggcctgaatgagctgaagctgtgcttccgggtgcggctgaccaagtacctgtatgaggagtacctgcaggccttcacctactacaagatgggcaacctggacaaccgcatcgccaacccagaccagctgctgacccaggatgtggagaagttctgcaacagcgtggtggacctgtacagcaacctgagcaagcccttcctggacatcgtgctgtacatcttcaagctgaccagcgccatcggggcccagggccctgcctccatgatggcctacctggtggtgtctggcctcttcctgacccggctgcggcggcccatcggcaagatgaccatcacagagcagaagtatgaaggagagtaccgctacgtgaacagccgcctcatcaccaacagcgaggagatcgccttctacaatggaaacaagcgggagaagcagacagtgcacagcgtcttcaggaagctggtggagcacctgcacaacttcatcctcttccgcttctccatgggcttcatcgacagcatcatcgccaagtacctggccaccgtggtgggctacctggtggtgtcccggcccttcctggacctgagccaccccaggcacctgaagagcacccacagcgagctgctggaggactactaccagagcggccgcatgctgctgaggatgagccaggccctgggccgcatcgtgctggccggccgggagatgacccggctggccggcttcaccgcccgcatcacagagctgatgcaggtgctgaaggacctgaaccacggcaagtatgaaagaaccatggtgtcccagcaggagaagggcatcgagggcgtgcaggtgatccccctcatccctggggccggggagatcatcatcgctgacaacatcatcaagtttgaccacgtgcccctggccaccccaaatggagatgtgctgatccgggacctgaactttgaggtgcgcagcggggccaacgtgctgatctgtggccccaacggctgcggcaagagcagcctcttccgggtgctgggggagctgtggcccctgtttggaggccgcctgaccaagccagagcggggcaagctgttctacgtgccccagaggccctacatgaccctgggcaccctgcgggaccaggtgatctacccagatggccgggaggaccagaagaggaagggcatcagtgacctggtgctgaaggagtacctggacaacgtgcagctgggccacatcctggagcgggagggcggctgggacagcgtgcaggactggatggatgtgctgagcggcggggagaagcagaggatggccatggcccggctcttctaccacaagccccagtttgccatcctggatgagtgcaccagcgctgtgtctgtggatgtggagggctacatctacagccactgcaggaaggtgggcatcaccctcttcaccgtgagccacaggaagagcctgtggaagcaccacgagtactacctgcacatggatggccggggcaactatgagttcaagcagatcacagaggacacagtggagtttggcagctag

SEQ ID NO: 144646 - DNA, 1761 bp, synthetic construct
  misc_feature 1..1761: note = Description of Artificial Sequence: Synthetic coding sequence
  source 1..1761: mol_type = other DNA
atggtgcccaggaccttctgcaaggagaccggctacctggtgctgattgctgtgatgctggtgtccaggacctactgtgatgtgtggatgatccagaatggcaccctgattgaaagtggcatcatcggccgcagcaggaaggacttcaagcgctacctgctgaacttcatcgccgccatgcccctcatcagcctggtgaacaacttcctgaagtatggcctgaatgagctgaagctgtgcttccgggtgcggctgaccaagtacctgtatgaggagtacctgcaggccttcacctactacaagatgggcaacctggacaacagaattgccaacccagaccagctgctgacccaggatgtggagaagttctgcaacagcgtggtggacctgtacagcaacctgagcaagcccttcctggacatcgtgctgtacatcttcaagctgaccagcgccatcggggcccagggccctgcctccatgatggcctacctggtggtgtctggcctcttcctgacccggctgcggcggcccatcggcaagatgaccatcacagagcagaagtatgaaggagagtaccgctacgtgaacagccgcctcatcaccaacagcgaggagatcgccttctacaacggcaacaagcgggagaagcagacagtgcacagcgtcttcaggaagctggtggagcacctgcacaacttcatcctcttccgcttctccatgggcttcatcgacagcatcatcgccaagtacctggccaccgtggtgggctacctggtggtgtcccggcccttcctggacctgagccaccccaggcacctgaagagcacccacagcgagctgctggaggactactaccagagcggccgcatgctgctgaggatgagccaggccctgggcagaattgtgctggccggccgggagatgacccggctggccggcttcaccgcccgcatcacagagctgatgcaggtgctgaaggacctgaaccacggcaagtatgaaagaaccatggtgtcccagcaggagaagggcattgaaggagtgcaggtgatccccctcatccctggagctggggagatcatcatcgctgacaacatcatcaagtttgaccacgtgcccctggccaccccaaatggagatgtgctgatccgggacctgaactttgaggtgcgcagcggggccaacgtgctgatctgtggccccaacggctgtgggaagagcagcctcttccgggtgctgggggagctgtggcccctgtttggaggccgcctgaccaagccagagcggggcaagctgttctacgtgccccagaggccctacatgaccctgggcaccctgcgggaccaggtgatctacccagatggaagagaggaccagaagaggaagggcatcagtgacctggtgctgaaggagtacctggacaacgtgcagctgggccacatcctggagcgggagggcggctgggacagcgtgcaggactggatggatgtgctgtctggaggagagaagcagaggatggccatggcccggctcttctaccacaagccccagtttgccatcctggatgaatgtaccagcgctgtgtctgtggatgtggagggctacatctacagccactgcaggaaggtgggcatcaccctcttcaccgtgagccacaggaagagcctgtggaagcaccacgagtactacctgcacatggatggccggggcaactatgagttcaagcagatcacagaagatactgtggagtttggcagctag

SEQ ID NO: 144647 - DNA, 1467 bp, synthetic construct
  misc_feature 1..1467: note = Description of Artificial Sequence: Synthetic coding sequence
  source 1..1467: mol_type = other DNA
atgctgattgtgctgaacagcaccctgaagagctttgaccagttcacctgcaacctgctgtatgtgtcctggaggaaggacctgacagagcacctgcaccggctgtacttccggggccgggcctactacaccctgaatgtgctgagagatgacatcgacaacccagaccagaggatcagccaggatgtggagcgcttctgccggcagctgagctccatggccagcaagctgatcatcagccccttcaccctggtgtactacacctaccagtgcttccagagcacaggctggctgggccctgtgtccatcttcggctacttcatcctgggcaccgtggtgaacaagaccctgatgggccccatcgtgatgaagctggtgcaccaggagaagctggagggggacttccgggccggccacgtggagcacatgaggacagaccggcggctgcagaggctgctgcagacccagcgggagctgatgagcaaggagctgtggctgtacatcggcatcaacacctttgactacctgggcagcatcctgtcctatgtggtgattgccatccccatcttctctggagtgtatggagacctgagccctgctgagctgagcaccctggtgtccaagaatgcctttgtgtgcatctacctgatcagctgcttcacccagctgattgacctgagcaccaccctgagtgatgtggccggctacacccaccgcatcggccagctgcgggagaccctgctggacatgagcctgaagagccaggactgtgagatcctgggggagagcgagtggggcctggacaccccacctggctggccagctgctgagcctgctgacacagccttcctgctggagcgggtgtccatcagcgcccccagcagtgacaagcccctcatcaaggacctgagcctgaagatcagcgagggccagagcctgctgatcaccggcaacacaggaacaggcaagaccagcctgctgcgggtgctgggcggcctgtggaccagcacccggggctctgtgcagatgctgacagactttggcccccacggcgtgctcttcctgccccagaagcccttcttcacagatggcaccctgcgggagcaggtgatctaccccctgaaggaggtgtacccagattctggcagcgcagatgatgagcgcatcctgcgcttcctggagctggccggcctgagcaacctggtggccaggacagagggcctggaccagcaggtggactggaactggtatgatgtgctgagccctggagagatgcagaggctgagctttgcccggctcttctacctgcagcccaagtatgctgtgctggatgaggccaccagcgccctgacagaggaggtggagagcgagctgtacagaattggccagcagctgggcatgaccttcatctctgtgggccaccggcagagcctggagaaggtgcctgtgctgaccaggatggcctag

SEQ ID NO: 144648 - DNA, 1821 bp, synthetic construct
  misc_feature 1..1821: note = Description of Artificial Sequence: Synthetic coding sequence
  source 1..1821: mol_type = other DNA
atggctgtggccggccctgcccctggggccggggcccggccccggctggacctgcagttcctgcagcgcttcctgcagatcctgaaggtgctcttccccagctggagcagccagaatgccctgatgttcctgaccctgctgtgcctgaccctgctggagcagtttgtgatctaccaggtgggcctcatccccagccagtactacggcgtgctgggcaacaaggacctggagggcttcaagaccctgaccttcctggccgtgatgctgattgtgctgaacagcaccctgaagagctttgaccagttcacctgcaacctgctgtatgtgtcctggaggaaggacctgacagagcacctgcaccggctgtacttccggggccgggcctactacaccctgaatgtgctgagagatgacatcgacaacccagaccagaggatcagccaggatgtggagcgcttctgccggcagctgagctccatggccagcaagctgatcatcagccccttcaccctggtgtactacacctaccagtgcttccagagcacaggctggctgggccctgtgtccatcttcggctacttcatcctgggcaccgtggtgaacaagaccctgatgggccccatcgtgatgaagctggtgcaccaggagaagctggagggggacttccgcttcaagcacatgcagatccgggtgaatgctgagcctgctgccttctacagagctggccacgtggagcacatgaggacagaccggcggctgcagaggctgctgcagacccagcgggagctgatgagcaaggagctgtggctgtacatcggcatcaacacctttgactacctgggcagcatcctgtcctatgtggtgattgccatccccatcttctctggagtgtatggagacctgagccctgctgagctgagcaccctggtgtccaagaatgcctttgtgtgcatctacctgatcagctgcttcacccagctgattgacctgagcaccaccctgagtgatgtggccggctacacccaccgcatcggccagctgcgggagaccctgctggacatgagcctgaagagccaggactgtgagatcctgggggagagcgagtggggcctggacaccccacctggctggccagctgctgagcctgctgacacagccttcctgctggagcgggtgtccatcagcgcccccagcagtgacaagcccctcatcaaggacctgagcctgaagatcagcgagggccagagcctgctgatcaccggcaacacaggaacaggcaagaccagcctgctgcgggtgctgggcggcctgtggaccagcacccggggctctgtgcagatgctgacagactttggcccccacggcgtgctcttcctgccccagaagcccttcttcacagatggcaccctgcgggagcaggtgatctaccccctgaaggaggtgtacccagattctggcagcgcagatgatgagcgcatcctgcgcttcctggagctggccggcctgagcaacctggtggccaggacagagggcctggaccagcaggtggactggaactggtatgatgtgctgagccctggagagatgcagaggctgagctttgcccggctcttctacctgcagcccaagtatgctgtgctggatgaggccaccagcgccctgacagaggaggtggagagcgagctgtacagaattggccagcagctgggcatgaccttcatctctgtgggccaccggcagagcctggagaagttccacagcctggtgctgaagctgtgtggcggcggccgctgggagctgatgaggatcaaggtggagtag

SEQ ID NO: 144649 - DNA, 297 bp, synthetic construct
  misc_feature 1..297: note = Description of Artificial Sequence: Synthetic coding sequence
  source 1..297: mol_type = other DNA
atgaggagcctgctgctgagcacagtgggcatcaacacctttgactacctgggcagcatcctgtcctatgtggtgattgccatccccatcttcagcggcgtgtatggagacctgagccctgctgagctgagcaccctggtgtccaagaatgcctttgtgtgcatctacctgatcagctgcttcacccagctgattgacctgagcaccaccctgagtgatgtggccggctacacccacagaattggccagctgcgggagaccctgctggacatgagcctgaagagccaggactgctag

SEQ ID NO: 144650 - DNA, 1800 bp, synthetic construct
  misc_feature 1..1800: note = Description of Artificial Sequence: Synthetic coding sequence
  source 1..1800: mol_type = other DNA
atggctgacaagctgacccgcatcgccatcgtgaaccacgacaagtgcaagcccaagaagtgccggcaggagtgcaagaagagctgccctgtggtgaggatgggcaagctgtgcatcgaggtgaccccccagagcaagatcgcctggatcagcgagaccctgtgcatcggctgcggcatctgcatcaagaagtgcccctttggagccctgagcatcgtgaacctgcccagcaacctggagaaggagaccacccaccgctactgtgccaatgccttcaagctgcaccggctgcccatccccaggcctggagaggtgctgggcctggtgggcaccaacggcatcggcaagagcacagccctgaagatcctggccggcaagcagaagcccaacctgggcaagtatgatgatcctccagactggcaggagatcctgacctacttccggggcagcgagctgcagaactacttcaccaagatcctggaggatgacctgaaggccatcatcaagccccagtatgtggaccagatccccaaggccgccaagggcaccgtgggcagcatcctggacaggaaggatgagaccaagacccaggccatcgtgtgccagcagctggacctgacccacctgaaggagagaaatgtggaggacctgagcggcggggagctgcagagatttgcctgtgctgtggtgtgcatccagaaggctgacatcttcatgtttgatgagcccagcagctacctggatgtgaagcagaggctgaaggccgccatcaccatccgcagcctcatcaacccagaccgctacatcatcgtggtggagcatgacctgtctgtgctggactacctgagtgacttcatctgctgcctgtatggagtgcccagcgcctacggcgtggtgaccatgcccttctctgtgcgggagggcatcaacatcttcctggatggctacgtgcccacagagaacctgcgcttcagagatgccagcctggtgttcaaggtggccgagacagccaatgaggaggaggtgaagaagatgtgcatgtacaagtacccaggcatgaagaagaagatgggagaatttgagctggccatcgtggccggggagttcacagacagcgagatcatggtgatgctgggggagaatggaacaggcaagaccaccttcatccgcatgctggccggccgcctgaagccagatgaaggaggagaggtgcctgtgctgaatgtgtcctacaagccccagaagatcagccccaagagcactggatctgtgcggcagctgctgcacgagaagatcagagatgcctacacccacccccagtttgtgacagatgtgatgaagcccctgcagatcgagaacatcatcgaccaggaggtgcagaccctgtctggaggagagctgcagagggtggccctggccctgtgcctgggcaagccagcagatgtgtacctgattgatgagcccagcgcctacctggacagcgagcagaggctgatggccgcccgggtggtgaagcgcttcatcctgcacgccaagaagacagcctttgtggtggagcatgacttcatcatggccacctacctggccgacagagtgattgtgtttgatggagtgcccagcaagaacacagtggccaacagcccccagaccctgctggccggcatgaacaagttcctgagccagctggagatcaccttcagaagagaccccaacaactaccggccccgcatcaacaagctgaacagcatcaaggatgtggagcagaagaagagcggcaactacttcttcctggatgactag

SEQ ID NO: 144651 - DNA, 633 bp, synthetic construct
  misc_feature 1..633: note = Description of Artificial Sequence: Synthetic coding sequence
  source 1..633: mol_type = other DNA
atggctgacaagctgacccgcatcgccatcgtgaaccacgacaagtgcaagcccaagaagtgccggcaggagtgcaagaagagctgccctgtggtgaggatgggcaagctgtgcatcgaggtgaccccccagagcaagatcgcctggatcagcgagaccctgtgcatcggctgcggcatctgcatcaagaagtgcccctttggagccctgagcatcgtgaacctgcccagcaacctggagaaggagaccacccaccgctactgtgccaatgccttcaagctgcaccggctgcccatccccaggcctggagaggtgctgggcctggtgggcaccaacggcatcggcaagagcacagccctgaagatcctggccggcaagcagaagcccaacctgggcaagtatgatgatcctccagactggcaggagatcctgacctacttccggggcagcgagctgcagaactacttcaccaagatcctggaggatgacctgaaggccatcatcaagccccagtatgtggaccagatccccaaggccgccaagggcaccgtgggcagcatcctggacaggaaggatgagaccaagacccaggccatcgtgtgccagcagctggacctgacccacctgaagtag

SEQ ID NO: 144652 - DNA, 2538 bp, synthetic construct
  misc_feature 1..2538: note = Description of Artificial Sequence: Synthetic coding sequence
  source 1..2538: mol_type = other DNA
atgcccaaggcccccaagcagcagcccccagagcctgagtggattggagatggagagagcaccagccccagcgacaaggtggtgaagaagggcaagaaggacaagaagatcaagaagaccttctttgaggagctggccgtggaggacaagcaggccggggaggaggagaaggtgctgaaggagaaggagcagcagcagcagcagcagcagcagcagcagaagaagaagagggacaccaggaaaggaagaaggaagaaggatgtggatgatgatggagaggagaaggagctgatggagcggctgaagaagctgtctgtgcccaccagtgatgaggaggatgaggtgcctgcccccaagccccggggcggcaagaagaccaagggcggcaatgtgtttgctgccctgatccaggaccagagcgaggaggaggaggaggaggagaagcacccccccaagccagccaagccagagaagaaccgcatcaacaaggctgtgtctgaggagcagcagcctgccctgaagggcaagaagggcaaggaggagaagagcaagggcaaggccaagccccagaacaagtttgctgccctggacaatgaggaggaggacaaggaggaggagatcatcaaggagaaggagccccccaagcagggcaaggagaaggccaagaaggccgagcagggcagcgaggaggagggggagggggaggaggaggaggaggagggcggggagagcaaggcagatgacccctatgcccacctgagcaagaaggagaagaagaagctgaagaagcagatggagtatgagcggcaggtggccagcctgaaggccgccaatgctgctgaaaatgacttctctgtgtcccaggccgagatgagcagccggcaggccatgctggagaatgccagtgacatcaagctggagaagttcagcatcagcgcccacggcaaggagctgtttgtgaatgctgacctgtacatcgtggccggccgccgctatggcctggtgggccccaacgggaagggcaagaccaccctgctgaagcacatcgccaacagagccctgagcatcccccccaacattgatgtgctgctgtgtgagcaggaggtggtggctgatgagaccccagctgtgcaggccgtgctgcgggctgacaccaagaggctgaagctgctggaggaggagcggcggctgcagggccagctggagcagggagatgacacagctgctgagcggctggagaaggtgtatgaggagctgcgggccaccggggctgctgctgctgaggccaaggcccggcgcatcctggccggcctgggctttgatcctgagatgcagaaccggcccacccagaagttcagcggcggctggaggatgagggtgtccctggcccgggccctcttcatggagcccaccctgctgatgctggatgagcccaccaaccacctggacctgaatgctgtgatctggctgaacaactacctgcagggctggaggaagaccctgctgattgtgtcccatgaccagggcttcctggatgatgtgtgcacagacatcatccacctggatgcccagaggctgcactactaccggggcaactacatgaccttcaagaagatgtaccagcagaagcagaaggagctgctgaagcagtatgagaagcaggagaagaagctgaaggagctgaaggccggcggcaagagcaccaagcaggccgagaagcagaccaaggaggccctgaccaggaagcagcagaagtgcaggaggaagaaccaggatgaggagagccaggaggcccctgagctgctgaagaggcccaaggagtacacagtgcgcttcaccttcccagaccccccacccctgagcccccctgtgctgggcctgcacggcgtgaccttcggctaccagggccagaagcccctcttcaagaacctggactttggcatcgacatggacagccgcatctgcatcgtgggccccaacggggtgggcaagagcaccctgctgctgctgctgaccgggaagctgacccccacccatggagagatgaggaagaaccaccggctgaagattggcttcttcaaccagcagtatgcagagcagctgaggatggaggagacccccacagagtacctgcagaggggcttcaacctgccctaccaggatgccaggaagtgcctgggccgcttcggcctggagagccacgcccacaccatccagatctgcaagctgagcggcggccagaaggcccgggtggtgtttgctgagctggcctgccgggagccagatgtgctgatcctggatgagcccaccaacaacctggacatcgagagcattgatgccctgggggaggccatcaatgagtacaagggagctgtgattgtggtgtcccatgatgcccggctcatcacagagaccaactgccagctgtgggtggtggaggagcagagcgtgtcccagattgatggagactttgaggactacaagcgggaggtgctggaggccctgggggaggtgatggtgtcccggccccgggagtag

SEQ ID NO: 144653 - DNA, 2424 bp, synthetic construct
  misc_feature 1..2424: note = Description of Artificial Sequence: Synthetic coding sequence
  source 1..2424: mol_type = other DNA
atgcccaaggcccccaagcagcagcccccagagcctgagtggattggagatggagagagcaccagccccagcgacaaggtggtgaagaagggcaagaaggacaagaagatcaagaagaccttctttgaggagctggccgtggaggacaagcaggccggggaggaggagaaggtgctgaaggagaaggagcagcagcagcagcagcagcagcagcagcagaagaagaagagggacaccaggaaaggaagaaggaagaaggatgtggatgatgatggagaggagaaggagctgatggagcggctgaagaagctgtctgtgcccaccagtgatgaggaggatgaggtgcctgcccccaagccccggggcggcaagaagaccaagggcggcaatgtgtttgctgccctgatccaggaccagagcgaggaggaggaggaggaggagaagcacccccccaagccagccaagccagagaagaaccgcatcaacaaggctgtgtctgaggagcagcagcctgccctgaagggcaagaagggcaaggaggagaagagcaagggcaaggccaagccccagaacaagtttgctgccctggacaatgaggaggaggacaaggaggaggagatcatcaaggagaaggagccccccaagcagggcaaggagaaggccaagaaggccgagcagatggagtatgagcggcaggtggccagcctgaaggccgccaatgctgctgaaaatgacttctctgtgtcccaggccgagatgagcagccggcaggccatgctggagaatgccagtgacatcaagctggagaagttcagcatcagcgcccacggcaaggagctgtttgtgaatgctgacctgtacatcgtggccggccgccgctatggcctggtgggccccaacgggaagggcaagaccaccctgctgaagcacatcgccaacagagccctgagcatcccccccaacattgatgtgctgctgtgtgagcaggaggtggtggctgatgagaccccagctgtgcaggccgtgctgcgggctgacaccaagaggctgaagctgctggaggaggagcggcggctgcagggccagctggagcagggagatgacacagctgctgagcggctggagaaggtgtatgaggagctgcgggccaccggggctgctgctgctgaggccaaggcccggcgcatcctggccggcctgggctttgatcctgagatgcagaaccggcccacccagaagttcagcggcggctggaggatgagggtgtccctggcccgggccctcttcatggagcccaccctgctgatgctggatgagcccaccaaccacctggacctgaatgctgtgatctggctgaacaactacctgcagggctggaggaagaccctgctgattgtgtcccatgaccagggcttcctggatgatgtgtgcacagacatcatccacctggatgcccagaggctgcactactaccggggcaactacatgaccttcaagaagatgtaccagcagaagcagaaggagctgctgaagcagtatgagaagcaggagaagaagctgaaggagctgaaggccggcggcaagagcaccaagcaggccgagaagcagaccaaggaggccctgaccaggaagcagcagaagtgcaggaggaagaaccaggatgaggagagccaggaggcccctgagctgctgaagaggcccaaggagtacacagtgcgcttcaccttcccagaccccccacccctgagcccccctgtgctgggcctgcacggcgtgaccttcggctaccagggccagaagcccctcttcaagaacctggactttggcatcgacatggacagccgcatctgcatcgtgggccccaacggggtgggcaagagcaccctgctgctgctgctgaccgggaagctgacccccacccatggagagatgaggaagaaccaccggctgaagattggcttcttcaaccagcagtatgcagagcagctgaggatggaggagacccccacagagtacctgcagaggggcttcaacctgccctaccaggatgccaggaagtgcctgggccgcttcggcctggagagccacgcccacaccatccagatctgcaagctgagcggcggccagaaggcccgggtggtgtttgctgagctggcctgccgggagccagatgtgctgatcctggatgagcccaccaacaacctggacatcgagagcattgatgccctgggggaggccatcaatgagtacaagggagctgtgattgtggtgtcccatgatgcccggctcatcacagagaccaactgccagctgtgggtggtggaggagcagagcgtgtcccagattgatggagactttgaggactacaagcgggaggtgctggaggccctgggggaggtgatggtgtcccggccccgggagtag

SEQ ID NO: 144654 - DNA, 2424 bp, synthetic construct; identical to SEQ ID NO: 144653
  misc_feature 1..2424: note = Description of Artificial Sequence: Synthetic coding sequence
  source 1..2424: mol_type = other DNA

SEQ ID NO: 144655 - DNA, 2538 bp, synthetic construct; identical to SEQ ID NO: 144652
  misc_feature 1..2538: note = Description of Artificial Sequence: Synthetic coding sequence
  source 1..2538: mol_type = other DNA

SEQ ID NO: 144656 - DNA, 717 bp, synthetic construct
  misc_feature 1..717: note = Description of Artificial Sequence: Synthetic coding sequence
  source 1..717: mol_type = other DNA
atgcccaaggcccccaagcagcagcccccagagcctgagtggattggagatggagagagcaccagccccagcgacaaggtggtgaagaagggcaagaaggacaagaagatcaagaagaccttctttgaggagctggccgtggaggacaagcaggccggggaggaggagaaggtgctgaaggagaaggagcagcagcagcagcagcagcagcagcagcagaagaagaagagggacaccaggaaaggaagaaggaagaaggatgtggatgatgatggagaggagaaggagctgatggagcggctgaagaagctgagccggggcttcaacctgccctaccaggatgccaggaagtgcctgggccgcttcggcctggagagccacgcccacaccatccagatctgcaagctgagcggcggccagaaggcccgggtggtgtttgctgagctggcctgccgggagccagatgtgctgatcctggatgagcccaccaacaacctggacatcgagagcattgatgccctgggggaggccatcaatgagtacaagggggccgtcatcgtggtgtcccatgatgcccggctcatcacagagaccaactgccagctgtgggtggtggaggagcagagcgtgtcccagattgatggagactttgaggactacaagcgggaggtgctggaggccctgggggaggtgatggtgtcccggccccgggagtag

SEQ ID NO: 144657 - DNA, 2424 bp, synthetic construct; identical to SEQ ID NO: 144653
  misc_feature 1..2424: note = Description of Artificial Sequence: Synthetic coding sequence
  source 1..2424: mol_type = other DNA

SEQ ID NO: 144658 - DNA, 717 bp, synthetic construct; identical to SEQ ID NO: 144656
  misc_feature 1..717: note = Description of Artificial Sequence: Synthetic coding sequence
  source 1..717: mol_type = other DNA

SEQ ID NO: 144659 - DNA, 1023 bp, synthetic construct
  misc_feature 1..1023: note = Description of Artificial Sequence: Synthetic coding sequence
  source 1..1023: mol_type = other DNA
atgcccaaggcccccaagcagcagcccccagagcctgagtggattggagatggagagagcaccagccccagcgacaaggtggtgaagaagggcaagaaggacaagaagatcaagaagaccttctttgaggagctggccgtggaggacaagcaggccggggaggaggagaaggtgctgaaggagaaggagcagcagcagcagcagcagcagcagcagcagcagaagaagaagagggacaccaggaagggccgcaggaagaaggatgtggatgatgatggagaggagaaggagctgatggagcggctgaagaagctgtctgtgcccaccagtgatgaagaagatgaggtgcctgcccccaagccccggggcggcaagaagaccaagggcggcaatgtgtttgctgccctgatccaggaccagagcgaggaggaggaggaggaggagaagcacccccccaagccagccaagccagagaagaaccgcatcaacaaggctgtgtctgaggagcagcagcctgccctgaagggcaagaagggcaaggaggagaagagcaagggcaaggccaagccccagaacaagtttgctgccctggacaatgaggaggaggacaaggaggaggagatcatcaaggagaaggagccccccaagcagggcaaggagaaggccaagaaggccgagcagggcagcgaggaggagggggagggggaggaggaggaggaggagggcggggagagcaaggcagatgacccctatgcccacctgagcaagaaggagaagaagaagctgaagaagcagatggagtatgaaaggcaggtggccagcctgaaggccgccaatgctgctgaaaatgacttctctgtgtcccaggccgagatgagcagccggcaggccatgctggagaatgccagtgacatcaagctggagaagttcagcatcagcgcccacggcaaggagctgtttgtgaatgctgacctgtacatcgtggccggcagaagatatggcctggtgggccccaatggatag

SEQ ID NO: 144660 - DNA, 2538 bp, synthetic construct; identical to SEQ ID NO: 144652
  misc_feature 1..2538: note = Description of Artificial Sequence: Synthetic coding sequence
  source 1..2538: mol_type = other DNA

SEQ ID NO: 144661 - DNA, 2424 bp, synthetic construct; identical to SEQ ID NO: 144653
  misc_feature 1..2424: note = Description of Artificial Sequence: Synthetic coding sequence
  source 1..2424: mol_type = other DNA

SEQ ID NO: 144662 - DNA, 2424 bp, synthetic construct; identical to SEQ ID NO: 144653
  misc_feature 1..2424: note = Description of Artificial Sequence: Synthetic coding sequence
  source 1..2424: mol_type = other DNA

SEQ ID NO: 144663 - DNA, 717 bp, synthetic construct; identical to SEQ ID NO: 144656
  misc_feature 1..717: note = Description of Artificial Sequence: Synthetic coding sequence
  source 1..717: mol_type = other DNA

SEQ ID NO: 144664 - DNA, 1023 bp, synthetic construct; identical to SEQ ID NO: 144659
  misc_feature 1..1023: note = Description of Artificial Sequence: Synthetic coding sequence
  source 1..1023: mol_type = other DNA

SEQ ID NO: 144665 - DNA, 2538 bp, synthetic construct; identical to SEQ ID NO: 144652
  misc_feature 1..2538: note = Description of Artificial Sequence: Synthetic coding sequence
  source 1..2538: mol_type = other DNA

SEQ ID NO: 144666 - DNA, 1023 bp, synthetic construct; identical to SEQ ID NO: 144659
  misc_feature 1..1023: note = Description of Artificial Sequence: Synthetic coding sequence
  source 1..1023: mol_type = other DNA

SEQ ID NO: 144667 - DNA, 2538 bp, synthetic construct; identical to SEQ ID NO: 144652
  misc_feature 1..2538: note = Description of Artificial Sequence: Synthetic coding sequence
  source 1..2538: mol_type = other DNA

SEQ ID NO: 144668 - DNA, 1023 bp, synthetic construct; identical to SEQ ID NO: 144659
  misc_feature 1..1023: note = Description of Artificial Sequence: Synthetic coding sequence
  source 1..1023: mol_type = other DNA

SEQ ID NO: 144669 - DNA, 1023 bp, synthetic construct; identical to SEQ ID NO: 144659
  misc_feature 1..1023: note = Description of Artificial Sequence: Synthetic coding sequence
  source 1..1023: mol_type = other DNA

SEQ ID NO: 144670 - DNA, 1023 bp, synthetic construct; identical to SEQ ID NO: 144659
  misc_feature 1..1023: note = Description of Artificial Sequence: Synthetic coding sequence
  source 1..1023: mol_type = other DNA

SEQ ID NO: 144671 - DNA, 1023 bp, synthetic construct; identical to SEQ ID NO: 144659
  misc_feature 1..1023: note = Description of Artificial Sequence: Synthetic coding sequence
  source 1..1023: mol_type = other DNA

SEQ ID NO: 144672 - DNA, 2424 bp, synthetic construct; identical to SEQ ID NO: 144653
  misc_feature 1..2424: note = Description of Artificial Sequence: Synthetic coding sequence
  source 1..2424: mol_type = other DNA

SEQ ID NO: 144673 - DNA, 2424 bp, synthetic construct; identical to SEQ ID NO: 144653
  misc_feature 1..2424: note = Description of Artificial Sequence: Synthetic coding sequence
  source 1..2424: mol_type = other DNA

SEQ ID NO: 144674 - DNA, 717 bp, synthetic construct; identical to SEQ ID NO: 144656
  misc_feature 1..717: note = Description of Artificial Sequence: Synthetic coding sequence
  source 1..717: mol_type = other DNA

SEQ ID NO: 144675 - DNA, 1602 bp, synthetic construct
  misc_feature 1..1602: note = Description of Artificial Sequence: Synthetic coding sequence
  source 1..1602: mol_type = other DNA
atgcccaaggcccccaagcagcagcccccagagcctgagtggattggagatggagagagcaccagccccagcgacaaggtggtgaagaagggcaagaaggacaagaagatcaagaagaccttctttgaggagctggccgtggaggacaagcaggccggggaggaggagaaggtgctgaaggagaaggagcagcagcagcagcagcagcagcagcagcagcagaagaagaagagggacaccaggaagggccgcaggaagaaggatgtggatgatgatggagaggagaaggagctgatggagcggctgaagaagctgtctgtgcccaccagtgatgaagaagatgaggtgcctgcccccaagccccggggcggcaagaagaccaagggcggcaatgtgtttgctgccctgatccaggaccagagcgaggaggaggaggaggaggagaagcacccccccaagccagccaagccagagaagaaccgcatcaacaaggctgtgtctgaggagcagcagcctgccctgaagggcaagaagggcaaggaggagaagagcaagggcaaggccaagccccagaacaagtttgctgccctggacaatgaggaggaggacaaggaggaggagatcatcaaggagaaggagccccccaagcagggcaaggagaaggccaagaaggccgagcagggcagcgaggaggagggggagggggaggaggaggaggaggagggcggggagagcaaggcagatgacccctatgcccacctgagcaagaaggagaagaagaagctgaagaagcagatggagtatgaaaggcaggtggccagcctgaaggccgccaatgctgctgaaaatgacttctctgtgtcccaggccgagatgagcagccggcaggccatgctggagaatgccagtgacatcaagctggagaagttcagcatcagcgcccacggcaaggagctgtttgtgaatgctgacctgtacatcgtggccggcagaagatatggcctggtgggccccaacgggaagggcaagaccaccctgctgaagcacatcgccaacagagccctgagcatcccccccaacattgatgtgctgctgtgtgagcaggaggtggtggctgatgagaccccagctgtgcaggccgtgctgagagatgacacagctgctgagcggctggagaaggtgtatgaggagctgcgggccactggagctgctgctgctgaggccaaggcccggcgcatcctggccggcctgggctttgatcctgagatgcagaaccggcccacccagaagttcagcggcggctggaggatgagggtgtccctggcccgggccctcttcatggagcccaccctgctgatgctggatgagcccaccaacaacctggacatcgagagcattgatgccctgggggaggccatcaatgagtacaagggagctgtgattgtggtgtcccatgatgcccggctcatcacagagaccaactgccagctgtgggtggtggaggagcagagcgtgtcccagattgatggagactttgaggactacaagcgggaggtgctggaggccctgggggaggtgatggtgtcccggccccgggagtag

SEQ ID NO: 144676 - DNA, 717 bp, synthetic construct; identical to SEQ ID NO: 144656
  misc_feature 1..717: note = Description of Artificial Sequence: Synthetic coding sequence
  source 1..717: mol_type = other DNA

SEQ ID NO: 144677 - DNA, 2538 bp, synthetic construct; identical to SEQ ID NO: 144652
  misc_feature 1..2538: note = Description of Artificial Sequence: Synthetic coding sequence
  source 1..2538: mol_type = other DNA

SEQ ID NO: 144678 - DNA, 2538 bp, synthetic construct; identical to SEQ ID NO: 144652
  misc_feature 1..2538: note = Description of Artificial Sequence: Synthetic coding sequence
  source 1..2538: mol_type = other DNA

SEQ ID NO: 144679 - DNA, 717 bp, synthetic construct; identical to SEQ ID NO: 144656
  misc_feature 1..717: note = Description of Artificial Sequence: Synthetic coding sequence
  source 1..717: mol_type = other DNA

SEQ ID NO: 144680 - DNA, 1602 bp, synthetic construct; identical to SEQ ID NO: 144675
  misc_feature 1..1602: note = Description of Artificial Sequence: Synthetic coding sequence
  source 1..1602: mol_type = other DNA

SEQ ID NO: 144681 - DNA, 1599 bp, synthetic construct
  misc_feature 1..1599: note = Description of Artificial Sequence: Synthetic coding sequence
  source 1..1599: mol_type = other DNA
atgcccaaggcccccaagcagcagcccccagagcctgagtggattggagatggagagagcaccagccccagcgacaaggtggtgaagaagggcaagaaggacaagaagatcaagaagaccttctttgaggagctggccgtggaggacaagcaggccggggaggaggagaaggtgctgaaggagaaggagcagcagcagcagcagcagcagcagcagcagaagaagaagagggacaccaggaaaggaagaaggaagaaggatgtggatgatgatggagaggagaaggagctgatggagcggctgaagaagctgtctgtgcccaccagtgatgaggaggatgaggtgcctgcccccaagccccggggcggcaagaagaccaagggcggcaatgtgtttgctgccctgatccaggaccagagcgaggaggaggaggaggaggagaagcacccccccaagccagccaagccagagaagaaccgcatcaacaaggctgtgtctgaggagcagcagcctgccctgaagggcaagaagggcaaggaggagaagagcaagggcaaggccaagccccagaacaagtttgctgccctggacaatgaggaggaggacaaggaggaggagatcatcaaggagaaggagccccccaagcagggcaaggagaaggccaagaaggccgagcagggcagcgaggaggagggggagggggaggaggaggaggaggagggcggggagagcaaggcagatgacccctatgcccacctgagcaagaaggagaagaagaagctgaagaagcagatggagtatgagcggcaggtggccagcctgaaggccgccaatgctgctgaaaatgacttctctgtgtcccaggccgagatgagcagccggcaggccatgctggagaatgccagtgacatcaagctggagaagttcagcatcagcgcccacggcaaggagctgtttgtgaatgctgacctgtacatcgtggccggccgccgctatggcctggtgggccccaacgggaagggcaagaccaccctgctgaagcacatcgccaacagagccctgagcatcccccccaacattgatgtgctgctgtgtgagcaggaggtggtggctgatgagaccccagctgtgcaggccgtgctgagagatgacacagctgctgagcggctggagaaggtgtatgaggagctgcgggccaccggggctgctgctgctgaggccaaggcccggcgcatcctggccggcctgggctttgatcctgagatgcagaaccggcccacccagaagttcagcggcggctggaggatgagggtgtccctggcccgggccctcttcatggagcccaccctgctgatgctggatgagcccaccaacaacctggacatcgagagcattgatgccctgggggaggccatcaatgagtacaagggggccgtcatcgtggtgtcccatgatgcccggctcatcacagagaccaactgccagctgtgggtggtggaggagcagagcgtgtcccagattgatggagactttgaggactacaagcgggaggtgctggaggccctgggggaggtgatggtgtcccggccccgggagtag

SEQ ID NO: 144682 - DNA, 1599 bp, synthetic construct; identical to SEQ ID NO: 144681
  misc_feature 1..1599: note = Description of Artificial Sequence: Synthetic coding sequence
  source 1..1599: mol_type = other DNA

SEQ ID NO: 144683 - DNA, 1599 bp, synthetic construct; identical to SEQ ID NO: 144681
  misc_feature 1..1599: note = Description of Artificial Sequence: Synthetic coding sequence
  source 1..1599: mol_type = other DNA

SEQ ID NO: 144684 - DNA, 1599 bp, synthetic construct; identical to SEQ ID NO: 144681
  misc_feature 1..1599: note = Description of Artificial Sequence: Synthetic coding sequence
  source 1..1599: mol_type = other DNA

SEQ ID NO: 144685 - DNA, 1602 bp, synthetic construct; identical to SEQ ID NO: 144675
  misc_feature 1..1602: note = Description of Artificial Sequence: Synthetic coding sequence
  source 1..1602: mol_type = other DNA

SEQ ID NO: 144686 - DNA, 1515 bp, synthetic construct
  misc_feature 1..1515: note = Description of Artificial Sequence: Synthetic coding sequence
  source 1..1515: mol_type = other DNA
atggacctgatccccaactttgccatggagacctgggtgctggtggccaccagcctggtgctgctgtacatctacggcacccacagccacaagctgttcaagaagctgggcatccctggccccacccccctgcccttcctgggcaccatcctcttctacctgcggggcctgtggaactttgacagagaatgtaatgagaagtacggggagatgtggggcctgtatgagggccagcagcccatgctggtgatcatggaccctgacatgatcaagacagtgctggtgaaggagtgctacagcgtcttcaccaaccagatgcccctgggccccatgggcttcctgaagagcgccctgagctttgctgaagatgaggagtggaagaggatccgcaccctgctgagccctgccttcacctctgtgaagttcaaggagatggtgcccatcatcagccagtgtggggacatgctggtgcgcagcctgcggcaggaggccgagaacagcaagagcatcaacctgaaggacttcttcggggcctacaccatggatgtgatcaccggcaccctgtttggagtgaacctggacagcctgaacaacccccaggaccccttcctgaagaacatgaagaagctgctgaagctggacttcctggaccccttcctgctgctgatcagcctcttccccttcctgacccctgtgtttgaggccctgaacatcggcctcttccccaaggatgtgacccacttcctgaagaacagcattgaaagaatgaaggagagccggctgaaggacaagcagaagcaccgggtggacttcttccagcagatgattgacagccagaacagcaaggagaccaagagccacaaggccctgagtgacctggagctggtggcccagagcatcatcatcatctttgctgcctatgacaccaccagcaccaccctgcccttcatcatgtatgagctggccacccacccagatgtgcagcagaagctgcaggaggagattgatgctgtgctgcccaacaaggcccctgtgacctatgatgccctggtgcagatggagtacctggacatggtggtgaatgagaccctgcggctcttccctgtggtgtcccgggtgaccagggtgtgcaagaaggacatcgagatcaacggggtcttcatccccaagggcctggccgtgatggtgcccatctatgccctgcaccacgaccccaagtactggacagagcctgagaagttctgcccagagagccgcttcagcaagaagaacaaggacagcattgacctgtaccgctacatcccctttggagctggccccaggaactgcatcggcatgagatttgccctgaccaacatcaagctggccgtcatccgggccctgcagaacttctccttcaagccctgcaaggagacccagatccccctgaagctggacaacctgcccatcctgcagcctgagaagcccatcgtgctgaaggtgcacctgagagatggcatcaccagcggcccctag

SEQ ID NO: 144687 - DNA, 1872 bp, synthetic construct
  misc_feature 1..1872: note = Description of Artificial Sequence: Synthetic coding sequence
  source 1..1872: mol_type = other DNA
atgcccagcgacctggccaagaagaaggccgccaagaagaaggaggccgccaaggcccggcagaggcccaggaaaggacatgaagaaaatggagatgtggtgacagagccccaggtggccgagaagaatgaggccaacggccgggagaccacagaggtggacctgctgaccaaggagctggaggactttgagatgaagaaggctgctgcccgggctgtgactggagtgctggccagccaccccaacagcacagatgtgcacatcatcaacctgagcctgaccttccacggccaggagctgctgagtgacaccaagctggagctgaacagcggccgccgctatggcctgattggcctgaatggcatcggcaagtccatgctgctgagcgccatcggcaagcgggaggtgcccatccctgagcacatcgacatctaccacctgacccgggagatgccacccagcgacaagacccccctgcactgtgtgatggaggtggacacagagcgggccatgctggagaaggaggccgagcggctggcccatgaagatgctgaatgtgagaagctgatggagctgtatgagcggctggaggagctggatgctgacaaggccgagatgagggccagccgcatcctgcacggcctgggcttcaccccagccatgcagaggaagaagctgaaggacttcagcggcggctggaggatgagggtggccctggcccgggccctcttcatccggcccttcatgctgctgctggatgagcccaccaaccacctggacctggatgcctgtgtgtggctggaggaggagctgaagaccttcaagaggatcctggtgctggtgagccacagccaggacttcctgaatggagtgtgcaccaacatcatccacatgcacaacaagaagctgaagtactacacaggcaactatgaccagtatgtgaagacccggctggagctggaggagaaccagatgaagcgcttccactgggagcaggaccagatcgcccacatgaagaactacatcgccaggtttggacatggcagcgccaagctggcccggcaggcccagagcaaggagaagaccctgcagaagatgatggccagcggcctgacagagcgggtggtgtctgacaagaccctgtccttctacttccccccctgtgggaagatccccccacctgtgatcatggtgcagaatgtgtccttcaagtacaccaaggatggcccctgcatctacaacaacctggagtttggcatcgacctggacaccagggtggccctggtgggccccaacggggccggcaagagcaccctgctgaagctgctgaccggggagctgctgcccacagatggcatgatcaggaagcacagccacgtgaagattggccgctaccaccagcacctgcaggagcagctggacctggacctgagccccctggagtacatgatgaagtgctacccagagatcaaggagaaggaggagatgaggaagatcatcggccgctatggcctgaccgggaagcagcaggtgagccccatccggaacctgagtgatggccagaagtgccgggtgtgcctggcctggctggcctggcagaacccccacatgctgttcctggatgagcccaccaaccacctggacatcgagaccattgatgccctggctgatgccatcaatgaatttgagggcggcatgatgctggtgtcccatgacttccgcctcatccagcaggtggcccaggagatctgggtgtgtgagaagcagaccatcaccaagtggccaggggacatcctggcctacaaggagcacctgaagagcaagctggtggatgaggagccccagctgaccaagaggacccacaacgtgtag

SEQ ID NO: 144688 - DNA, 723 bp, synthetic construct
  misc_feature 1..723: note = Description of Artificial Sequence: Synthetic coding sequence
  source 1..723: mol_type = other DNA
atgcccagcgacctggccaagaagaaggccgccaagaagaaggaggccgccaaggcccggcagaggcccaggaaaggacatgaagaaaatggagatgtggtgacagagccccaggtggccgagaagaatgaggccaacggccgggagaccacagaggtggacctgctgaccaaggagctggaggactttgagatgaagaaggctgctgcccgggctgtgactggagtgctggccagccaccccaacagcacagatgtgcacatcatcaacctgagcctgaccttccacggccaggagctgctgagtgacaccaagctggagctgaacagcggccgccgctatggcctgattggcctgaatggcatcggcaagtccatgctgctgagcgccatcggcaagcgggaggtgcccatccctgagcacatcgacatctaccacctgacccgggagatgccacccagcgacaagacccccctgcactgtgtgatggaggtggacacagagcgggccatgctggagaaggaggccgagcggctggcccatgaagatgctgaatgtgagaagctgatggagctgtatgagcggctggaggagctggatgctgacaaggccgagatgagggccagccgcatcctgcacggcctgggcttcaccccagccatgcagaggaagaagctgaaggacttcagcggcggctggaggatgagggtggccctggcctag

SEQ ID NO: 144689 - DNA, 867 bp, synthetic construct
  misc_feature 1..867: note = Description of Artificial Sequence: Synthetic coding sequence
  source 1..867: mol_type = other DNA
atgcccagcgacctggccaagaagaaggccgccaagaagaaggaggccgccaaggcccggcagaggcccaggaaaggacatgaagaaaatggagatgtggtgacagagccccaggtggccgagaagaatgaggccaacggccgggagaccacagaggtggacctgctgaccaaggagctggaggactttgagatgaagaaggctgctgcccgggctgtgactggagtgctggccagccaccccaacagcacagatgtgcacatcatcaacctgagcctgaccttccacggccaggagctgctgagtgacaccaagctggagctgaacagcggccgccgctatggcctgattggcctgaatggcatcggcaagtccatgctgctgagcgccatcggcaagcgggaggtgcccatccctgagcacatcgacatctaccacctgacccgggagatgccacccagcgacaagacccccctgcactgtgtgatggaggtggacacagagcgggccatgctggagaaggaggccgagcggctggcccatgaagatgctgaatgtgagaagctgatggagctgtatgagcggctggaggagctggatgctgacaaggccgagatgagggccagccgcatcctgcacggcctgggcttcaccccagccatgcagaggaagaagctgaaggacttcagcggcggctggaggatgagggtggccctggcccgggccctcttcatccggcccttcatgctgctgctggatgagcccaccaaccacctggacctggatgcctgtgtgtggctggaggaggagctgaagaccttcaagaggatcctggtgctggtgagccacagccaggacttcctgtag

SEQ ID NO: 144690 - DNA, 2361 bp, synthetic construct
  misc_feature 1..2361: note = Description of Artificial Sequence: Synthetic coding sequence
  source 1..2361: mol_type = other DNA
atggtgagaagaggctggagcgtgtgcacagccatcctgctggcccggctgtggtgcctggtgcccacccacaccttcctgtctgagtacccagaggccgctgagtacccccaccctggctgggtgtactggctgcagatggctgtggcccctggccacctgcgggcctgggtgatgaggaacaacgtgaccaccaacatccccagcgccttcagcggcaccctgacccatgaggagaaggctgtgctgaccgtcttcaccggcacagccacagctgtgcacgtgcaggtggccgccctggccagcgccaagctggagagctctgtgtttgtgacagactgtgtgtcctgcaagattgaaaatgtgtgtgacagcgccctgcagggcaagagggtgcccatgagcggcctgcagggcagcagcatcgtcatcatgccacccagcaaccggcccctgaaggccagcgctgccagctgcacctggagcgtgcaggtgcagggcggcccccaccacctgggcgtggtggccatcagcggcaaggtgctgtctgctgcccacggggccggccgggcctacggctggggcttccctggggaccccatggaggagggctacaagaccctgctgaagggcatcagcggcaagttcaacagcggggagctggtggccatcatgggccccagcggggccggcaagagcaccctgatgaacatcctggccggctaccgggagaccggcatgaagggagctgtgctgatcaatggcctgccccgggacctgcgctgcttcaggaaggtgtcctgctacatcatgcaggatgacatgctgctgccccacctgactgtgcaggaggccatgatggtgtctgcccacctgaagctgcaggagaaggatgagggcagaagagagatggtgaaggagatcctgacagccctgggcctgctgagctgtgccaacaccaggacaggcagcctgagcggcggccagaggaagaggctggccatcgccctggagctggtgaacaacccccctgtgatgttctttgatgagcccaccagcggcctggacagcgccagctgcttccaggtggtgtccctgatgaagggcctggcccagggcggccgcagcatcatctgcaccatccaccagcccagcgccaagctgtttgagctgtttgaccagctgtatgtgctgagccagggccagtgtgtgtaccggggcaaggtgtgcaacctggtgccctacctgcgggacctgggcctgaactgccccacctaccacaacccagctgactttgtgatggaggtggccagcggggagtatggagaccagaacagccggctggtgcgggctgtgcgggagggcatgtgtgacagcgaccacaagagggacctgggcggagatgctgaggtgaaccccttcctgtggcaccggcccagcgaggaggtgaagcagaccaagaggctgaagggcctgaggaaggacagcagctccatggagggctgccacagcttcagcgccagctgcctgacccagttctgcatcctcttcaagaggaccttcctgagcatcatgagggacagcgtgctgacccacctgcgcatcaccagccacatcggcatcggcctgctgattggcctgctgtacctgggcattggaaatgaggccaagaaggtgctgagcaacagcggcttcctgttcttctccatgctgttcctgatgtttgctgccctgatgcccaccgtgctgaccttccccctggagatgggcgtcttcctgcgggagcacctgaactactggtacagcctgaaggcctactacctggccaagaccatggctgatgtgcccttccagatcatgtttcctgtggcctactgcagcatcgtgtactggatgaccagccagcccagtgatgctgtgcgctttgtgctgtttgctgccctgggcaccatgaccagcctggtggcccagagcctgggcctgctgattggagctgccagcaccagcctgcaggtggccacctttgtgggccctgtgacagccatccctgtgctgctcttcagcggcttctttgtgtcctttgacaccatccccacctacctgcagtggatgagctacatctcctatgtgcgctatggctttgagggcgtcatcctgagcatctacggcctggaccgggaggacctgcactgtgacattgatgagacctgccacttccagaagtctgaggccatcctgcgggagctggatgtggagaatgccaagctgtacctggacttcatcgtgctgggcatcttcttcatcagcctgcggctgattgcctactttgtgctgcgctacaagatccgggcagagaggtag

SEQ ID NO: 144691 - DNA, 2034 bp, synthetic construct
  misc_feature 1..2034: note = Description of Artificial Sequence: Synthetic coding sequence
  source 1..2034: mol_type = other DNA
atgaggatcagcctgccccgggcccctgagagagatggcggcgtgtctgccagcagcctgctggacacagtgaccaatgccagcagctacagcgctgagatgacagagcccaagtctgtgtgtgtgtctgtggatgaggtggtgagcagcaacatggaggccacagaaacagacctgctgaatggccacctgaagaaggtggacaacaacctgacagaggcccagcgcttcagcagcctgccccggcgggctgctgtgaacatcgagttccgggacctgagctacagcgtgcctgagggcccctggtggaggaagaagggctacaagaccctgctgaagggcatcagcggcaagttcaacagcggggagctggtggccatcatgggccccagcggggccggcaagagcaccctgatgaacatcctggccggctaccgggagaccggcatgaagggagctgtgctgatcaatggcctgccccgggacctgcgctgcttcaggaaggtgtcctgctacatcatgcaggatgacatgctgctgccccacctgactgtgcaggaggccatgatggtgtctgcccacctgaagctgcaggagaaggatgagggccggcgggagatggtgaaggagatcctgacagccctgggcctgctgagctgtgccaacaccaggacaggcagcctgagcggcggccagaggaagaggctggccatcgccctggagctggtgaacaacccccctgtgatgttctttgatgagcccaccagcggcctggacagcgccagctgcttccaggtggtgtccctgatgaagggcctggcccagggcggccgcagcatcatctgcaccatccaccagcccagcgccaagctgtttgagctgtttgaccagctgtatgtgctgagccagggccagtgtgtgtaccggggcaaggtgtgcaacctggtgccctacctgcgggacctgggcctgaactgccccacctaccacaacccagctgactttgtgatggaggtggccagcggggagtatggagaccagaacagccggctggtgcgggctgtgcgggagggcatgtgtgacagcgaccacaagagggacctgggcggagatgctgaggtgaaccccttcctgtggcaccggcccagcgaggaggacagcagctccatggagggctgccacagcttcagcgccagctgcctgacccagttctgcatcctcttcaagaggaccttcctgagcatcatgagggacagcgtgctgacccacctgcgcatcaccagccacatcggcatcggcctgctgattggcctgctgtacctgggcattggaaatgaggccaagaaggtgctgagcaacagcggcttcctgttcttctccatgctgttcctgatgtttgctgccctgatgcccaccgtgctgaccttccccctggagatgggcgtcttcctgcgggagcacctgaactactggtacagcctgaaggcctactacctggccaagaccatggctgatgtgcccttccagatcatgtttcctgtggcctactgcagcatcgtgtactggatgaccagccagcccagtgatgctgtgcgctttgtgctgtttgctgccctgggcaccatgaccagcctggtggcccagagcctgggcctgctgattggagctgccagcaccagcctgcaggtggccacctttgtgggccctgtgacagccatccctgtgctgctcttcagcggcttctttgtgtcctttgacaccatccccacctacctgcagtggatgagctacatctcctatgtgcgctatggctttgaaggagtcatcctgagcatctacggcctggaccgggaggacctgcactgtgacattgatgagacctgccacttccagaagtctgaggccatcctgcgggagctggatgtggagaatgccaagctgtacctggacttcatcgtgctgggcatcttcttcatcagcctgcggctcatcgcctactttgtgctgcgctacaagatccgggcagagaggtag

SEQ ID NO: 144692 - DNA, 1992 bp, synthetic construct
  misc_feature 1..1992: note = Description of Artificial Sequence: Synthetic coding sequence
  source 1..1992: mol_type = other DNA
atgatcatgaggctgccccagccccacggcaccaatgccagcagctacagcgctgagatgacagagcccaagtctgtgtgtgtgtctgtggatgaggtggtgagcagcaacatggaggccacagaaacagacctgctgaatggccacctgaagaaggtggacaacaacctgacagaggcccagcgcttcagcagcctgccccggcgggctgctgtgaacatcgagttccgggacctgagctacagcgtgcctgagggcccctggtggaggaagaagggctacaagaccctgctgaagggcatcagcggcaagttcaacagcggggagctggtggccatcatgggccccagcggggccggcaagagcaccctgatgaacatcctggccggctaccgggagaccggcatgaagggagctgtgctgatcaatggcctgccccgggacctgcgctgcttcaggaaggtgtcctgctacatcatgcaggatgacatgctgctgccccacctgactgtgcaggaggccatgatggtgtctgcccacctgaagctgcaggagaaggatgagggccggcgggagatggtgaaggagatcctgacagccctgggcctgctgagctgtgccaacaccaggacaggcagcctgagcggcggccagaggaagaggctggccatcgccctggagctggtgaacaacccccctgtgatgttctttgatgagcccaccagcggcctggacagcgccagctgcttccaggtggtgtccctgatgaagggcctggcccagggcggccgcagcatcatctgcaccatccaccagcccagcgccaagctgtttgagctgtttgaccagctgtatgtgctgagccagggccagtgtgtgtaccggggcaaggtgtgcaacctggtgccctacctgcgggacctgggcctgaactgccccacctaccacaacccagctgactttgtgatggaggtggccagcggggagtatggagaccagaacagccggctggtgcgggctgtgcgggagggcatgtgtgacagcgaccacaagagggacctgggcggagatgctgaggtgaaccccttcctgtggcaccggcccagcgaggaggacagcagctccatggagggctgccacagcttcagcgccagctgcctgacccagttctgcatcctcttcaagaggaccttcctgagcatcatgagggacagcgtgctgacccacctgcgcatcaccagccacatcggcatcggcctgctgattggcctgctgtacctgggcattggaaatgaggccaagaaggtgctgagcaacagcggcttcctgttcttctccatgctgttcctgatgtttgctgccctgatgcccaccgtgctgaccttccccctggagatgggcgtcttcctgcgggagcacctgaactactggtacagcctgaaggcctactacctggccaagaccatggctgatgtgcccttccagatcatgtttcctgtggcctactgcagcatcgtgtactggatgaccagccagcccagtgatgctgtgcgctttgtgctgtttgctgccctgggcaccatgaccagcctggtggcccagagcctgggcctgctgattggagctgccagcaccagcctgcaggtggccacctttgtgggccctgtgacagccatccctgtgctgctcttcagcggcttctttgtgtcctttgacaccatccccacctacctgcagtggatgagctacatctcctatgtgcgctatggctttgaaggagtcatcctgagcatctacggcctggaccgggaggacctgcactgtgacattgatgagacctgccacttccagaagtctgaggccatcctgcgggagctggatgtggagaatgccaagctgtacctggacttcatcgtgctgggcatcttcttcatcagcctgcggctcatcgcctactttgtgctgcgctacaagatccgggcagagaggtag

SEQ ID NO: 144693 - DNA, 2037 bp, synthetic construct
  misc_feature 1..2037: note = Description of Artificial Sequence: Synthetic coding sequence
  source 1..2037: mol_type = other DNA
atggcctgcctgatggccgccttctctgtgggcacagccatgaatgccagcagctacagcgctgagatgacagagcccaagtctgtgtgtgtgtctgtggatgaggtggtgagcagcaacatggaggccacagaaacagacctgctgaatggccacctgaagaaggtggacaacaacctgacagaggcccagcgcttcagcagcctgcccaggagagctgctgtgaacatcgagttccgggacctgagctacagcgtgcctgagggcccctggtggaggaagaagggctacaagaccctgctgaagggcatcagcggcaagttcaacagcggggagctggtggccatcatgggccccagcggggccggcaagagcaccctgatgaacatcctggccggctaccgggagaccggcatgaagggagctgtgctgatcaatggcctgccccgggacctgcgctgcttcaggaaggtgtcctgctacatcatgcaggatgacatgctgctgccccacctgactgtgcaggaggccatgatggtgtctgcccacctgaagctgcaggagaaggatgagggcagaagagagatggtgaaggagatcctgacagccctgggcctgctgagctgtgccaacaccaggacaggcagcctgagcggcggccagaggaagaggctggccatcgccctggagctggtgaacaacccccctgtgatgttctttgatgagcccaccagcggcctggacagcgccagctgcttccaggtggtgtccctgatgaagggcctggcccagggcggccgcagcatcatctgcaccatccaccagcccagcgccaagctgtttgagctgtttgaccagctgtatgtgctgagccagggccagtgtgtgtaccggggcaaggtgtgcaacctggtgccctacctgcgggacctgggcctgaactgccccacctaccacaacccagctgactttgtgatggaggtggccagcggggagtatggagaccagaacagccggctggtgcgggctgtgcgggagggcatgtgtgacagcgaccacaagagggacctgggcggagatgctgaggtgaaccccttcctgtggcaccggcccagcgaggaggtgaagcagaccaagaggctgaagggcctgaggaaggacagcagctccatggagggctgccacagcttcagcgccagctgcctgacccagttctgcatcctcttcaagaggaccttcctgagcatcatgagggacagcgtgctgacccacctgcgcatcaccagccacatcggcatcggcctgctgattggcctgctgtacctgggcattggaaatgaggccaagaaggtgctgagcaacagcggcttcctgttcttctccatgctgttcctgatgtttgctgccctgatgcccaccgtgctgaccttccccctggagatgggcgtcttcctgcgggagcacctgaactactggtacagcctgaaggcctactacctggccaagaccatggctgatgtgcccttccagatcatgtttcctgtggcctactgcagcatcgtgtactggatgaccagccagcccagtgatgctgtgcgctttgtgctgtttgctgccctgggcaccatgaccagcctggtggcccagagcctgggcctgctgattggagctgccagcaccagcctgcaggtggccacctttgtgggccctgtgacagccatccctgtgctgctcttcagcggcttctttgtgtcctttgacaccatccccacctacctgcagtggatgagctacatctcctatgtgcgctatggctttgagggcgtcatcctgagcatctacggcctggaccgggaggacctgcactgtgacattgatgagacctgccacttccagaagtctgaggccatcctgcgggagctggatgtggagaatgccaagctgtacctggacttcatcgtgctgggcatcttcttcatcagcctgcggctgattgcctactttgtgctgcgctacaagatccgggcagagaggtag

SEQ ID NO: 144694 - DNA, 2475 bp, synthetic construct
  misc_feature 1..2475: note = Description of Artificial Sequence: Synthetic coding sequence
  source 1..2475: mol_type = other DNA
atgctggccgtgcagcagacagagcacctgcctgcctgccccccagcccggcgctggagcagcaacttctgcccagagagcacagagggcggccccagcctgctgggcctgcgggacatggtgcggcggggctggagcgtgtgcacagccatcctgctggcccggctgtggtgcctggtgcccacccacaccttcctgtctgagtacccagaggccgctgagtacccccaccctggctgggtgtactggctgcagatggctgtggcccctggccacctgcgggcctgggtgatgagaaataatgtgaccaccaacatccccagcgccttcagcggcaccctgacccatgaggagaaggctgtgctgactgtgttcaccggcacagccacagctgtgcacgtgcaggtggccgccctggccagcgccaagctggagagctctgtgtttgtgacagactgtgtgtcctgcaagattgaaaatgtgtgtgacagcgccctgcagggcaagagggtgcccatgagcggcctgcagggcagcagcatcgtcatcatgccacccagcaaccggcccctggccagcgctgccagctgcacctggagcgtgcaggtgcagggcggcccccaccacctgggcgtggtggccatcagcggcaaggtgctgtctgctgcccacggggccggccgggcctacggctggggcttccctggggaccccatggaggagggctacaagaccctgctgaagggcatcagcggcaagttcaacagcggggagctggtggccatcatgggccccagcggggccggcaagagcaccctgatgaacatcctggccggctaccgggagaccggcatgaagggagctgtgctgatcaatggcctgccccgggacctgcgctgcttcaggaaggtgtcctgctacatcatgcaggatgacatgctgctgccccacctgactgtgcaggaggccatgatggtgtctgcccacctgaagctgcaggagaaggatgagggcagaagagagatggtgaaggagatcctgacagccctgggcctgctgagctgtgccaacaccaggacaggcagcctgagcggcggccagaggaagaggctggccatcgccctggagctggtgaacaacccccctgtgatgttctttgatgagcccaccagcggcctggacagcgccagctgcttccaggtggtgtccctgatgaagggcctggcccagggcggccgcagcatcatctgcaccatccaccagcccagcgccaagctgtttgagctgtttgaccagctgtatgtgctgagccagggccagtgtgtgtaccggggcaaggtgtgcaacctggtgccctacctgcgggacctgggcctgaactgccccacctaccacaacccagctgactttgtgatggaggtggccagcggggagtatggagaccagaacagccggctggtgcgggctgtgcgggagggcatgtgtgacagcgaccacaagagggacctgggcggagatgctgaggtgaaccccttcctgtggcaccggcccagcgaggaggtgaagcagaccaagaggctgaagggcctgaggaaggacagcagctccatggagggctgccacagcttcagcgccagctgcctgacccagttctgcatcctcttcaagaggaccttcctgagcatcatgagggacagcgtgctgacccacctgcgcatcaccagccacatcggcatcggcctgctgattggcctgctgtacctgggcattggaaatgaggccaagaaggtgctgagcaacagcggcttcctgttcttctccatgctgttcctgatgtttgctgccctgatgcccaccgtgctgaccttccccctggagatgggcgtcttcctgcgggagcacctgaactactggtacagcctgaaggcctactacctggccaagaccatggctgatgtgcccttccagatcatgtttcctgtggcctactgcagcatcgtgtactggatgaccagccagcccagtgatgctgtgcgctttgtgctgtttgctgccctgggcaccatgaccagcctggtggcccagagcctgggcctgctgattggagctgccagcaccagcctgcaggtggccacctttgtgggccctgtgacagccatccctgtgctgctcttcagcggcttctttgtgtcctttgacaccatccccacctacctgcagtggatgagctacatctcctatgtgcgctatggctttgagggcgtcatcctgagcatctacggcctggaccgggaggacctgcactgtgacattgatgagacctgccacttccagaagtctgaggccatcctgcgggagctggatgtggagaatgccaagctgtacctggacttcatcgtgctgggcatcttcttcatcagcctgcggctgattgcctactttgtgctgcgctacaagatccgggcagagaggtag

SEQ ID NO: 144695 - DNA, 2001 bp, synthetic construct
  misc_feature 1..2001: note = Description of Artificial Sequence: Synthetic coding sequence
  source 1..2001: mol_type = other DNA
atggcctgcctgatggccgccttctctgtgggcacagccatgaatgccagcagctacagcgctgagatgacagagcccaagtctgtgtgtgtgtctgtggatgaggtggtgagcagcaacatggaggccacagaaacagacctgctgaatggccacctgaagaaggtggacaacaacctgacagaggcccagcgcttcagcagcctgcccaggagagctgctgtgaacatcgagttccgggacctgagctacagcgtgcctgagggcccctggtggaggaagaagggctacaagaccctgctgaagggcatcagcggcaagttcaacagcggggagctggtggccatcatgggccccagcggggccggcaagagcaccctgatgaacatcctggccggctaccgggagaccggcatgaagggagctgtgctgatcaatggcctgccccgggacctgcgctgcttcaggaaggtgtcctgctacatcatgcaggatgacatgctgctgccccacctgactgtgcaggaggccatgatggtgtctgcccacctgaagctgcaggagaaggatgagggcagaagagagatggtgaaggagatcctgacagccctgggcctgctgagctgtgccaacaccaggacaggcagcctgagcggcggccagaggaagaggctggccatcgccctggagctggtgaacaacccccctgtgatgttctttgatgagcccaccagcggcctggacagcgccagctgcttccaggtggtgtccctgatgaagggcctggcccagggcggccgcagcatcatctgcaccatccaccagcccagcgccaagctgtttgagctgtttgaccagctgtatgtgctgagccagggccagtgtgtgtaccggggcaaggtgtgcaacctggtgccctacctgcgggacctgggcctgaactgccccacctaccacaacccagctgactttgtgatggaggtggccagcggggagtatggagaccagaacagccggctggtgcgggctgtgcgggagggcatgtgtgacagcgaccacaagagggacctgggcggagatgctgaggtgaaccccttcctgtggcaccggcccagcgaggaggacagcagctccatggagggctgccacagcttcagcgccagctgcctgacccagttctgcatcctcttcaagaggaccttcctgagcatcatgagggacagcgtgctgacccacctgcgcatcaccagccacatcggcatcggcctgctgattggcctgctgtacctgggcattggaaatgaggccaagaaggtgctgagcaacagcggcttcctgttcttctccatgctgttcctgatgtttgctgccctgatgcccaccgtgctgaccttccccctggagatgggcgtcttcctgcgggagcacctgaactactggtacagcctgaaggcctactacctggccaagaccatggctgatgtgcccttccagatcatgtttcctgtggcctactgcagcatcgtgtactggatgaccagccagcccagtgatgctgtgcgctttgtgctgtttgctgccctgggcaccatgaccagcctggtggcccagagcctgggcctgctgattggagctgccagcaccagcctgcaggtggccacctttgtgggccctgtgacagccatccctgtgctgctcttcagcggcttctttgtgtcctttgacaccatccccacctacctgcagtggatgagctacatctcctatgtgcgctatggctttgagggcgtcatcctgagcatctacggcctggaccgggaggacctgcactgtgacattgatgagacctgccacttccagaagtctgaggccatcctgcgggagctggatgtggagaatgccaagctgtacctggacttcatcgtgctgggcatcttcttcatcagcctgcggctgattgcctactttgtgctgcgctacaagatccgggcagagaggtag

SEQ ID NO: 144696 - DNA, 2007 bp, synthetic construct
  misc_feature 1..2007: note = Description of Artificial Sequence: Synthetic coding sequence
  source 1..2007: mol_type = other DNA
atgctgggcacccagggctggaccaagcagaggaagccctgcccccagaatgccagcagctacagcgctgagatgacagagcccaagtctgtgtgtgtgtctgtggatgaggtggtgagcagcaacatggaggccacagaaacagacctgctgaatggccacctgaagaaggtggacaacaacctgacagaggcccagcgcttcagcagcctgcccaggagagctgctgtgaacatcgagttccgggacctgagctacagcgtgcctgagggcccctggtggaggaagaagggctacaagaccctgctgaagggcatcagcggcaagttcaacagcggggagctggtggccatcatgggccccagcggggccggcaagagcaccctgatgaacatcctggccggctaccgggagaccggcatgaagggagctgtgctgatcaatggcctgccccgggacctgcgctgcttcaggaaggtgtcctgctacatcatgcaggatgacatgctgctgccccacctgactgtgcaggaggccatgatggtgtctgcccacctgaagctgcaggagaaggatgagggcagaagagagatggtgaaggagatcctgacagccctgggcctgctgagctgtgccaacaccaggacaggcagcctgagcggcggccagaggaagaggctggccatcgccctggagctggtgaacaacccccctgtgatgttctttgatgagcccaccagcggcctggacagcgccagctgcttccaggtggtgtccctgatgaagggcctggcccagggcggccgcagcatcatctgcaccatccaccagcccagcgccaagctgtttgagctgtttgaccagctgtatgtgctgagccagggccagtgtgtgtaccggggcaaggtgtgcaacctggtgccctacctgcgggacctgggcctgaactgccccacctaccacaacccagctgactttgtgatggaggtggccagcggggagtatggagaccagaacagccggctggtgcgggctgtgcgggagggcatgtgtgacagcgaccacaagagggacctgggcggagatgctgaggtgaaccccttcctgtggcaccggcccagcgaggaggacagcagctccatggagggctgccacagcttcagcgccagctgcctgacccagttctgcatcctcttcaagaggaccttcctgagcatcatgagggacagcgtgctgacccacctgcgcatcaccagccacatcggcatcggcctgctgattggcctgctgtacctgggcattggaaatgaggccaagaaggtgctgagcaacagcggcttcctgttcttctccatgctgttcctgatgtttgctgccctgatgcccaccgtgctgaccttccccctggagatgggcgtcttcctgcgggagcacctgaactactggtacagcctgaaggcctactacctggccaagaccatggctgatgtgcccttccagatcatgtttcctgtggcctactgcagcatcgtgtactggatgaccagccagcccagtgatgctgtgcgctttgtgctgtttgctgccctgggcaccatgaccagcctggtggcccagagcctgggcctgctgattggagctgccagcaccagcctgcaggtggccacctttgtgggccctgtgacagccatccctgtgctgctcttcagcggcttctttgtgtcctttgacaccatccccacctacctgcagtggatgagctacatctcctatgtgcgctatggctttgagggcgtcatcctgagcatctacggcctggaccgggaggacctgcactgtgacattgatgagacctgccacttccagaagtctgaggccatcctgcgggagctggatgtggagaatgccaagctgtacctggacttcatcgtgctgggcatcttcttcatcagcctgcggctgattgcctactttgtgctgcgctacaagatccgggcagagaggtag

SEQ ID NO: 144697 - DNA, 1941 bp, synthetic construct
  misc_feature 1..1941: note = Description of Artificial Sequence: Synthetic coding sequence
  source 1..1941: mol_type = other DNA
atggccgagaaggccctggaggccgtgggctgcggcctgggccctggagctgtggccatggctgtgaccctggaggatggagctgagccccctgtgctgaccacccacctgaagaaggtggagaaccacatcacagaggcccagcgcttcagccacctgcccaagaggtctgctgtggacattgaatttgtggagctgagctacagcgtgcgggagggcccctgctggaggaagaggggctacaagaccctgctgaagtgcctgagcggcaagttctgccggcgggagctgattggcatcatgggccccagcggggccggcaagagcaccttcatgaacatcctggccggctaccgggagagcggcatgaagggccagatcctggtgaatggccggccccgggagctgcggaccttcaggaagatgagctgctacatcatgcaggatgacatgctgctgccccacctgactgtgctggaggccatgatggtgtctgccaacctgaagctgtctgagaagcaggaggtgaagaaggagctggtgacagagatcctgacagccctgggcctgatgagctgcagccacaccaggacagccctgctgagcggcggccagaggaagaggctggccatcgccctggagctggtgaacaacccccctgtgatgttctttgatgagcccaccagcggcctggacagcgccagctgcttccaggtggtgtccctgatgaagagcctggcccagggcggccgcaccatcatctgcaccatccaccagcccagcgccaagctgtttgagatgtttgacaagctgtacatcctgagccagggccagtgcatcttcaagggcgtggtgaccaacctgatcccctacctgaagggcctgggcctgcactgccccacctaccacaacccagctgacttcatcatcgaggtggccagcggggagtatggagacctgaaccccatgctgttccgggctgtgcagaatggcctgtgtgccatggccgagaagaagagcagccctgagaagaatgaggtgcctgccccctgccccccctgccccccagaggtggaccccatcgagagccacacctttgccaccagcaccctgacccagttctgcatcctcttcaagaggaccttcctgagcatcctgcgggacacagtgctgacccacctgcgcttcatgagccacgtggtgattggagtgctgattggcctgctgtacctgcacatcggagatgatgccagcaaggtgttcaacaacacaggctgcctcttcttctccatgctgttcctgatgtttgctgccctgatgcccaccgtgctgaccttccccctggagatggctgtgttcatgagggagcacctgaactactggtacagcctgaaggcctactacctggccaagaccatggctgatgtgcccttccaggtggtgtgccctgtggtgtactgcagcatcgtgtactggatgacaggccagcctgctgagaccagccgcttcctgctcttcagcgccctggccacagccacagccctggtggcccagagcctgggcctgctgattggagctgccagcaacagcctgcaggtggccacctttgtgggccctgtgacagccatccctgtgctgctcttcagcggcttctttgtgtccttcaagaccatccccacctacctgcagtggagcagctacctgtcctatgtgcgctatggctttgaaggagtcatcctgaccatctacggcatggagcggggggacctgacctgcctggaggagcgctgccccttccgggagccccagagcatcctgcgggccctggatgtggaggatgccaagctgtacatggacttcctggtgctgggcatcttcttcctggccctgcggctgctggcctacctggtgctgcgctacagagtgaagtctgagaggtag

SEQ ID NO: 144698 - DNA, 1941 bp, synthetic construct; identical to SEQ ID NO: 144697
  misc_feature 1..1941: note = Description of Artificial Sequence: Synthetic coding sequence
  source 1..1941: mol_type = other DNA

SEQ ID NO: 144699 - DNA, 1941 bp, synthetic construct; identical to SEQ ID NO: 144697
  misc_feature 1..1941: note = Description of Artificial Sequence: Synthetic coding sequence
  source 1..1941: mol_type = other DNA

SEQ ID NO: 144700 - DNA, 1956 bp, synthetic construct
  misc_feature 1..1956: note = Description of Artificial Sequence: Synthetic coding sequence
  source 1..1956: mol_type = other DNA
atgggagacctgagcagcctgaccccaggcggctccatgggcctgcaggtgaacagaggcagccagagcagcctggagggcgccccagccacagcccctgagccccacagcctgggcatcctgcacgccagctacagcgtgagccaccgggtgcggccctggtgggacatcaccagctgccggcagcagtggacccggcagatcctgaaggatgtgtccctgtatgtggagagcggccagatcatgtgcatcctgggcagcagcggcagcggcaagaccaccctgctggatgccatgagcggccgcctgggccgggccggcaccttcctgggggaggtgtatgtgaatggccgggccctgcggcgggagcagttccaggactgcttctcctatgtgctgcagagcgacaccctgctgagcagcctgactgtgcgggagaccctgcactacacagccctgctggccatcagaagaggcaaccctggcagcttccagaagaaggtggaggccgtgatggccgagctgagcctgagccacgtggccgaccggctgattggcaactacagcctgggcggcatcagcactggagagaggagaagagtgtccattgctgcccagctgctgcaggaccccaaggtgatgctgtttgatgagcccaccaccggcctggactgcatgacagccaaccagatcgtggtgctgctggtggagctggcccggaggaaccgcatcgtggtgctgaccatccaccagcccaggtctgagctgttccagctgtttgacaagatcgccatcctgagctttggagagctgatcttctgtggcaccccagctgagatgctggacttcttcaatgactgtggctacccctgcccagagcacagcaacccctttgacttctacatggacctgacctctgtggacacccagagcaaggagcgggagattgagaccagcaagagggtgcagatgattgaaagtgcctacaagaagagcgccatctgccacaagaccctgaagaacatcgagaggatgaagcacctgaagaccctgcccatggtgcccttcaagaccaaggacagccctggggtcttcagcaagctgggcgtgctgctgcggcgggtgaccaggaacctggtgaggaacaagctggccgtcatcacccggctgctgcagaacctgatcatgggcctcttcctgctcttctttgtgctgcgggtgcgcagcaatgtgctgaagggggccatccaggacagagtgggcctgctgtaccagtttgtgggcgccaccccctacacaggcatgctgaatgctgtgaacctcttccctgtgctgcgggctgtgtctgaccaggagagccaggacggcctgtaccagaagtggcagatgatgctggcctatgccctgcacgtgctgcccttctctgtggtggccaccatgatcttcagctctgtgtgctactggaccctgggcctgcaccctgaggtggccaggtttggctacttctctgctgccctgctggccccccacctgattggagagttcctgaccctggtgctgctgggcatcgtgcagaaccccaacatcgtgaacagcgtggtggccctgctgagcattgctggggtgctggtgggcagcggcttcctgaggaacatccaggagatgcccatccccttcaagatcatctcctacttcaccttccagaagtactgcagcgagatcctggtggtgaatgagttctacggcctgaacttcacctgtggcagcagcaatgtgtctgtgaccaccaaccccatgtgtgccttcacccagggcatccagttcatcgagaagacctgccctggggccaccagccgcttcaccatgaacttcctgatcctgtacagcttcatcccagccctggtgatcctgggcatcgtggtgttcaagatccgggaccacctgatcagcaggtag

SEQ ID NO: 144701 - DNA, 1443 bp, synthetic construct
  misc_feature 1..1443: note = Description of Artificial Sequence: Synthetic coding sequence
  source 1..1443: mol_type = other DNA
atgtgcatcctgggcagcagcggcagcggcaagaccaccctgctggatgccatgagcggccgcctgggccgggccggcaccttcctgggggaggtgtatgtgaatggccgggccctgcggcgggagcagttccaggactgcttctcctatgtgctgcagagcgacaccctgctgagcagcctgactgtgcgggagaccctgcactacacagccctgctggccatccggcggggcaaccctggcagcttccagaagaaggtggaggccgtgatggccgagctgagcctgagccacgtggccgacaggctcatcggcaactacagcctgggcggcatcagcactggagagcggcggcgggtgtccattgctgcccagctgctgcaggaccccatggacctgacctctgtggacacccagagcaaggagcgggagattgagaccagcaagagggtgcagatgattgagagcgcctacaagaagagcgccatctgccacaagaccctgaagaacattgaaagaatgaagcacctgaagaccctgcccatggtgcccttcaagaccaaggacagccctggggtcttcagcaagctgggcgtgctgctgcggcgggtgaccaggaacctggtgaggaacaagctggccgtcatcacccggctgctgcagaacctgatcatgggcctcttcctgctcttctttgtgctgcgggtgcgcagcaatgtgctgaagggggccatccaggacagagtgggcctgctgtaccagtttgtgggcgccaccccctacacaggcatgctgaatgctgtgaacctcttccctgtgctgcgggctgtgtctgaccaggagagccaggacggcctgtaccagaagtggcagatgatgctggcctatgccctgcacgtgctgcccttctctgtggtggccaccatgatcttcagctctgtgtgctactggaccctgggcctgcaccctgaggtggcccgcttcggctacttctctgctgccctgctggccccccacctgattggagagttcctgaccctggtgctgctgggcatcgtgcagaaccccaacatcgtgaacagcgtggtggccctgctgagcattgctggggtgctggtgggcagcggcttcctgaggaacatccaggagatgcccatccccttcaagatcatctcctacttcaccttccagaagtactgcagcgagatcctggtggtgaatgagttctacggcctgaacttcacctgtggcagcagcaatgtgtctgtgaccaccaaccccatgtgtgccttcacccagggcatccagttcatcgagaagacctgccctggggccaccagccgcttcaccatgaacttcctgatcctgtacagcttcatcccagccctggtgatcctgggcatcgtggtgttcaagatccgggaccacctgatcagcaggtag

SEQ ID NO: 144702 - DNA, 771 bp, synthetic construct
  misc_feature 1..771: note = Description of Artificial Sequence: Synthetic coding sequence
  source 1..771: mol_type = other DNA
atgggcctcttcctgctcttctttgtgctgcgggtgcgcagcaatgtgctgaagggggccatccaggacagagtgggcctgctgtaccagtttgtgggcgccaccccctacacaggcatgctgaatgctgtgaacctcttccctgtgctgcgggctgtgtctgaccaggagagccaggacggcctgtaccagaagtggcagatgatgctggcctatgccctgcacgtgctgcccttctctgtggtggccaccatgatcttcagctctgtgtgctactggaccctgggcctgcaccctgaggtggcccgcttcggctacttctctgctgccctgctggccccccacctgattggagagttcctgaccctggtgctgctgggcatcgtgcagaaccccaacatcgtgaacagcgtggtggccctgctgagcattgctggggtgctggtgggcagcggcttcctgaggaacatccaggagatgcccatccccttcaagatcatctcctacttcaccttccagaagtactgcagcgagatcctggtggtgaatgagttctacggcctgaacttcacctgtggcagcagcaatgtgtctgtgaccaccaaccccatgtgtgccttcacccagggcatccagttcatcgagaagacctgccctggggccaccagccgcttcaccatgaacttcctgatcctgtacagcttcatcccagccctggtgatcctgggcatcgtggtgttcaagatccgggaccacctgatcagcaggtag

SEQ ID NO: 144703 - DNA, 2022 bp, synthetic construct
  misc_feature 1..2022: note = Description of Artificial Sequence: Synthetic coding sequence
  source 1..2022: mol_type = other DNA
atggccggcaaggctgctgaggagcggggcctgcccaagggggccaccccccaggacaccagcggcctgcaggacaggctcttcagcagcgagagtgacaacagcctgtacttcacctacagcggccagcccaacaccctggaggtgcgggacctgaactaccaggtggacctggccagccaggtgccctggtttgagcagctggcccagttcaagatgccctggaccagccccagctgccagaacagctgtgagctgggcatccagaacctgtccttcaaggtgcgcagcggccagatgctggccatcatcggcagcagcggctgcggccgggccagcctgctggatgtgatcaccggccggggccatggaggcaagatcaagagcggccagatctggatcaatggccagcccagcagcccccagctggtgaggaaatgtgtggcccacgtgcggcagcacaaccagctgctgcccaacctgactgtgcgggagaccctggccttcatcgcccagatgaggctgcccaggaccttcagccaggcccagagggacaagagggtggaggatgtgattgctgagctgcggctgcggcagtgtgccgacaccagggtgggcaacatgtatgtgcggggcctgagcggcggggagaggagaagagtgtccattggagtgcagctgctgtggaaccctggcatcctgatcctggatgagcccaccagcggcctggacagcttcaccgcccacaacctggtgaagaccctgagccggctggccaagggcaaccggctggtgctgatcagcctgcaccagcccaggagtgacatcttccggctgtttgacctggtgctgctgatgaccagcggcacccccatctacctgggcgccgcccagcacatggtgcagtacttcaccgccatcggctacccctgcccccgctacagcaacccagctgacttctacgtggacctgaccagcattgacagaagaagccgggagcaggagctggccacccgggagaaggcccagagcctggccgccctcttcctggagaaggtgcgggacctggatgacttcctgtggaaggccgagaccaaggacctggatgaggacacctgtgtggagagctctgtgacccccctggacaccaactgcctgcccagccccaccaagatgcctggagctgtgcagcagttcaccaccctcatccggcggcagatcagcaatgacttccgggacctgcccaccctgctgatccacggggctgaggcctgcctgatgtccatgaccatcggcttcctgtacttcggccacggcagcatccagctgtccttcatggacacagctgccctgctcttcatgattggagccctgatccccttcaacgtcatcctggatgtgatcagcaagtgctacagcgagcgggccatgctgtactatgagctggaggatggcctgtacaccaccggcccctacttctttgccaagatcctgggggagctgcctgagcactgtgcctacatcatcatctacggcatgcccacctactggctggccaacctgcggcccggcctgcagcccttcctgctgcacttcctgctggtgtggctggtggtgttctgctgccgcatcatggccctggccgccgccgccctgctgcccaccttccacatggccagcttcttcagcaatgccctgtacaacagcttctacctggccggcggcttcatgatcaacctgagcagcctgtggacagtgcctgcctggatcagcaaggtgtccttcctgcgctggtgctttgagggcctgatgaagatccagttcagcaggaggacctacaagatgcccctgggcaacctgaccatcgctgtgtctggggacaagatcctgtctgtgatggagctggacagctaccccctgtatgccatctacctgattgtcatcggcctgagcggcggcttcatggtgctgtactacgtgtccctgcgcttcatcaagcagaagcccagccaggactggtag

SEQ ID NO: 144704 - DNA, 2376 bp, synthetic construct
  misc_feature 1..2376: note = Description of Artificial Sequence: Synthetic coding sequence
  source 1..2376: mol_type = other DNA
atggccggcaccagcgcccctggcagcaagagaagaagtgagcccccagccccccggcccggccccccacctggcaccggccacccccccagcaagagggcccggggcttctctgctgctgctgccccagaccctgatgacccctttggagcccacggggacttcaccgcagatgacctggaggagctggacaccctggccagccaggccctgagccagtgcccagctgctgccagagatgtgtccagtgaccacaaggtgcaccggctgctggatggcatgagcaagaaccccagcggcaagaaccgggagaccgtgcccatcaaggacaactttgagctggaggtgctgcaggcccagtacaaggagctgaaggagaagatgaaggtgatggaggaggaggtgctgatcaagaatggagagatcaagatcctgcgggacagcctgcaccagacagagagcgtgctggaggagcagaggaggagccacttcctgctggagcaggagaagacccaggccctgagtgacaaggagaaggagttcagcaagaagctgcagagcctgcagagcgagctgcagttcaaggatgctgagatgaatgagctgcggaccaagctgcagaccagcgagcgggccaacaagctggccgcccccagcgtgagccacgtgagccccaggaagaaccccagcgtggtgatcaagccagaggcctgcagcccccagtttgggaagaccagcttccccaccaaggagagcttcagcgccaacatgagcctgccccacccctgccagacagaaagtggctacaagcccctggtgggccgggaggacagcaagccccacagcctgcggggggacagcatcaagcaggaggaggcccagaagagctttgtggacagctggaggcagaggagcaacacccagggcagcatcctgatcaacctgctgctgaagcagcccctcatccctggcagcagcctgagcctgtgccacctgctgagcagcagcagcgagagccctgctggcacccccctgcagcccccaggcttcggcagcaccctggccggcatgagcggcctgcggaccaccggcagctatgatggcagcttcagcctgagcgccctgcgggaggcccagaacctggccttcaccggcctgaacctggtggccagaaatgaatgttccagagatggagaccctgctgagggcggcagaagagccttccccctgtgccagctgcccggggctgtgcacttcctgcccctggtgcagttcttcatcggcctgcactgccaggccctgcaggacctggccgccgccaagaggtctggggcccctggggacagccccacccacagcagctgtgtgagcagcggcgtggagaccaacccagaagattctgtgtgcatcctggagggcttctctgtgacagccctgagcatcctgcagcacctggtgtgccacagcggggctgtggtgtccctgctgctgagcggcgtgggcgctgacagcgctgctggggagggcaacagaagcctggtgcaccggctgagtgatggagacatgaccagcgccctgcggggcgtggctgatgaccagggccagcaccccctgctgaagatgctgctgcacctgctggccttcagcagcgctgccaccggccacctgcaggcctctgtgctgacccagtgcctgaaggtgctggtgaagctggccgagaacaccagctgtgacttcctgccccgcttccagtgtgtgttccaggtgctgcccaagtgcctgagccctgagacccccctgcccagcgtgctgctggccgtggagctgctgagcctgctggccgaccatgaccagctggccccccagctgtgcagccacagcgagggctgcctgctgctgctgctgtacatgtacatcaccagcaggccagacagagtggccctggagacccagtggctgcagctggagcaggaggtggtgtggctgctggccaagctgggcgtgcagagccccctgccccctgtgacaggcagcaactgccagtgcaatgtggaggtggtgcgggccctgactgtgatgctgcaccggcagtggctgactgtgcggcgggccggcggcccccccaggacagaccagcagaggagaacagtgcgctgcctgcgggacacagtgctgctgctgcacggcctgagccagaaggacaagctgttcatgatgcactgtgtggaggtgctgcaccagtttgaccaggtgatgcctggggtgtccatgctgatccggggcctgcctgatgtgacagactgtgaggaggccgccctggatgacctgtgtgccgctgagacagatgtggaggaccctgaggtggagtgtggctag

SEQ ID NO: 144705 - DNA, 2295 bp, synthetic construct
  misc_feature 1..2295: note = Description of Artificial Sequence: Synthetic coding sequence
  source 1..2295: mol_type = other DNA
atggccggcaccagcgcccctggcagcaagagaagaagtgagcccccagccccccggcccggccccccacctggcaccggccacccccccagcaagagggcccggggcttctctgctgctgctgccccagaccctgatgacccctttggagcccacggggacttcaccgcagatgacctggaggagctggacaccctggccagccaggccctgagccagtgcccagctgctgccagagatgtgtccagtgaccacaaggtgcaccggctgctggatggcatgagcaagaaccccagcggcaagaaccgggagaccgtgcccatcaaggacaactttgagctggaggtgctgcaggcccagtacaaggagctgaaggagaagatgaaggtgatggaggaggaggtgctgatcaagaatggagagatcaagatcctgcgggacagcctgcaccagacagagagcgtgctggaggagcagaggaggagccacttcctgctggagcaggagaagacccaggccctgagtgacaaggagaaggagttcagcaagaagctgcagagcctgcagagcgagctgcagttcaaggatgctgagatgaatgagctgcggaccaagctgcagaccagcgagcgggccaacaagctggccgcccccagcgtgagccacgtgagccccaggaagaaccccagcgtggtgatcaagccagaggcctgcagcccccagtttgggaagaccagcttccccaccaaggagagcttcagcgccaacatgagcctgccccacccctgccagacagaaagtggctacaagcccctggtgggccgggaggacagcaagccccacagcctgcggggggacagcatcaagcaggaggaggcccagaagagctttgtggacagctggaggcagaggagcaacacccagggcagcatcctgatcaacctgctgctgaagcagcccctcatccctggcagcagcctgagcctgtgccacctgctgagcagcagcagcgagagccctgctggcacccccctgcagcccccaggcttcggcagcaccctggccggcatgagcggcctgcggaccaccggcagctatgatggcagcttcagcctgagcgccctgcgggaggcccagaacctggccttcaccggcctgaacctggtggccagaaatgaatgttccagagatggagaccctgctgagggcggcagaagagccttccccctgtgccagctgcccggggctgtgcacttcctgcccctggtgcagttcttcatcggcctgcactgccaggccctgcaggacctggccgccgccaagaggtctggggcccctggggacagccccacccacagcagctgtgtgagcagcggcgtggagaccaacccagaagattctgtgtgcatcctggagggcttctctgtgacagccctgagcatcctgcagcacctggtgtgccacagcggggctgtggtgtccctgctgctgagcggcgtgggcgctgacagcgctgctggggagggcaacagaagcctggtgcaccggctgagtgatggagacatgaccagcgccctgcggggcgtggctgatgaccagggccagcaccccctgctgaagatgctgctgcacctgctggccttcagcagcgctgccaccggccacctgcaggcctctgtgctgacccagtgcctgaaggtgctggtgaagctggccgagaacaccagctgtgacttcctgccccgcttccagtgtgtgttccaggtgctgcccaagtgcctgagccctgagacccccctgcccagcgtgctgctggccgtggagctgctgagcctgctggccgaccatgaccagctggccccccagctgtgcagccacagcgagggctgcctgctgctgctgctgtacatgtacatcaccagcaggccagacagagtggccctggagacccagtggctgcagctggagcaggaggtggtgcgggccctgactgtgatgctgcaccggcagtggctgactgtgagaagagctgggggcccccccaggacagaccagcagaggagaacagtgcgctgcctgcgggacacagtgctgctgctgcacggcctgagccagaaggacaagctgttcatgatgcactgtgtggaggtgctgcaccagtttgaccaggtgatgcctggggtgtccatgctgatccggggcctgcctgatgtgacagactgtgaggaggccgccctggatgacctgtgtgccgctgagacagatgtggaggaccctgaggtggagtgtggctag

SEQ ID NO: 144706 - DNA, 1995 bp, synthetic construct
  misc_feature 1..1995: note = Description of Artificial Sequence: Synthetic coding sequence
  source 1..1995: mol_type = other DNA
atgaaggtgatggaggaggaggtgctgatcaagaatggagagatcaagatcctgcgggacagcctgcaccagacagaatctgtgctggaggagcagaggaggagccacttcctgctggagcaggagaagacccaggccctgagtgacaaggagaaggagttcagcaagaagctgcagagcctgcagagcgagctgcagttcaaggatgctgagatgaatgagctgcggaccaagctgcagaccagcgagcgggccaacaagctggccgcccccagcgtgagccacgtgagccccaggaagaaccccagcgtggtgatcaagccagaggcctgcagcccccagtttgggaagaccagcttccccaccaaggagagcttcagcgccaacatgagcctgccccacccctgccagacagagagcggctacaagcccctggtgggccgggaggacagcaagccccacagcctgcggggggacagcatcaagcaggaggaggcccagaagagctttgtggacagctggaggcagaggagcaacacccagggcagcatcctgatcaacctgctgctgaagcagcccctcatccctggcagcagcctgagcctgtgccacctgctgagcagcagcagcgagagccctgctggcacccccctgcagcccccaggcttcggcagcaccctggccggcatgagcggcctgcggaccaccggcagctatgatggcagcttcagcctgagcgccctgcgggaggcccagaacctggccttcaccggcctgaacctggtggccagaaatgaatgttccagagatggagaccctgctgagggcggccggcgggccttccccctgtgccagctgcctggagctgtgcacttcctgcccctggtgcagttcttcatcggcctgcactgccaggccctgcaggacctggccgccgccaagaggtctggggcccctggggacagccccacccacagcagctgtgtgtcctctggagtggagaccaaccctgaggacagcgtgtgcatcctggagggcttctctgtgacagccctgagcatcctgcagcacctggtgtgccacagcggggctgtggtgtccctgctgctgtctggagtgggcgctgacagcgctgctggggagggcaacagaagcctggtgcaccggctgagtgatggagacatgaccagcgccctgcggggcgtggctgatgaccagggccagcaccccctgctgaagatgctgctgcacctgctggccttcagcagcgctgccaccggccacctgcaggcctctgtgctgacccagtgcctgaaggtgctggtgaagctggccgagaacaccagctgtgacttcctgccccgcttccagtgtgtgttccaggtgctgcccaagtgcctgagccctgagacccccctgcccagcgtgctgctggccgtggagctgctgagcctgctggccgaccatgaccagctggccccccagctgtgcagccacagcgagggctgcctgctgctgctgctgtacatgtacatcaccagcaggccagacagagtggccctggagacccagtggctgcagctggagcaggaggtggtgtggctgctggccaagctgggcgtgcagagccccctgccccctgtgacaggcagcaactgccagtgcaatgtggaggtggtgcgggccctgactgtgatgctgcaccggcagtggctgactgtgagaagagctgggggcccccccaggacagaccagcagaggagaacagtgcgctgcctgcgggacacagtgctgctgctgcacggcctgagccagaaggacaagctgttcatgatgcactgtgtggaggtgctgcaccagtttgaccaggtgatgcctggggtgtccatgctgatccggggcctgcctgatgtgacagactgtgaggaggccgccctggatgacctgtgtgccgctgagacagatgtggaggaccctgaggtggagtgtggctag

SEQ ID NO: 144707 - DNA, 2097 bp, synthetic construct
  misc_feature 1..2097: note = Description of Artificial Sequence: Synthetic coding sequence
  source 1..2097: mol_type = other DNA
atgagcaagaaccccagcggcaagaaccgggagaccgtgcccatcaaggacaactttgagctggaggtgctgcaggcccagtacaaggagctgaaggagaagatgaaggtgatggaggaggaggtgctgatcaagaatggagagatcaagatcctgcgggacagcctgcaccagacagaatctgtgctggaggagcagaggaggagccacttcctgctggagcaggagaagacccaggccctgagtgacaaggagaaggagttcagcaagaagctgcagagcctgcagagcgagctgcagttcaaggatgctgagatgaatgagctgcggaccaagctgcagaccagcgagcgggccaacaagctggccgcccccagcgtgagccacgtgagccccaggaagaaccccagcgtggtgatcaagccagaggcctgcagcccccagtttgggaagaccagcttccccaccaaggagagcttcagcgccaacatgagcctgccccacccctgccagacagagagcggctacaagcccctggtgggccgggaggacagcaagccccacagcctgcggggggacagcatcaagcaggaggaggcccagaagagctttgtggacagctggaggcagaggagcaacacccagggcagcatcctgatcaacctgctgctgaagcagcccctcatccctggcagcagcctgagcctgtgccacctgctgagcagcagcagcgagagccctgctggcacccccctgcagcccccaggcttcggcagcaccctggccggcatgagcggcctgcggaccaccggcagctatgatggcagcttcagcctgagcgccctgcgggaggcccagaacctggccttcaccggcctgaacctggtggccagaaatgaatgttccagagatggagaccctgctgagggcggccggcgggccttccccctgtgccagctgcctggagctgtgcacttcctgcccctggtgcagttcttcatcggcctgcactgccaggccctgcaggacctggccgccgccaagaggtctggggcccctggggacagccccacccacagcagctgtgtgtcctctggagtggagaccaaccctgaggacagcgtgtgcatcctggagggcttctctgtgacagccctgagcatcctgcagcacctggtgtgccacagcggggctgtggtgtccctgctgctgtctggagtgggcgctgacagcgctgctggggagggcaacagaagcctggtgcaccggctgagtgatggagacatgaccagcgccctgcggggcgtggctgatgaccagggccagcaccccctgctgaagatgctgctgcacctgctggccttcagcagcgctgccaccggccacctgcaggcctctgtgctgacccagtgcctgaaggtgctggtgaagctggccgagaacaccagctgtgacttcctgccccgcttccagtgtgtgttccaggtgctgcccaagtgcctgagccctgagacccccctgcccagcgtgctgctggccgtggagctgctgagcctgctggccgaccatgaccagctggccccccagctgtgcagccacagcgagggctgcctgctgctgctgctgtacatgtacatcaccagcaggccagacagagtggccctggagacccagtggctgcagctggagcaggaggtggtgtggctgctggccaagctgggcgtgcagagccccctgccccctgtgacaggcagcaactgccagtgcaatgtggaggtggtgcgggccctgactgtgatgctgcaccggcagtggctgactgtgagaagagctgggggcccccccaggacagaccagcagaggagaacagtgcgctgcctgcgggacacagtgctgctgctgcacggcctgagccagaaggacaagctgttcatgatgcactgtgtggaggtgctgcaccagtttgaccaggtgatgcctggggtgtccatgctgatccggggcctgcctgatgtgacagactgtgaggaggccgccctggatgacctgtgtgccgctgagacagatgtggaggaccctgaggtggagtgtggctag

SEQ ID NO: 144708 - DNA, 591 bp, synthetic construct
  misc_feature 1..591: note = Description of Artificial Sequence: Synthetic coding sequence
  source 1..591: mol_type = other DNA
atgagcaagaaccccagcggcaagaaccgggagaccgtgcccatcaaggacaactttgagctggaggtgctgcaggcccagtacaaggagctgaaggagaagatgaaggtgatggaggaggaggtgctgatcaagaatggagagatcaagatcctgcgggacagcctgcaccagacagaatctgtgctggaggagcagaggaggagccacttcctgctggagcaggagaagacccaggccctgagtgacaaggagaaggagttcagcaagaagctgcagagcctgcagagcgagctgcagttcaaggatgctgagatgaatgagctgcggaccaagctgcagaccagcgagcgggccaacaagctggccgcccccagcgtgagccacgtgagccccaggaagaaccccagcgtggtgatcaagccagaggcctgcagcccccagtttgggaagaccagcttccccaccaaggagagcttcagcgccaacatgagcctgccccacccctgccagacagagagcggctacaagcccctggtgggccgggaggacagcaagccccacagcctgcggggggacagcatcaagtag

SEQ ID NO: 144709 - DNA, 141 bp, synthetic construct
  misc_feature 1..141: note = Description of Artificial Sequence: Synthetic coding sequence
  source 1..141: mol_type = other DNA
atgagcaagaaccccagcggcaagaaccgggagaccgtgcccatcaaggacaactttgagctggaggtgctgcaggcccagtacaaggagctgaaggagaagctgtgcaagaaggctgacaccagctaccaccacctgtag

SEQ ID NO: 144710 - DNA, 1305 bp, synthetic construct
  misc_feature 1..1305: note = Description of Artificial Sequence: Synthetic coding sequence
  source 1..1305: mol_type = other DNA
atgagcattgagaagatctgggcccgggagatcctggacagccggggcaaccccaccgtggaggtggacctgtacacagccaagggcctcttccgggctgctgtgcccagcggggccagcacaggcatctatgaggccctggagctgagagatggagacaagcagcgctacctgggcaagggcgtgctgaaggctgtggaccacatcaacagcaccatcgccccagccctgatcagcagcggcctgtctgtggtggagcaggagaagctggacaacctgatgctggagctggatggaacagagaacaagagcaagtttggagccaatgccatcctgggcgtgtccctggccgtgtgcaaggccggggctgctgagcgggagctgcccctgtaccgccacatcgcccagctggccggcaacagcgacctgatcctgcctgtgcctgccttcaacgtcatcaatggaggcagccatgctggcaacaagctggccatgcaggagttcatgatcctgcctgtgggcgctgagagcttcagagatgccatgaggctgggcgctgaggtgtaccacaccctgaagggcgtcatcaaggacaagtatggcaaggatgccaccaacgtgggagatgaaggaggctttgcccccaacatcctggagaacagcgaggccctggagctggtgaaggaggccatcgacaaggccggctacacagagaagatcgtcatcggcatggatgtggccgccagcgagttctacagagatggcaagtatgacctggacttcaagagccccacagaccccagccgctacatcaccggggaccagctgggcgccctgtaccaggactttgtgcgggactaccctgtggtgtccattgaggacccctttgaccaggatgactgggccgcctggagcaagttcaccgccaacgtgggcatccagatcgtgggagatgacctgactgtgaccaaccccaagagaattgaaagagctgtggaggagaaggcctgcaactgcctgctgctgaaggtgaaccagatcggctctgtgacagaggccatccaggcctgcaagctggcccaggagaatggctggggcgtgatggtgagccacaggtctggagaaacagaggacaccttcatcgctgacctggtggtgggcctgtgcaccggccagatcaagacaggagccccctgccgctctgagcggctggccaagtacaaccagctgatgagaattgaggaggagctgggagatgaggccaggtttgctggccacaacttcaggaaccccagcgtgctgtag

SEQ ID NO: 144711 - DNA, 3573 bp, synthetic construct
  misc_feature 1..3573: note = Description of Artificial Sequence: Synthetic coding sequence
  source 1..3573: mol_type = other DNA
atgaagacccggcagaacaaggacagcatgtccatgaggagcggcaggaagaaggaggcccctggcccccgggaggagctgcggagccggggccgggccagccctggaggagtgtccaccagcagcagtgatggcaaggccgagaagagccggcagacagccaagaaggcccgggtggaggaggccagcacccccaaggtgaacaagcagggccgctctgaggagatcagcgagagcgagagcgaggagaccaatgcccccaagaagaccaagacagagcaggagctgccccggccccagagccccagcgacctggacagcctggatggccgcagcctgaatgatgatggcagcagtgacccccgggacatcgaccaggacaacagaagcaccagccccagcatctacagccctggctctgtggagaatgacagcgacagcagcagcggcctgagccagggccctgcccggccctaccaccccccacccctcttcccccccagcccccagcccccagacagcaccccccggcagcctgaggccagctttgagccccaccccagcgtgacccccaccggctaccacgcccccatggagccccccaccagcaggatgttccaggcccctcctggggcccccccaccccacccccagctgtacccaggcggcaccggcggcgtgctgagcggcccccccatgggccccaagggcggcggggccgccagctctgtgggcggccccaacggcggcaagcagcaccccccacccaccacccccatctctgtgagcagcagcggggccagcggggccccacccaccaagccacccaccacccctgtgggcggcggcaacctgcccagcgcccctcctccagccaacttcccccacgtgacccccaacctgcccccacctccagccctgcggcccctgaacaatgccagcgccagccccccaggcctgggcgcccagcccctgcccggccacctgcccagcccccacgccatgggccagggcatgggcggcctgcccccaggccctgagaagggccccaccctggcccccagcccccacagcctgcccccagccagcagcagcgccccagccccacccatgaggttcccctacagcagcagcagcagcagcagcgctgctgccagcagcagcagcagcagcagcagcagcagcgccagccccttccctgccagccaggccctgcccagctacccccacagcttccccccacccaccagcctgtctgtgagcaaccagccccccaagtacacccagcccagcctgcccagccaggccgtgtggagccagggccccccacctcctccaccctacggccgcctgctggccaacagcaatgcccaccctggccccttcccccccagcactggagcccagagcacagcccacccccctgtgtccacccaccaccaccaccaccagcagcagcagcagcagcagcagcagcagcagcagcagcagcagcagcagcagcagcaccacggcaacagcggccccccacctcctggggccttcccccaccccctggagggcggcagcagccaccacgcccacccctatgccatgagccccagcctgggcagcctgcggccctacccacctggccctgcccacctgcccccaccccacagccaggtgtcctacagccaggccggccccaacggcccccctgtgagcagcagcagcaacagcagcagcagcaccagccagggcagctacccctgcagccaccccagccccagccagggcccccagggcgccccctaccccttcccccctgtgcccaccgtgaccaccagcagcgccaccctgagcaccgtcatcgccaccgtggccagcagccctgctggctacaagacagccagccccccaggccccccaccctacggcaagagggcccccagccctggggcctacaagacagccaccccacctggctacaagccaggcagcccccccagcttcagaacaggcaccccacctggctaccggggcaccagccccccagctggccctggcaccttcaagccaggcagccccaccgtgggccctggccccctgcccccagctggccccagcggcctgcccagcctgcccccacctcctgctgccccagccagcggcccccccctgagcgccacccagatcaagcaggagcctgctgaggagtatgagaccccagagagccctgtgcccccagcccggagccccagccccccacccaaggtggtggatgtgcccagccacgccagccagagcgcccgcttcaacaagcacctggaccggggcttcaacagctgtgcccggagtgacctgtactttgtgcccctggagggcagcaagctggccaagaagagagctgacctggtggagaaggtgcggcgggaggccgagcagagggcccgggaggagaaggagcgggagcgggagcgggagcgggagaaggagcgggagcgggagaaggagcgggagctggagaggtctgtgaagctggcccaggagggccgggcccctgtggagtgccccagcctgggccctgtgccccaccggcccccatttgagcccggcagcgctgtggccaccgtgcccccctacctgggccctgacaccccagccctgcggaccctgtctgaatatgcccggccccacgtgatgagccctggcaacagaaaccaccccttctacgtgcccctgggcgctgtggaccccggcctgctgggctacaacgtgcctgccctgtacagcagtgaccctgctgcccgggagcgggagcgggaggcccgggagcgggacctgcgggaccggctgaagccaggctttgaggtgaagcccagcgagctggagcccctgcatggagtgcccggccctggcctggaccccttccccaggcatggaggcctggccctgcagcccggccccccaggcctgcaccccttccccttccaccccagcctgggccccctggagcgggagcggctggccctggccgccggccctgccctgcggccagacatgtcctatgcagagcggctggccgctgagcggcagcacgccgagcgggtggccgccctgggcaatgaccccctggcccggctgcagatgctgaatgtgaccccccaccaccaccagcacagccacatccacagccacctgcacctgcaccagcaggatgccatccatgctgccagcgcctctgtgcaccccctgattgaccccctggccagcggcagccacctgacccgcatcccctacccagctggcaccctgcccaaccccctgctgccccaccccctgcatgaaaatgaggtgctgcggcaccagctgtttgctgccccctacagagacctgcctgccagcctgagcgcccccatgtctgctgcccaccagctgcaggccatgcacgcccagagcgctgagctgcagaggctggccctggagcagcagcagtggctgcacgcccaccaccccctgcacagcgtgcccctgcctgcccaggaggactactacagccacctgaagaaggagagtgacaagcccctgtag

SEQ ID NO: 144712 - DNA, 3573 bp, synthetic construct; identical to SEQ ID NO: 144711
  misc_feature 1..3573: note = Description of Artificial Sequence: Synthetic coding sequence
  source 1..3573: mol_type = other DNA

SEQ ID NO: 144713 - DNA, 3573 bp, synthetic construct; identical to SEQ ID NO: 144711
  misc_feature 1..3573: note = Description of Artificial Sequence: Synthetic coding sequence
  source 1..3573: mol_type = other DNA

SEQ ID NO: 144714 - DNA, 519 bp, synthetic construct
  misc_feature 1..519: note = Description of Artificial Sequence: Synthetic coding sequence
  source 1..519: mol_type = other DNA
atgctggtgatccacctggaggagcacgtgatcatcgccttcagccagcacaacaccatcatggacctggtgcagttctttgtgaccttcttcagctgcttcctgagcctgctgctggtggccgctgtggtgtggaagatcaagcagacctgctgggccagcagaagaagagagcagctgctgcgggagcggcagcagatggccagccggccctttgcctctgtggatgtggccctggaggtgggcgctgagcagacagagttcctgcggggccccctggagggcgcccccaagcccatcgccatcgagccctgtgccggcaacagagctgctgtgctgaccgtcttcctgtgcctgccccggggcagcagcggggcccctcctcctggccagagcggcctggccatcgccagcgccctgattgacatcagccagcagaaggccagtgacagcaaggacaagaccagcggcgtgaggaacaggaagcacctgagcacccggcagggcacctgtgtgtag

SEQ ID NO: 144715 - DNA, 4140 bp, synthetic construct
  misc_feature 1..4140: note = Description of Artificial Sequence: Synthetic coding sequence
  source 1..4140: mol_type = other DNA
atggagactggaggccgggccaggacaggcaccccccagcctgctgcccctggggtgtggagggcccggcctgctgggggcggcggcggcggggccagctcctggctgctggatggcaacagctggctgctgtgctacggcttcctgtacctggccctgtatgcccaggtgtcccagagcaagccctgtgagaggacaggcagctgcttcagcggccgctgtgtgaacagcacctgcctgtgtgaccccggctgggtgggggaccagtgccagcactgccagggccgcttcaagctgacagagcccagcggctacctgacagatggccccatcaactacaagtacaagaccaagtgcacctggctgattgagggctacccaaatgctgtgctgcggctgcgcttcaaccactttgccacagaatgttcctgggaccacatgtatgtgtatgatggagacagcatctatgcccccctgattgctgtgctgagcggcctgattgtgcctgagatcagaggaaatgagaccgtgcctgaggtggtgaccaccagcggctacgccctgctgcacttcttcagtgatgctgcctacaacctgaccggcttcaacatcttctacagcatcaacagctgccccaacaactgcagcggccacggcaagtgcaccacctctgtgtctgtgcccagccaggtgtactgtgaatgtgacaagtactggaagggggaggcctgtgacatcccctactgcaaggccaactgtggcagcccagaccacggctactgtgacctgaccggggagaagctgtgtgtgtgcaatgacagctggcagggccctgactgcagcctgaatgtgcccagcacagagagctactggatcctgcccaacgtgaagcccttcagccccagcgtgggccgggccagccacaaggctgtgctgcacggcaagttcatgtgggtgattggaggctacaccttcaactacagcagcttccagatggtgctgaactacaacctggagagcagcatctggaatgtgggcacccccagccggggccccctgcagagatatggccacagcctggccctgtaccaggagaacatcttcatgtatggaggccgcatcgagaccaatgatggaaatgtgacagatgagctgtgggtgttcaacatccacagccagagctggagcaccaagacccccaccgtgctgggccacggccagcagtatgctgtggagggccacagcgcccacatcatggagctggacagcagagatgtggtgatgatcatcatcttcggctacagcgccatctacggctacaccagcagcatccaggagtaccacatcagcagcaacacctggctggtgcctgagaccaagggggccatcgtgcagggcggctacggccacacctctgtgtatgatgagatcaccaagagcatctacgtgcacggcggctacaaggccctgcccggcaacaagtatggcctggtggatgacctgtacaagtatgaggtgaacaccaagacctggaccatcctgaaggagagcggctttgcccgctacctgcacagcgctgtgctgatcaacggggccatgctgatctttggaggcaacacccacaatgacaccagcctgagcaatggagccaagtgcttctctgctgacttcctggcctatgacatcgcctgtgatgagtggaagatcctgcccaagcccaacctgcacagagatgtgaaccgcttcggccacagcgctgtggtgatcaatggctccatgtacatctttggaggcttcagctctgtgctgctgaatgacatcctggtgtacaagccacccaactgcaaggccttcagagatgaggagctgtgcaagaatgccggccctggcatcaagtgtgtgtggaacaagaaccactgtgagagctgggagagcggcaacaccaacaacatcctgcgggccaagtgcccccccaagacagctgccagtgatgaccgctgctaccgctatgctgactgtgccagctgcacagccaacaccaacggctgccagtggtgtgatgacaagaagtgcatcagcgccaacagcaactgcagcatgtctgtgaagaactacaccaagtgccacgtgagaaatgagcagatctgcaacaagctgaccagctgcaagagctgcagcctgaacctgaactgccagtgggaccagaggcagcaggagtgccaggccctgcctgcccacctgtgtggggagggctggagccacatcggagatgcctgcctgcgggtgaacagcagcagagaaaattatgacaatgccaagctgtactgctacaacctgagcggcaacctggccagcctgaccaccagcaaggaggtggagtttgtgctggatgagatccagaagtacacccagcagaaggtgagcccctgggtgggcctgaggaagatcaacatctcctactggggctgggaggacatgagccccttcaccaacaccaccctgcagtggctgcccggggagcccaatgacagcggcttctgtgcctacctggagagagctgctgtggccggcctgaaggccaacccctgcacctccatggccaacggcctggtgtgtgagaagcctgtggtgagccccaaccagaatgcccggccctgcaagaagccctgcagcctgcggaccagctgcagcaactgcaccagcaatggcatggagtgcatgtggtgcagcagcaccaagagatgtgtggacagcaatgcctacatcatctccttcccctacggccagtgcctggagtggcagacagccacctgcagcccccagaactgcagcggcctgcggacctgtggccagtgcctggagcagcccggctgcggctggtgcaatgaccccagcaacacaggccggggccactgcatcgagggcagcagccggggccccatgaagctgattggcatgcaccacagcgagatggtgctggacaccaacctgtgccccaaggagaagaactatgagtggagcttcatccagtgcccagcctgccagtgcaatggccacagcacctgcatcaacaacaacgtgtgtgagcagtgcaagaacctgaccaccgggaagcagtgccaggactgcatgcctggctactacggggaccccaccaatggaggccagtgcacagcctgcacctgcagcggccacgccaacatctgccacctgcacacaggcaagtgcttctgcaccaccaagggcatcaagggggaccagtgccagctgtgtgacagcgagaacagatatgtgggcaaccccctgcggggcacctgctactacagcctgctgattgactaccagttcaccttcagcctgctgcaggaggatgacagacaccacacagccatcaacttcatcgccaaccctgagcagagcaacaagaacctggacatcagcatcaatgccagcaacaacttcaacctgaacatcacctggagcgtgggcagcacagctggcaccatcagcggggaggagaccagcatcgtgtccaagaacaacatcaaggagtacagagacagcttctcctatgagaagttcaacttccgcagcaaccccaacatcaccttctacgtgtatgtgagcaacttctcctggcccatcaagatccagatcgccttcagccagcacaacaccatcatggacctggtgcagttctttgtgaccttcttcagctgcttcctgagcctgctgctggtggccgctgtggtgtggaagatcaagcagacctgctgggccagcagaagaagagagcagctgctgcgggagcggcagcagatggccagccggccctttgcctctgtggatgtggccctggaggtgggcgctgagcagacagagttcctgcggggccccctggagggcgcccccaagcccatcgccatcgagccctgtgccggcaacagagctgctgtgctgactgtgttcctgtgcctgccccggggcagcagcggggcccctcctcctggccagagcggcctggccatcgccagcgccctgattgacatcagccagcagaaggccagtgacagcaaggacaagaccagcggcgtgaggaacaggaagcacctgagcacccggcagggcacctgtgtgtag

SEQ ID NO: 144716 - DNA, 1293 bp, synthetic construct
  misc_feature 1..1293: note = Description of Artificial Sequence: Synthetic coding sequence
  source 1..1293: mol_type = other DNA
atggagtgcatgtggtgcagcagcaccaagagatgtgtggacagcaatgcctacatcatctccttcccctacggccagtgcctggagtggcagacagccacctgcagcccccagaactgcagcggcctgcggacctgtggccagtgcctggagcagcccggctgcggctggtgcaatgaccccagcaacacaggccggggccactgcatcgagggcagcagccggggccccatgaagctgattggcatgcaccacagcgagatggtgctggacaccaacctgtgccccaaggagaagaactatgagtggagcttcatccagtgcccagcctgcacctgcagcggccacgccaacatctgccacctgcacacaggcaagtgcttctgcaccaccaagggcatcaagggggaccagtgccagctgtgtgacagtgaaaatcgctacgtgggcaaccccctgcggggcacctgctactacagcctgctgattgactaccagttcaccttcagcctgctgcaggaggatgacagacaccacacagccatcaacttcatcgccaaccctgagcagagcaacaagaacctggacatcagcatcaatgccagcaacaacttcaacctgaacatcacctggagcgtgggcagcacagctggcaccatctctggagaggagaccagcatcgtgtccaagaacaacatcaaggagtacagagacagcttctcctatgagaagttcaacttccgcagcaaccccaacatcaccttctacgtgtatgtgagcaacttctcctggcccatcaagatccagatcgccttcagccagcacaacaccatcatggacctggtgcagttctttgtgaccttcttcagctgcttcctgagcctgctgctggtggccgctgtggtgtggaagatcaagcagacctgctgggccagcagaagaagagagcagctgctgcgggagcggcagcagatggccagccggccctttgcctctgtggatgtggccctggaggtgggcgctgagcagacagagttcctgcggggccccctggagggcgcccccaagcccatcgccatcgagccctgtgccggcaacagagctgctgtgctgaccgtcttcctgtgcctgccccggggcagcagcggggcccctcctcctggccagagcggcctggccatcgccagcgccctgattgacatcagccagcagaaggccagtgacagcaaggacaagaccagcggcgtgaggaacaggaagcacctgagcacccggcagggcacctgtgtgtag

SEQ ID NO: 144717 - DNA, 207 bp, synthetic construct
  misc_feature 1..207: note = Description of Artificial Sequence: Synthetic coding sequence
  source 1..207: mol_type = other DNA
atgcccaagcatgagttctctgtggacatgacctgtggcggctgtgccgaggccgtgtcccgggtgctgaacaagctgggcggcgtgaagtatgacatcgacctgcccaacaagaaggtgtgcatcgagagcgagcacagcatggacaccctgctggccaccctgaagaagacaggcaagacagtgtcctacctgggcctggagtag

SEQ ID NO: 144718 - DNA, 207 bp, synthetic construct; identical to SEQ ID NO: 144717
  misc_feature 1..207: note = Description of Artificial Sequence: Synthetic coding sequence
  source 1..207: mol_type = other DNA

SEQ ID NO: 144719 - DNA, 207 bp, synthetic construct; identical to SEQ ID NO: 144717
  misc_feature 1..207: note = Description of Artificial Sequence: Synthetic coding sequence
  source 1..207: mol_type = other DNA

SEQ ID NO: 144720 - DNA, 933 bp, synthetic construct
  misc_feature 1..933: note = Description of Artificial Sequence: Synthetic coding sequence
  source 1..933: mol_type = other DNA
atggctgctgctgtggccgccgcccctggggccctgggcagcctgcatgctggaggagcccggctggtggccgcctgcagcgcctggctgtgccccggcctgcggctgcccggcagcctggccggcagaagagctggccctgccatctgggcccagggctgggtgcctgctgctgggggccctgcccccaagaggggctacagcagcgagatgaagacagaagatgagctgcgggtgcgccacctggaggaggagaacagaggaattgtggtgctgggcatcaacagagcctacggcaagaacagcctgagcaagaacctgatcaagatgctgagcaaggctgtggatgccctgaagagtgacaagaaggtgaggaccatcatcatccgctctgaggtgcccggcatcttctgtgccgccaacctgcctgtgcccaccatcgccgccattgatggcctggccctgggcggcggcctggagctggccctggcctgtgacatccgggtggccgccagcagcgccaagatgggcctggtggagaccaagctggccatcatccctgggggcggcggcacccagaggctgccccgggccatcggcatgagcctggccaaggagctgatcttcagcgcccgggtgctggatggcaaggaggccaaggctgtgggcctcatcagccacgtgctggagcagaaccaggagggagatgctgcctacaggaaggccctggacctggcccgggagttcctgccccagggccctgtggccatgagggtggccaagctggccatcaaccagggcatggaggtggacctggtgacaggcctggccatcgaggaggcctgctacgcccagaccatccccaccaaggaccggctggagggcctgctggccttcaaggagaagaggcctccccgctacaagggggagtag

SEQ ID NO: 144721 - DNA, 1020 bp, synthetic construct
  misc_feature 1..1020: note = Description of Artificial Sequence: Synthetic coding sequence
  source 1..1020: mol_type = other DNA
atggctgctgctgtggccgccgcccctggggccctgggcagcctgcatgctggaggagcccggctggtggccgcctgcagcgcctggctgtgccccggcctgcggctgcccggcagcctggccggcagaagagctggccctgccatctgggcccagggctgggtgcctgctgctgggggccctgcccccaagaggggctacagcagcgagatgaagacagaagatgagctgcgggtgcgccacctggaggaggagaacagaggaattgtggtgctgggcatcaacagagcctacggcaagaacagcctgagcaagaacctgatcaagatgctgagcaaggctgtggatgccctgaagagtgacaagaaggtgaggaccatcatcatccgctctgaggtgcccggcatcttctgtgccggggctgacctgaaggagcgggccaagatgagcagcagcgaggtgggcccctttgtgtccaagatccgggctgtgatcaatgacatcgccaacctgcctgtgcccaccatcgccgccattgatggcctggccctgggcggcggcctggagctggccctggcctgtgacatccgggtggccgccagcagcgccaagatgggcctggtggagaccaagctggccatcatccctgggggcggcggcacccagaggctgccccgggccatcggcatgagcctggccaaggagctgatcttcagcgcccgggtgctggatggcaaggaggccaaggctgtgggcctcatcagccacgtgctggagcagaaccaggagggagatgctgcctacaggaaggccctggacctggcccgggagttcctgccccagggccctgtggccatgagggtggccaagctggccatcaaccagggcatggaggtggacctggtgacaggcctggccatcgaggaggcctgctacgcccagaccatccccaccaaggaccggctggagggcctgctggccttcaaggagaagaggcctccccgctacaagggggagtag

SEQ ID NO: 144722 - DNA, 768 bp, synthetic construct
  misc_feature 1..768: note = Description of Artificial Sequence: Synthetic coding sequence
  source 1..768: mol_type = other DNA
atggctgctgctgtggccgccgcccctggggccctgggcagcctgcatgctggaggagcccggctggtggccgcctgcagcgcctggctgtgccccggcctgcggctgcccggcagcctggccggcagaagagctggccctgccatctgggcccagggctgggtgcctgctgctgggggccctgcccccaagaggggctacagcagcgagatgaagacagaagatgagctgcgggtgcgccacctggaggaggagaacagaggaattgtggtgctgggcatcaacagagcctacggcaagaacagcctgagcaagaacctgatcaagatgctgagcaaggctgtggatgccctgaagagtgacaagaaggtgaggaccatcatcatccgctctgaggtgcccggcatcttctgtgccggggctgacctgaaggagcgggccaagatgagcagcagcgaggtgggcccctttgtgtccaagatccgggctgtgatcaatgacatcgccaacctgcctgtgcccaccatcgccgccattgatggcctggccctgggcggcggcctggagctggccctggcctgtgacatccgggtggccgccagcagcgccaagatgggcctggtggagaccaagctggccatcatccctgggggcgtgaccagcagcacagaggtgctgaaccccagcaagagctccatgaagattggcatcatcatcttccagacccctgtgaacatcgacatcctggccagcagccatgagagctag

SEQ ID NO: 144723 - DNA, 1932 bp, synthetic construct
  misc_feature 1..1932: note = Description of Artificial Sequence: Synthetic coding sequence
  source 1..1932: mol_type = other DNA
atgcccctgctcttcctggagcgcttcccctggcccagcctgcggacctacacaggcctgagcggcctggccctgctgggcaccatcatcagcgcctaccgggccctgagccagcctgaggccggccctggagagccagaccagctgacagccagcctgcagcctgagcccccagccccagcccggcccagcgctgggggcccccgggccagagatgtggcccagtacctgctgagtgacagcctgtttgtgtgggtgctggtgaacacagcctgctgcgtgctgatgctggtggccaagctgatccagtgcatcgtgtttggccccctgcgggtgtctgagcggcagcacctgaaggacaagttctggaacttcatcttctacaagttcatcttcatcttcggcgtgctgaatgtgcagacagtggaggaggtggtgatgtggtgcctgtggtttgctggcctggtgttcctgcacctgatggtgcagctgtgcaaggacagatttgagtacctgtccttcagccccaccacccccatgagcagccacggccgggtgctgagcctgctggtggccatgctgctgagctgctgcggcctggccgctgtgtgcagcatcaccggctacacccacggcatgcacaccctggccttcatggctgctgagagcctgctggtgacagtgaggacagcccacgtgatcctgcgctacgtgatccacctgtgggacctgaaccacgagggcacctgggagggcaagggcacctacgtgtactacacagactttgtgatggagctgaccctgctgagcctggacctgatgcaccacatccacatgctgctgtttggaaacatctggctgtccatggccagcctggtgatcttcatgcagctgcgctacctgttccacgaggtgcagaggcgcatccgccgccacaagaactacctgcgggtggtgggcaacatggaggccaggtttgctgtggccaccccagaggagctggccgtgaacaatgatgactgtgccatctgctgggacagcatgcaggccgccaggaagctgccctgtggccacctgttccacaacagctgcctgcgctcctggctggagcaggacaccagctgccccacctgcaggatgagcctgaacattgctgacaacaacagagtgcgggaggagcaccagggcgagaacctggatgagaacctggtgcctgtggccgctgctgagggccggccccggctgaaccagcacaaccacttcttccactttgatggcagcagaattgcctcctggctgcccagcttctctgtggaggtgatgcacaccaccaacatcctgggcatcacccaggccagcaacagccagctgaatgccatggcccaccagatccaggagatgttcccccaggtgccctaccacctggtgctgcaggacctgcagctgaccaggtctgtggagatcaccacagacaacatcctggagggccgcatccaggtgcccttccccacccagaggagtgacagcatccggcctgccctgaacagccctgtggagcggcccagcagtgaccaggaggagggggagaccagcgcccagacagagcgggtgcccctggacctgagcccccggctggaggagaccctggactttggagaggtggaggtggagcccagcgaggtggaggactttgaggcccggggcagccgcttcagcaagtctgcagatgagcggcagaggatgctggtgcagaggaaggatgagctgctgcagcaggccaggaagcgcttcctgaacaagagcagtgaagatgatgctgccagcgagagcttcctgcccagcgagggcgccagcagtgaccctgtgaccctgcggcggaggatgctggccgctgctgctgagcggcggctgcagaagcagcagaccagctag

SEQ ID NO: 144724 - DNA, 954 bp, synthetic construct
  misc_feature 1..954: note = Description of Artificial Sequence: Synthetic coding sequence
  source 1..954: mol_type = other DNA
atgagggacagcgcctgctggcagaggaaggatgagctgctgcagcaggccaggaagcgcttcctgaacaagagcagtgaagatgatgctgccagcgagagcttcctgcccagcgagggcgccagcagtgaccctgtgaccctgcggcggaggatgctggccgccagaaatggaggcttccgcagcagcaggcctccttctgcccccctgcccagcagcgctgccagctgtgccctgtgccccacagactggaggaggcctgtgcccatccccctgcacggcaaggccggcctgacagccctgcccctgtacaaggcctgtggcctcatcgtgtttggccagctgatcaacctgatcctgctgtgcaacaccttctacgtgaccttcctgttccccctggagaccctgcagatcctgactgtgggcatgatcagcagcggcgtggactggacagcctggggcggcggccgcagcggcggcagcgaggtggcctgcctgcagcaggccgccagcaccccagccagctgtgtgcggcccaccaatgctggggtgctgagcaccacccccagcggcaagtctgtgggggaggcccacagcgtgagccccccaccaagaagaggagtgaccagcgtcatcaagctgctgagcctgctgtggaagcacgtggactgtgcccggcggcccaccggcagctgcaccccccagcagggcatcctggagaaggagctgctggtgcgctacctggagcagaggcggggcaagagccgggccatcggctgtgatgaggtgacccccttctgccccaccaccagcggcacagacttccccagcctgcagagcaaggccggcctcatctctgtgaacagcggggccccagccagccatgaatgtgccccctgggtgcccagccccctgagcatcagcctgagccggctggacctgggcagcggctag

SEQ ID NO: 144725 - DNA, 1638 bp, synthetic construct
  misc_feature 1..1638: note = Description of Artificial Sequence: Synthetic coding sequence
  source 1..1638: mol_type = other DNA
atggccacagatgctgccctgcggcggctgctgcggctgcacaggacagaaattgctgtggccgtggacagcgccttccccctgctgcacgccctggccgaccatgatgtggtgcctgaggacaagttccaggagaccctgcacctgaaggagaaggagggctgcccccaggccttccacgccctgctgtcctggctgctgacccaggacagcacagccatcctggacttctggagggtgctcttcaaggactacaacctggagagatatggccgcctgcagcccatcctggacagcttccccaaggatgtggacctgagccagcccaggaaaggaaggaagcccccagctgtgcccaaggccctggtgcccccaccccggctgcccaccaagaggaaggccagcgaggaggcccgggctgctgccccagctgccctgaccccccggggcacagccagccctggcagccagctgaaggccaagccacccaagaagccagagagcagcgctgagcagcagaggctgcccctgggcaatggcatccagaccatgtctgcctctgtgcagagagctgtggccatgagcagtggagatgtgcctggggcccggggagctgtggagggcatcctgatccagcaggtgtttgaaagtggcggcagcaagaagtgcatccaggtgggcggggagttctacacccccagcaagtttgaagattctggcagcggcaagaacaaggcccggagcagcagcggccccaagcccctggtgcgggccaagggggcccagggcgccgcccctgggggcggggaggcccggctgggccagcagggctctgtgcctgcccccctggccctgcccagcgacccccagctgcaccagaagaatgaagatgaatgtgctgtgtgcagagatggaggagagctgatctgctgtgatggctgcccccgggccttccacctggcctgcctgagcccccccctgcgggagatccccagcggcacctggcgctgcagcagctgcctgcaggccaccgtgcaggaggtgcagcccagggctgaggagccccggccccaggagccccctgtggagacccccctgcccccaggcctgcggtctgctggggaggaggtgcggggccccccaggagagcccctggccggcatggacaccaccctggtgtacaagcacctgcctgccccacccagcgctgcccccctgcccggcctggacagcagcgccctgcaccccctgctgtgtgtgggccctgagggccagcagaacctggcccctggggcccgctgtggggtgtgtggagatggaacagatgtgctgcgctgcacccactgtgccgccgccttccactggcgctgccacttccctgctggcaccagccggcccggcaccggcctgcgctgccgcagctgcagcggagatgtgaccccagcccctgtggagggcgtgctggcccccagccctgcccggctggcccctggccctgccaaggatgacacagccagccatgagcccgccctgcacagagatgacctggagagcctgctgtctgagcacacctttgatggcatcctgcagtgggccatccagagcatggcccggcctgctgcccccttccccagctag

SEQ ID NO: 144726 - DNA, 735 bp, synthetic construct
  misc_feature 1..735: note = Description of Artificial Sequence: Synthetic coding sequence
  source 1..735: mol_type = other DNA
atgtggctggtgtacagcagcggggcccctggcacccagcagcctgccaggaacagagtcttcttccccatcggcatggcccctgggggcgtgtgctggaggccagatggctggggcaccggcggccagggccgcatcagcggccctggctccatgggcgccggccagaggctgggcagcagcggcacccagcgctgctgctggggcagctgcttcggcaaggaggtggccctgcggcgggtgctgcaccccagccccaagaatgaagatgaatgtgctgtgtgcagagatggaggagagctgatctgctgtgatggctgcccccgggccttccacctggcctgcctgagcccccccctgcgggagatccccagcggcacctggcgctgcagcagctgcctgcaggccaccgtgcaggaggtgcagcccagggctgaggagccccggccccaggagccccctgtggagacccccctgcccccaggcctgcggtctgctggggaggagccccgctgccagggctggaccccccggccctgcaccccctactgtgtgtgggtgctgcgggtgtccaggacctggctgctggtgcgggtggccggctgtgccgagatggtgaggacctgctgcggcgtgctgacagcccccctgcccagcactggagctgccaccagccagcctgcccctcctggccctggccgggcctgtgccgctgaccctgcccaggagacctag

SEQ ID NO: 144727 - DNA, 1047 bp, synthetic construct
  misc_feature 1..1047: note = Description of Artificial Sequence: Synthetic coding sequence
  source 1..1047: mol_type = other DNA
atgtggctggtgtacagcagcggggcccctggcacccagcagcctgccaggaacagagtcttcttccccatcggcatggcccctgggggcgtgtgctggaggccagatggctggggcaccggcggccagggccgcatcagcggccctggctccatgggcgccggccagaggctgggcagcagcggcacccagcgctgctgctggggcagctgcttcggcaaggaggtggccctgcggcgggtgctgcaccccagccctgtgtgcatgggcgtgtcctgcctgtgccagaagaatgaagatgaatgtgctgtgtgcagagatggaggagagctgatctgctgtgatggctgcccccgggccttccacctggcctgcctgagcccccccctgcgggagatccccagcggcacctggcgctgcagcagctgcctgcaggccaccgtgcaggaggtgcagcccagggctgaggagccccggccccaggagccccctgtggagacccccctgcccccaggcctgcggtctgctggggaggaggtgcggggccccccaggagagcccctggccggcatggacaccaccctggtgtacaagcacctgcctgcccctccttctgctgcccccctgcccggcctggacagcagcgccctgcaccccctgctgtgtgtgggccctgagggccagcagaacctggcccctggggcccgctgtggggtgtgtggagatggaacagatgtgctgcgctgcacccactgtgccgccgccttccactggcgctgccacttccctgctggcaccagcaggcctggcaccggcctgcgctgccgcagctgcagcggagatgtgaccccagcccctgtggagggcgtgctggcccccagccctgcccggctggcccctggccctgccaaggatgacacagccagccatgagcccgccctgcacagagatgacctggagagcctgctgtctgagcacacctttgatggcatcctgcagtgggccatccagagcatggcccggcctgctgcccccttccccagctag

SEQ ID NO: 144728 - DNA, 1017 bp, synthetic construct
  misc_feature 1..1017: note = Description of Artificial Sequence: Synthetic coding sequence
  source 1..1017: mol_type = other DNA
atgtggctggtgtacagcagcggggcccctggcacccagcagcctgccaggaacagagtcttcttccccatcggcatggcccctgggggcgtgtgctggaggccagatggctggggcaccggcggccagggccgcatcagcggccctggctccatgggcgccggccagaggctgggcagcagcggcacccagcgctgctgctggggcagctgcttcggcaaggaggtggccctgcggcgggtgctgcaccccagccccaagaatgaagatgaatgtgctgtgtgcagagatggaggagagctgatctgctgtgatggctgcccccgggccttccacctggcctgcctgagcccccccctgcgggagatccccagcggcacctggcgctgcagcagctgcctgcaggccaccgtgcaggaggtgcagcccagggctgaggagccccggccccaggagccccctgtggagacccccctgcccccaggcctgcggtctgctggggaggaggtgcggggccccccaggagagcccctggccggcatggacaccaccctggtgtacaagcacctgcctgcccctccttctgctgcccccctgcccggcctggacagcagcgccctgcaccccctgctgtgtgtgggccctgagggccagcagaacctggcccctggggcccgctgtggggtgtgtggagatggaacagatgtgctgcgctgcacccactgtgccgccgccttccactggcgctgccacttccctgctggcaccagcaggcctggcaccggcctgcgctgccgcagctgcagcggagatgtgaccccagcccctgtggagggcgtgctggcccccagccctgcccggctggcccctggccctgccaaggatgacacagccagccatgagcccgccctgcacagagatgacctggagagcctgctgtctgagcacacctttgatggcatcctgcagtgggccatccagagcatggcccggcctgctgcccccttccccagctag

SEQ ID NO: 144729 - DNA, 1047 bp, synthetic construct; identical to SEQ ID NO: 144727
  misc_feature 1..1047: note = Description of Artificial Sequence: Synthetic coding sequence
  source 1..1047: mol_type = other DNA

SEQ ID NO: 144730 - DNA, 3717 bp, synthetic construct
  misc_feature 1..3717: note = Description of Artificial Sequence: Synthetic coding sequence
  source 1..3717: mol_type = other DNA
atgaaggtggtgcctgagaagaatgctgtgcgcatcctgtggggccgggagcggggggcccgggccatgggcgcccagaggctgctgcaggagctggtggaggacaagacccgctggatgaagtgggagggcaagagggtggagctgcctgacagccccaggagcaccttcctgctggccttctccccagacaggaccctgctggccagcacccacgtgaaccacaacatctacatcacagaggtgaagacaggaaaatgtgtgcacagcctcatcggccacaggaggaccccctggtgtgtgaccttccaccccaccatcagcggcctgattgccagcggctgcctggatggagaggtgcgcatctgggacctgcacggcggcagcgagagctggttcacagacagcaacaatgccatcgccagcctggccttccaccccacagcccagctgctgctgattgccacagccaatgagatccacttctgggactggagcagaagagagccctttgctgtggtgaagacagccagcgagatggagcgggtgcggctggtgcgctttgaccccctgggccactacctgctgacagccatcgtgaaccccagcaaccagcagggagatgatgagcctgagatccccattgatggaacagagctgagccactaccggcagagggccctgctgcagagccagcctgtgcggaggacccccctgctgcacaacttcctgcacatgctgagcagccgcagcagcggcatccaggtgggggagcagagcacagtgcaggacagcgccacccccagccccccacctcctccaccccagcccagcacagagcggcccaggaccagcgcctacatccggctgcggcagagggtgtcctaccccacagctgagtgctgccagcacctgggcatcctgtgcctgtgcagccgctgcagcggcaccagggtgcccagcctgctgccccaccaggacagcgtgcccccagccagcgcccgggccaccacccccagcttctcctttgtgcagacagagcccttccaccccccagagcaggccagcagcacccagcaggaccagggcctgctgaaccggcccagcgccttcagcacagtgcagagcagcacagctggcaacaccctgaggaacctgagcctgggccccacccggcgcagcctgggcggccccctgagcagccaccccagccgctaccaccgggagatcgcccctggcctgactggaagtgagtggaccaggacagtgctgagcctgaacagccgctctgaggccgagagcatgcccccacccaggaccagcgccagctctgtgtccctgctgtctgtgctgcggcagcaggagggcggcagccaggcctctgtgtacaccagcgccacagagggccggggcttccctgccagcggcctggccacagaaagtgatggcggcaatggcagcagccagaacaacagcggcagcatcagacatgagctgcagtgtgacctgcggcgcttcttcctggagtatgaccggctgcaggagctggaccagagcctgtctggagaggccccccagacccagcaggcccaggagatgctgaacaacaacatcgagagcgagaggcctggccccagccaccagcccaccccccacagcagcgagaacaacagcaacctgagccggggccacctgaaccgctgccgggcctgccacaacctgctgaccttcaacaatgacaccctgcgctgggagaggaccacccccaactacagcagtggagaggccagcagctcctggcaggtgcccagcagctttgagagcgtgcccagcagcggcagccagctgccccccctggagaggacagagggccagacccccagcagcagccggctggagctgagcagcagcgccagcccccaggaggagaggacagtgggcgtggccttcaaccaggagaccggccactgggagcgcatctacacccagagcagccgctctggaacagtgtcccaggaggccctgcaccaggacatgcctgaggagagcagcgaggaggacagcctgcggcggcggctgctggagagcagcctcatcagcctgagccgctatgatggagctggcagccgggagcaccccatctacccagaccctgcccgggacaacggggacaggagccgccaccgggcccccagaaatgccaggatgtctgcccccagcctgggccgctttgtgccccggcgcttcctgctgcctgagtacctgccctatgccggcatcttccacgagcggggccagcccggcctggccacccacagctctgtgaacagagtgctggccggggctgtgattggagatggccagagcgctgtggccagcaacatcgccaacaccacctaccgcctgcagtggtgggacttcaccaagtttgacctgcctgagatcagcaatgcctctgtgaatgtgctggtgcagaactgcaagatctacaatgatgccagctgtgacatctctgcagatggccagctgctggccgccttcatccccagcagccagaggggcttcccagatgagggcatcctggccgtgtacagcctggccccccacaacctgggggagatgctgtacaccaagcgcttcggccccaatgccatctctgtgtccctgagccccatgggccgctacgtgatggtgggcctggccagccgccgcatcctgctgcaccccagcacagagcacatggtggcccaggtgttccggctgcagcaggcccatggaggagagacctccatgagaagagtcttcaacgtgctgtaccccatgcctgctgaccagaggagacatgtgtccatcaacagcgcccgctggctgcctgagcccggcctgggcctggcctacggcaccaacaagggggacctggtgatctgcaggcctgaggccctgaacagcggcgtggagtactactgggaccagctgaatgaaacagtgttcaccgtgcacagcaacagccgcagcagcgagaggcctggcaccagccgggccacctggaggacagaccgggacatgggcctgatgaatgccatcggcctgcagcccagaaatcctgccacctctgtgaccagccagggcacccagaccctggccctgcagctgcagaatgctgagacccagacagagcgggaggtgcctgagcctggaacagctgccagcggccctggagagggggagggctctgaatatggagccagcggagaagatgccctgagccgcatccagaggctgatggccgagggcggcatgacagctgtggtgcagcgggagcagagcaccaccatggcctccatgggcggcttcggcaacaacatcatcgtgagccaccgcatccacaggagcagccagacaggaacagagcccggggccgcccacaccagcagcccccagcccagcaccagccggggcctgctgcctgaggccggccagctggccgagcggggcctgagccccaggacagcctcctgggaccagcccggcaccccaggccgggagcccacccagcccaccctgcccagcagcagccctgtgcccatccctgtgtccctgcccagcgctgagggccccaccctgcactgtgagctgaccaacaacaaccacctgctggatggcggcagcagcagaggagatgctgctggccccagaggagagcccaggaacagatag

SEQ ID NO: 144731 - DNA, 2169 bp, synthetic construct
  misc_feature 1..2169: note = Description of Artificial Sequence: Synthetic coding sequence
  source 1..2169: mol_type = other DNA
atgaaggtggtgcctgagaagaatgctgtgcgcatcctgtggggccgggagcggggggcccgggccatgggcgcccagaggctgctgcaggagctggtggaggacaagacccgctggatgaagtgggagggcaagagggtggagctgcctgacagccccaggagcaccttcctgctggccttctccccagacaggaccctgctggccagcacccacgtgaaccacaacatctacatcacagaggtgaagacaggaaaatgtgtgcacagcctcatcggccacaggaggaccccctggtgtgtgaccttccaccccaccatcagcggcctgattgccagcggctgcctggatggagaggtgcgcatctgggacctgcacggcggcagcgagagctggttcacagacagcaacaatgccatcgccagcctggccttccaccccacagcccagctgctgctgattgccacagccaatgagatccacttctgggactggagcagaagagagccctttgctgtggtgaagacagccagcgagatggagcgggtgcggctggtgcgctttgaccccctgggccactacctgctgacagccatcgtgaaccccagcaaccagcagggagatgatgagcctgagatccccattgatggaacagagctgagccactaccggcagagggccctgctgcagagccagcctgtgcggaggacccccctgctgcacaacttcctgcacatgctgagcagccgcagcagcggcatccagacagagcccttccaccccccagagcaggccagcagcacccagcaggaccagggcctgctgaaccggcccagcgccttcagcacagtgcagagcagcacagctggcaacaccctgaggaacctgagcctgggccccacccggcgcagcctgggcggccccctgagcagccaccccagccgctaccaccgggagatcgcccctggcctgactggaagtgagtggaccaggacagtgctgagcctgaacagccgctctgaggccgagagcatgcccccacccaggaccagcgccagctctgtgtccctgctgtctgtgctgcggcagcaggagggcggcagccaggcctctgtgtacaccagcgccacagagggccggggcttccctgccagcggcctggccacagaaagtgatggcggcaatggcagcagccagaacaacagcggcagcatcagacatgagctgcagtgtgacctgcggcgcttcttcctggagtatgaccggctgcaggagctggaccagagcctgtctggagaggccccccagacccagcaggcccaggagatgctgaacaacaacatcgagagcgagaggcctggccccagccaccagcccaccccccacagcagcgagaacaacagcaacctgagccggggccacctgaaccgctgccgggcctgccacaacctgctgaccttcaacaatgacaccctgcgctgggagaggaccacccccaactacagcagtggagaggccagcagctcctggcaggtgcccagcagctttgagagcgtgcccagcagcggcagccagctgccccccctggagaggacagagggccagacccccagcagcagccggctggagctgagcagcagcgccagcccccaggaggagaggacagtgggcgtggccttcaaccaggagaccggccactgggagcgcatctacacccagagcagccgctctggaacagtgtcccaggaggccctgcaccaggacatgcctgaggagagcagcgaggaggacagcctgcggcggcgcagcctggccctgagcccccggctggagtacagcggggccatcctggcccactgcaagctgcggctgcccggcagctgccacagccctgccagcgccagccaggtggccggcaccactggagcccaccaccacgcccggctcatctttgccttcctggtggagatggagttccaccacgtgtcccaggccggcctggagctgctgaccagcggggacctgcccaccagcgccagccagagcgctggcatcaccggggtgagccaccgggcctggccccggctgctggagagcagcctcatcagcctgagccgctatgatggagctggcagccgggagcaccccatctacccagaccctgcctag

SEQ ID NO: 144732 - DNA, 3627 bp, synthetic construct
  misc_feature 1..3627: note = Description of Artificial Sequence: Synthetic coding sequence
  source 1..3627: mol_type = other DNA
atgaaggtggtgcctgagaagaatgctgtgcgcatcctgtggggccgggagcggggggcccgggccatgggcgcccagaggctgctgcaggagctggtggaggacaagacccgctggatgaagtgggagggcaagagggtggagctgcctgacagccccaggagcaccttcctgctggccttctccccagacaggaccctgctggccagcacccacgtgaaccacaacatctacatcacagaggtgaagacaggaaaatgtgtgcacagcctcatcggccacaggaggaccccctggtgtgtgaccttccaccccaccatcagcggcctgattgccagcggctgcctggatggagaggtgcgcatctgggacctgcacggcggcagcgagagctggttcacagacagcaacaatgccatcgccagcctggccttccaccccacagcccagctgctgctgattgccacagccaatgagatccacttctgggactggagcagaagagagccctttgctgtggtgaagacagccagcgagatggagcgggtgcggctggtgcgctttgaccccctgggccactacctgctgacagccatcgtgaaccccagcaaccagcagggagatgatgagcctgagatccccattgatggaacagagctgagccactaccggcagagggccctgctgcagagccagcctgtgcggaggacccccctgctgcacaacttcctgcacatgctgagcagccgcagcagcggcatccagacagagcccttccaccccccagagcaggccagcagcacccagcaggaccagggcctgctgaaccggcccagcgccttcagcacagtgcagagcagcacagctggcaacaccctgaggaacctgagcctgggccccacccggcgcagcctgggcggccccctgagcagccaccccagccgctaccaccgggagatcgcccctggcctgactggaagtgagtggaccaggacagtgctgagcctgaacagccgctctgaggccgagagcatgcccccacccaggaccagcgccagctctgtgtccctgctgtctgtgctgcggcagcaggagggcggcagccaggcctctgtgtacaccagcgccacagagggccggggcttccctgccagcggcctggccacagaaagtgatggcggcaatggcagcagccagaacaacagcggcagcatcagacatgagctgcagtgtgacctgcggcgcttcttcctggagtatgaccggctgcaggagctggaccagagcctgtctggagaggccccccagacccagcaggcccaggagatgctgaacaacaacatcgagagcgagaggcctggccccagccaccagcccaccccccacagcagcgagaacaacagcaacctgagccggggccacctgaaccgctgccgggcctgccacaacctgctgaccttcaacaatgacaccctgcgctgggagaggaccacccccaactacagcagtggagaggccagcagctcctggcaggtgcccagcagctttgagagcgtgcccagcagcggcagccagctgccccccctggagaggacagagggccagacccccagcagcagccggctggagctgagcagcagcgccagcccccaggaggagaggacagtgggcgtggccttcaaccaggagaccggccactgggagcgcatctacacccagagcagccgctctggaacagtgtcccaggaggccctgcaccaggacatgcctgaggagagcagcgaggaggacagcctgcggcggcggctgctggagagcagcctcatcagcctgagccgctatgatggagctggcagccgggagcaccccatctacccagaccctgcccggctgagccctgctgcctactatgcccagaggatgatccagtacctgagcagaagagacagcatccggcagaggtccatgagataccagcagaaccggctgcggagcagcaccagcagcagcagcagtgacaaccagggccccagcgtggagggcacagacctggagtttgaagattttgaggacaacggggacaggagccgccaccgggcccccagaaatgccaggatgtctgcccccagcctgggccgctttgtgccccggcgcttcctgctgcctgagtacctgccctatgccggcatcttccacgagcggggccagcccggcctggccacccacagctctgtgaacagagtgctggccggggctgtgattggagatggccagagcgctgtggccagcaacatcgccaacaccacctaccgcctgcagtggtgggacttcaccaagtttgacctgcctgagatcagcaatgcctctgtgaatgtgctggtgcagaactgcaagatctacaatgatgccagctgtgacatctctgcagatggccagctgctggccgccttcatccccagcagccagaggggcttcccagatgagggcatcctggccgtgtacagcctggccccccacaacctgggggagatgctgtacaccaagcgcttcggccccaatgccatctctgtgtccctgagccccatgggccgctacgtgatggtgggcctggccagccgccgcatcctgctgcaccccagcacagagcacatggtggcccaggtgttccggctgcagcaggcccatggaggagagacctccatgagaagagtcttcaacgtgctgtaccccatgcctgctgaccagaggagacatgtgtccatcaacagcgcccgctggctgcctgagcccggcctgggcctggcctacggcaccaacaagggggacctggtgatctgcaggcctgaggccctgaacagcggcgtggagtactactgggaccagctgaatgaaacagtgttcaccgtgcacagcaacagccgcagcagcgagaggcctggcaccagccgggccacctggaggacagaccgggacatgggcctgatgaatgccatcggcctgcagcccagaaatcctgccacctctgtgaccagccagggcacccagaccctggccctgcagctgcagaatgctgagacccagacagagcgggaggtgcctgagcctggaacagctgccagcggccctggagagggggagggctctgaatatggagccagcggagaagatgccctgagccgcatccagaggctgatggccgagggcggcatgacagctgtggtgcagcgggagcagagcaccaccatggcctccatgggcggcttcggcaacaacatcatcgtgagccaccgcatccacaggagcagccagacaggaacagagcccggggccgcccacaccagcagcccccagcccagcaccagccggggcctgctgcctgaggccggccagctggccgagcggggcctgagccccaggacagcctcctgggaccagcccggcaccccaggccgggagcccacccagcccaccctgcccagcagcagccctgtgcccatccctgtgtccctgcccagcgctgagggccccaccctgcactgtgagctgaccaacaacaaccacctgctggatggcggcagcagcagaggagatgctgctggccccagaggagagcccaggaacagatag

SEQ ID NO: 144733 - DNA, 3810 bp, synthetic construct
  misc_feature 1..3810: note = Description of Artificial Sequence: Synthetic coding sequence
  source 1..3810: mol_type = other DNA
atgaaggtggtgcctgagaagaatgctgtgcgcatcctgtggggccgggagcggggggcccgggccatgggcgcccagaggctgctgcaggagctggtggaggacaagacccgctggatgaagtgggagggcaagagggtggagctgcctgacagccccaggagcaccttcctgctggccttctccccagacaggaccctgctggccagcacccacgtgaaccacaacatctacatcacagaggtgaagacaggaaaatgtgtgcacagcctcatcggccacaggaggaccccctggtgtgtgaccttccaccccaccatcagcggcctgattgccagcggctgcctggatggagaggtgcgcatctgggacctgcacggcggcagcgagagctggttcacagacagcaacaatgccatcgccagcctggccttccaccccacagcccagctgctgctgattgccacagccaatgagatccacttctgggactggagcagaagagagccctttgctgtggtgaagacagccagcgagatggagcgggtgcggctggtgcgctttgaccccctgggccactacctgctgacagccatcgtgaaccccagcaaccagcagggagatgatgagcctgagatccccattgatggaacagagctgagccactaccggcagagggccctgctgcagagccagcctgtgcggaggacccccctgctgcacaacttcctgcacatgctgagcagccgcagcagcggcatccaggtgggggagcagagcacagtgcaggacagcgccacccccagccccccacctcctccaccccagcccagcacagagcggcccaggaccagcgcctacatccggctgcggcagagggtgtcctaccccacagctgagtgctgccagcacctgggcatcctgtgcctgtgcagccgctgcagcggcaccagggtgcccagcctgctgccccaccaggacagcgtgcccccagccagcgcccgggccaccacccccagcttctcctttgtgcagacagagcccttccaccccccagagcaggccagcagcacccagcaggaccagggcctgctgaaccggcccagcgccttcagcacagtgcagagcagcacagctggcaacaccctgaggaacctgagcctgggccccacccggcgcagcctgggcggccccctgagcagccaccccagccgctaccaccgggagatcgcccctggcctgactggaagtgagtggaccaggacagtgctgagcctgaacagccgctctgaggccgagagcatgcccccacccaggaccagcgccagctctgtgtccctgctgtctgtgctgcggcagcaggagggcggcagccaggcctctgtgtacaccagcgccacagagggccggggcttccctgccagcggcctggccacagaaagtgatggcggcaatggcagcagccagaacaacagcggcagcatcagacatgagctgcagtgtgacctgcggcgcttcttcctggagtatgaccggctgcaggagctggaccagagcctgtctggagaggccccccagacccagcaggcccaggagatgctgaacaacaacatcgagagcgagaggcctggccccagccaccagcccaccccccacagcagcgagaacaacagcaacctgagccggggccacctgaaccgctgccgggcctgccacaacctgctgaccttcaacaatgacaccctgcgctgggagaggaccacccccaactacagcagtggagaggccagcagctcctggcaggtgcccagcagctttgagagcgtgcccagcagcggcagccagctgccccccctggagaggacagagggccagacccccagcagcagccggctggagctgagcagcagcgccagcccccaggaggagaggacagtgggcgtggccttcaaccaggagaccggccactgggagcgcatctacacccagagcagccgctctggaacagtgtcccaggaggccctgcaccaggacatgcctgaggagagcagcgaggaggacagcctgcggcggctgagccctgctgcctactatgcccagaggatgatccagtacctgagccggcgggacagcatccggcagaggtccatgagataccagcagaaccggctgcggagcagcaccagcagcagcagcagtgacaaccagggccccagcgtggagggcacagacctggagtttgaggactttgaagataatggagacaggagccgccaccgggcccccagaaatgccaggatgtctgcccccagcctgggccgctttgtgccccggcgcttcctgctgcctgagtacctgccctatgccggcatcttccacgagcggggccagcccggcctggccacccacagctctgtgaacagagtgctggccggggctgtgattggagatggccagagcgctgtggccagcaacatcgccaacaccacctaccgcctgcagtggtgggacttcaccaagtttgacctgcctgagatcagcaatgcctctgtgaatgtgctggtgcagaactgcaagatctacaatgatgccagctgtgacatctctgcagatggccagctgctggccgccttcatccccagcagccagaggggcttcccagatgagggcatcctggccgtgtacagcctggccccccacaacctgggggagatgctgtacaccaagagatttggccccaatgccatctctgtgtccctgagccccatgggccgctacgtgatggtgggcctggccagccgccgcatcctgctgcaccccagcacagagcacatggtggcccaggtgttccggctgcagcaggcccacggcggggagacctccatgagaagagtcttcaacgtgctgtaccccatgcctgctgaccagaggagacatgtgtccatcaacagcgcccgctggctgcctgagcccggcctgggcctggcctacggcaccaacaagggggacctggtgatctgcaggcctgaggccctgaacagcggcgtggagtactactgggaccagctgaatgagaccgtcttcaccgtgcacagcaacagccgcagcagcgagcggcccggcaccagccgggccacctggaggacagaccgggacatgggcctgatgaatgccatcggcctgcagcccaggaacccagccacctctgtgaccagccagggcacccagaccctggccctgcagctgcagaatgctgagacccagacagagcgggaggtgcctgagcccggcacagctgccagcggccctggagagggggagggctctgaatatggagccagcggggaggatgccctgagccgcatccagaggctgatggccgagggcggcatgacagctgtggtgcagcgggagcagagcaccaccatggcctccatgggcggctttggaaacaacatcatcgtgagccaccgcatccacaggagcagccagacaggaacagagcctggagctgcccacaccagcagcccccagcccagcaccagccggggcctgctgcctgaggccggccagctggccgagcggggcctgagccccaggacagcctcctgggaccagcccggcaccccaggccgggagcccacccagcccaccctgcccagcagcagccctgtgcccatccctgtgtccctgcccagcgctgagggccccaccctgcactgtgagctgaccaacaacaaccacctgctggatggcggcagcagcagaggagatgctgctggccccagaggagagcccaggaacagatag

SEQ ID NO: 144734 - DNA, 3897 bp, synthetic construct
  misc_feature 1..3897: note = Description of Artificial Sequence: Synthetic coding sequence
  source 1..3897: mol_type = other DNA
atgaaggtggtgcctgagaagaatgctgtgcgcatcctgtggggccgggagcggggggcccgggccatgggcgcccagaggctgctgcaggagctggtggaggacaagacccgctggatgaagtgggagggcaagagggtggagctgcctgacagccccaggagcaccttcctgctggccttctccccagacaggaccctgctggccagcacccacgtgaaccacaacatctacatcacagaggtgaagacaggaaaatgtgtgcacagcctcatcggccacaggaggaccccctggtgtgtgaccttccaccccaccatcagcggcctgattgccagcggctgcctggatggagaggtgcgcatctgggacctgcacggcggcagcgagagctggttcacagacagcaacaatgccatcgccagcctggccttccaccccacagcccagctgctgctgattgccacagccaatgagatccacttctgggactggagcagaagagagccctttgctgtggtgaagacagccagcgagatggagcgggtgcggctggtgcgctttgaccccctgggccactacctgctgacagccatcgtgaaccccagcaaccagcagggagatgatgagcctgagatccccattgatggaacagagctgagccactaccggcagagggccctgctgcagagccagcctgtgcggaggacccccctgctgcacaacttcctgcacatgctgagcagccgcagcagcggcatccaggtgggggagcagagcacagtgcaggacagcgccacccccagccccccacctcctccaccccagcccagcacagagcggcccaggaccagcgcctacatccggctgcggcagagggtgtcctaccccacagctgagtgctgccagcacctgggcatcctgtgcctgtgcagccgctgcagcggcaccagggtgcccagcctgctgccccaccaggacagcgtgcccccagccagcgcccgggccaccacccccagcttctcctttgtgcagacagagcccttccaccccccagagcaggccagcagcacccagcaggaccagggcctgctgaaccggcccagcgccttcagcacagtgcagagcagcacagctggcaacaccctgaggaacctgagcctgggccccacccggcgcagcctgggcggccccctgagcagccaccccagccgctaccaccgggagatcgcccctggcctgactggaagtgagtggaccaggacagtgctgagcctgaacagccgctctgaggccgagagcatgcccccacccaggaccagcgccagctctgtgtccctgctgtctgtgctgcggcagcaggagggcggcagccaggcctctgtgtacaccagcgccacagagggccggggcttccctgccagcggcctggccacagaaagtgatggcggcaatggcagcagccagaacaacagcggcagcatcagacatgagctgcagtgtgacctgcggcgcttcttcctggagtatgaccggctgcaggagctggaccagagcctgtctggagaggccccccagacccagcaggcccaggagatgctgaacaacaacatcgagagcgagaggcctggccccagccaccagcccaccccccacagcagcgagaacaacagcaacctgagccggggccacctgaaccgctgccgggcctgccacaacctgctgaccttcaacaatgacaccctgcgctgggagaggaccacccccaactacagcagtggagaggccagcagctcctggcaggtgcccagcagctttgagagcgtgcccagcagcggcagccagctgccccccctggagaggacagagggccagacccccagcagcagccggctggagctgagcagcagcgccagcccccaggaggagaggacagtgggcgtggccttcaaccaggagaccggccactgggagcgcatctacacccagagcagccgctctggaacagtgtcccaggaggccctgcaccaggacatgcctgaggagagcagcgaggaggacagcctgcggcggcggctgctggagagcagcctcatcagcctgagccgctatgatggagctggcagccgggagcaccccatctacccagaccctgcccggctgagccctgctgcctactatgcccagaggatgatccagtacctgagcagaagagacagcatccggcagaggtccatgagataccagcagaaccggctgcggagcagcaccagcagcagcagcagtgacaaccagggccccagcgtggagggcacagacctggagtttgaagattttgaggacaacggggacaggagccgccaccgggcccccagaaatgccaggatgtctgcccccagcctgggccgctttgtgccccggcgcttcctgctgcctgagtacctgccctatgccggcatcttccacgagcggggccagcccggcctggccacccacagctctgtgaacagagtgctggccggggctgtgattggagatggccagagcgctgtggccagcaacatcgccaacaccacctaccgcctgcagtggtgggacttcaccaagtttgacctgcctgagatcagcaatgcctctgtgaatgtgctggtgcagaactgcaagatctacaatgatgccagctgtgacatctctgcagatggccagctgctggccgccttcatccccagcagccagaggggcttcccagatgagggcatcctggccgtgtacagcctggccccccacaacctgggggagatgctgtacaccaagcgcttcggccccaatgccatctctgtgtccctgagccccatgggccgctacgtgatggtgggcctggccagccgccgcatcctgctgcaccccagcacagagcacatggtggcccaggtgttccggctgcagcaggcccatggaggagagacctccatgagaagagtcttcaacgtgctgtaccccatgcctgctgaccagaggagacatgtgtccatcaacagcgcccgctggctgcctgagcccggcctgggcctggcctacggcaccaacaagggggacctggtgatctgcaggcctgaggccctgaacagcggcgtggagtactactgggaccagctgaatgaaacagtgttcaccgtgcacagcaacagccgcagcagcgagaggcctggcaccagccgggccacctggaggacagaccgggacatgggcctgatgaatgccatcggcctgcagcccagaaatcctgccacctctgtgaccagccagggcacccagaccctggccctgcagctgcagaatgctgagacccagacagagcgggaggtgcctgagcctggaacagctgccagcggccctggagagggggagggctctgaatatggagccagcggagaagatgccctgagccgcatccagaggctgatggccgagggcggcatgacagctgtggtgcagcgggagcagagcaccaccatggcctccatgggcggcttcggcaacaacatcatcgtgagccaccgcatccacaggagcagccagacaggaacagagcccggggccgcccacaccagcagcccccagcccagcaccagccggggcctgctgcctgaggccggccagctggccgagcggggcctgagccccaggacagcctcctgggaccagcccggcaccccaggccgggagcccacccagcccaccctgcccagcagcagccctgtgcccatccctgtgtccctgcccagcgctgagggccccaccctgcactgtgagctgaccaacaacaaccacctgctggatggcggcagcagcagaggagatgctgctggccccagaggagagcccaggaacagatag

SEQ ID NO: 144735 - DNA, 75 bp, synthetic construct
  misc_feature 1..75: note = Description of Artificial Sequence: Synthetic coding sequence
  source 1..75: mol_type = other DNA
atgaaggtggtgcctgagaagaatgctgtgcgcatcctgtggggccgggagcggggggcccgggccatgggctag

SEQ ID NO: 144736 - DNA, 3810 bp, synthetic construct; identical to SEQ ID NO: 144733
  misc_feature 1..3810: note = Description of Artificial Sequence: Synthetic coding sequence
  source 1..3810: mol_type = other DNA

SEQ ID NO: 144737 - DNA, 3717 bp, synthetic construct; identical to SEQ ID NO: 144730
  misc_feature 1..3717: note = Description of Artificial Sequence: Synthetic coding sequence
  source 1..3717: mol_type = other DNA

SEQ ID NO: 144738 - DNA, 3540 bp, synthetic construct
  misc_feature 1..3540: note = Description of Artificial Sequence: Synthetic coding sequence
  source 1..3540: mol_type = other DNA
atgaaggtggtgcctgagaagaatgctgtgcgcatcctgtggggccgggagcggggggcccgggccatgggcgcccagaggctgctgcaggagctggtggaggacaagacccgctggatgaagtgggagggcaagagggtggagctgcctgacagccccaggagcaccttcctgctggccttctccccagacaggaccctgctggccagcacccacgtgaaccacaacatctacatcacagaggtgaagacaggaaaatgtgtgcacagcctcatcggccacaggaggaccccctggtgtgtgaccttccaccccaccatcagcggcctgattgccagcggctgcctggatggagaggtgcgcatctgggacctgcacggcggcagcgagagctggttcacagacagcaacaatgccatcgccagcctggccttccaccccacagcccagctgctgctgattgccacagccaatgagatccacttctgggactggagcagaagagagccctttgctgtggtgaagacagccagcgagatggagcgggtgcggctggtgcgctttgaccccctgggccactacctgctgacagccatcgtgaaccccagcaaccagcagggagatgatgagcctgagatccccattgatggaacagagctgagccactaccggcagagggccctgctgcagagccagcctgtgcggaggacccccctgctgcacaacttcctgcacatgctgagcagccgcagcagcggcatccagacagagcccttccaccccccagagcaggccagcagcacccagcaggaccagggcctgctgaaccggcccagcgccttcagcacagtgcagagcagcacagctggcaacaccctgaggaacctgagcctgggccccacccggcgcagcctgggcggccccctgagcagccaccccagccgctaccaccgggagatcgcccctggcctgactggaagtgagtggaccaggacagtgctgagcctgaacagccgctctgaggccgagagcatgcccccacccaggaccagcgccagctctgtgtccctgctgtctgtgctgcggcagcaggagggcggcagccaggcctctgtgtacaccagcgccacagagggccggggcttccctgccagcggcctggccacagaaagtgatggcggcaatggcagcagccagaacaacagcggcagcatcagacatgagctgcagtgtgacctgcggcgcttcttcctggagtatgaccggctgcaggagctggaccagagcctgtctggagaggccccccagacccagcaggcccaggagatgctgaacaacaacatcgagagcgagaggcctggccccagccaccagcccaccccccacagcagcgagaacaacagcaacctgagccggggccacctgaaccgctgccgggcctgccacaacctgctgaccttcaacaatgacaccctgcgctgggagaggaccacccccaactacagcagtggagaggccagcagctcctggcaggtgcccagcagctttgagagcgtgcccagcagcggcagccagctgccccccctggagaggacagagggccagacccccagcagcagccggctggagctgagcagcagcgccagcccccaggaggagaggacagtgggcgtggccttcaaccaggagaccggccactgggagcgcatctacacccagagcagccgctctggaacagtgtcccaggaggccctgcaccaggacatgcctgaggagagcagcgaggaggacagcctgcggcggctgagccctgctgcctactatgcccagaggatgatccagtacctgagccggcgggacagcatccggcagaggtccatgagataccagcagaaccggctgcggagcagcaccagcagcagcagcagtgacaaccagggccccagcgtggagggcacagacctggagtttgaggactttgaagataatggagacaggagccgccaccgggcccccagaaatgccaggatgtctgcccccagcctgggccgctttgtgccccggcgcttcctgctgcctgagtacctgccctatgccggcatcttccacgagcggggccagcccggcctggccacccacagctctgtgaacagagtgctggccggggctgtgattggagatggccagagcgctgtggccagcaacatcgccaacaccacctaccgcctgcagtggtgggacttcaccaagtttgacctgcctgagatcagcaatgcctctgtgaatgtgctggtgcagaactgcaagatctacaatgatgccagctgtgacatctctgcagatggccagctgctggccgccttcatccccagcagccagaggggcttcccagatgagggcatcctggccgtgtacagcctggccccccacaacctgggggagatgctgtacaccaagagatttggccccaatgccatctctgtgtccctgagccccatgggccgctacgtgatggtgggcctggccagccgccgcatcctgctgcaccccagcacagagcacatggtggcccaggtgttccggctgcagcaggcccacggcggggagacctccatgagaagagtcttcaacgtgctgtaccccatgcctgctgaccagaggagacatgtgtccatcaacagcgcccgctggctgcctgagcccggcctgggcctggcctacggcaccaacaagggggacctggtgatctgcaggcctgaggccctgaacagcggcgtggagtactactgggaccagctgaatgagaccgtcttcaccgtgcacagcaacagccgcagcagcgagcggcccggcaccagccgggccacctggaggacagaccgggacatgggcctgatgaatgccatcggcctgcagcccaggaacccagccacctctgtgaccagccagggcacccagaccctggccctgcagctgcagaatgctgagacccagacagagcgggaggtgcctgagcccggcacagctgccagcggccctggagagggggagggctctgaatatggagccagcggggaggatgccctgagccgcatccagaggctgatggccgagggcggcatgacagctgtggtgcagcgggagcagagcaccaccatggcctccatgggcggctttggaaacaacatcatcgtgagccaccgcatccacaggagcagccagacaggaacagagcctggagctgcccacaccagcagcccccagcccagcaccagccggggcctgctgcctgaggccggccagctggccgagcggggcctgagccccaggacagcctcctgggaccagcccggcaccccaggccgggagcccacccagcccaccctgcccagcagcagccctgtgcccatccctgtgtccctgcccagcgctgagggccccaccctgcactgtgagctgaccaacaacaaccacctgctggatggcggcagcagcagaggagatgctgctggccccagaggagagcccaggaacagatag

SEQ ID NO: 144739 - DNA, 1947 bp, synthetic construct
  misc_feature 1..1947: note = Description of Artificial Sequence: Synthetic coding sequence
  source 1..1947: mol_type = other DNA
atggagaaggccaggagaggaggagatggagtgccccggggccctgtgctgcacatcgtggtggtgggcttccaccacaagaagggctgccaggtggagttctcctacccacccctcatccctggagatggccatgacagccacaccctgcctgaggagtggaagtacctgcccttcctggccctgcctgatggagcccacaactaccaggaggacacagtgttcttccacctgcccccaagaaatggaaatggagccaccgtgtttggcatcagctgctaccggcagatcgaggccaaggccctgaaggtgcggcaggccgacatcacccgggagaccgtgcagaagtctgtgtgtgtgctgagcaagctgcccctgtatggcctgctgcaggccaagctgcagctgatcacccacgcctactttgaggagaaggacttcagccagatcagcatcctgaaggagctgtatgagcacatgaacagcagcctgggcggggccagcctggagggcagccaggtgtacctgggcctgagcccccgggacctggtgctgcacttccgccacaaggtgctgatcctcttcaagctgatcctgctggagaagaaggtgctcttctacatcagccctgtgaacaagctggtgggcgccctgatgacagtgctgagcctcttccctggcatgattgaacatggcctgagtgactgcagccagtaccggcccaggaagtccatgtctgaagatggcggcctgcaggagagcaacccctgtgctgatgactttgtgtctgccagcacagcagatgtgagccacaccaacctgggcaccatcaggaaggtgatggccggcaaccacggagaagatgctgccatgaagacagaggagcccctcttccaggtggaggacagcagcaagggccaggagcccaatgacaccaaccagtacctgaagccacccagccggcccagcccagacagcagcgagagtgactgggagaccctggaccccagcgtgctggaggaccccaacctgaaggagcgggagcagctgggcagtgaccagaccaacctcttccccaaggacagcgtgcccagcgagagcctgcccatcaccgtgcagccccaggccaacacaggccaggtggtgctgatccctggcctcatcagcggcctggaggaggaccagtatggcatgcccctggccatcttcaccaagggctacctgtgcctgccctacatggccctgcagcagcaccacctgctgagtgatgtgacagtgcggggctttgtggccggggccaccaacatcctcttccggcagcagaagcacctgagtgatgccatcgtggaggtggaggaggccctgatccagatccatgaccctgagctgaggaagctgctgaaccccaccacagctgacctgcgctttgctgactacctggtgagacatgtgacagagaacagagatgatgtgttcctggatggcaccggctgggagggcggagatgagtggatccgggcccagtttgctgtgtacatccacgccctgctggccgccaccctgcagctggacaatgagaagatcctgagtgactatggcaccacctttgtgacagcctggaagaacacccacaactacagagtgtggaacagcaacaagcacccagccctggccgagatcaaccccaaccaccccttccagggccagtacagcgtgtctgacatgaagctgcgcttcagccacagcgtgcagaacagcgagcggggcaagaagattggaaatgtgatggtgaccaccagcagaaatgtggtgcagacaggcaaggctgtgggccagagcgtgggcggggccttcagcagcgccaagacagccatgagctcctggctgagcaccttcaccaccagcaccagccagagcctgacagagcccccagatgagaagccctag

SEQ ID NO: 144740 - DNA, 1773 bp, synthetic construct
  misc_feature 1..1773: note = Description of Artificial Sequence: Synthetic coding sequence
  source 1..1773: mol_type = other DNA
atggagaaggccaggagaggaggagatggagtgccccggggccctgtgctgcacatcgtggtggtgggcttccaccacaagaagggctgccaggtggagttctcctacccacccctcatccctggagatggccatgacagccacaccctgcctgaggagtggaagtacctgcccttcctggccctgcctgatggagcccacaactaccaggaggacacagtgttcttccacctgcccccaagaaatggaaatggagccaccgtgtttggcatcagctgctaccggcagatcgaggccaaggccctgaaggtgcggcaggccgacatcacccgggagaccgtgcagaagtctgtgtgtgtgctgagcaagctgcccctgtatggcctgctgcaggccaagctgcagctgatcacccacgcctactttgaggagaaggacttcagccagatcagcatcctgaaggagctgtatgagcacatgaacagcagcctgggcggggccagcctggagggcagccaggtgtacctgggcctgagcccccgggacctggtgctgcacttccgccacaaggtgctgatcctcttcaagctgatcctgctggagaagaaggtgctcttctacatcagccctgtgaacaagctggtgggcgccctgatgacagtgctgagcctcttccctggcatgattgaacatggcctgagtgactgcagccagtaccggcccaggaagtccatgtctgaagatggcggcctgcaggagagcaacccctgtgctgatgactttgtgtctgccagcacagcagatgtgagccacaccaacctgggcaccatcaggaaggtgatggccggcaaccacggagaagatgctgccatgaagacagaggagcccctcttccaggtggaggacagcagcaagggccaggagcccaatgacaccaaccagtacctgaagccacccagccggcccagcccagacagcagcgagagtgactgggagaccctggaccccagcgtgctggaggaccccaacctgaaggagcgggagcagctgggcagtgaccagaccaacctcttccccaaggacagcgtgcccagcgagagcctgcccatcaccgtgcagccccaggccaacacaggccaggtggtgctgatccctggcctcatcagcggcctggaggaggaccagtatggcatgcccctggccatcttcaccaagggctacctgtgcctgccctacatggccctgcagcagcaccacctgctgagtgatgtgacagtgcggggctttgtggccggggccaccaacatcctcttccggcagcagaagcacctgagtgatgccatcgtggaggtggaggaggccctgatccagatccatgaccctgagctgaggaagctgctgaaccccaccacagctgacctgcgctttgctgactacctggtgagacatgtgacagagaacagagatgatgtgttcctggatggcaccggctgggagggcggagatgagtggatccgggcccagtttgctgtgtacatccacgccctgctggccgccaccctgcagctggtgctcttccgcatcgtgaatgtgaagaagattggaaatgtgatggtgaccaccagcagaaatgtggtgcagacaggcaaggctgtgggccagagcgtgggcggggccttcagcagcgccaagacagccatgagctcctggctgagcaccttcaccaccagcaccagccagagcctgacagagcccccagatgagaagccctag

SEQ ID NO: 144741 - DNA, 1392 bp, synthetic construct
  misc_feature 1..1392: note = Description of Artificial Sequence: Synthetic coding sequence
  source 1..1392: mol_type = other DNA
atggagaaggccaggagaggaggagatggagtgccccggggccctgtgctgcacatcgtggtggtgggcttccaccacaagaagggctgccaggtggagttctcctacccacccctcatccctggagatggccatgacagccacaccctgcctgaggagtggaagtacctgcccttcctggccctgcctgatggagcccacaactaccaggaggacacagtgttcttccacctgcccccaagaaatggaaatggagccaccgtgtttggcatcagctgctaccggcagatcgaggccaaggccctgaaggtgcggcaggccgacatcacccgggagaccgtgcagaagtctgtgtgtgtgctgagcaagctgcccctgtatggcctgctgcaggccaagctgcagctgatcacccacgcctactttgaggagaaggacttcagccagatcagcatcctgaaggagctgtatgagcacatgaacagcagcctgggcggggccagcctggagggcagccaggtgtacctgggcctgagcccccgggacctggtgctgcacttccgccacaaggtgctgatcctcttcaagctgatcctgctggagaagaaggtgctcttctacatcagccctgtgaacaagctggtgggcgccctgatgacagtgctgagcctcttccctggcatgattgaacatggcctgagtgactgcagccagtaccggcccaggaagtccatgtctgaagatggcggcctgcaggagagcaacccctgtgctgatgactttgtgtctgccagcacagcagatgtgagccacaccaacctgggcaccatcaggaaggtgatggccggcaaccacggagaagatgctgccatgaagacagaggagcccctcttccaggtggaggacagcagcaagggccaggagcccaatgacaccaaccagtacctgaagccacccagccggcccagcccagacagcagcgagagtgactgggagaccctggaccccagcgtgctggaggaccccaacctgaaggagcgggagcagctgggcagtgaccagaccaacctcttccccaaggacagcgtgcccagcgagagcctgcccatcaccgtgcagccccaggccaacacaggccaggtggtgctgatccctggcctcatcagcggcctggaggaggaccagtatggcatgcccctggccatcttcaccaagtgcacccaggatgtgctgccccaggccaaccacagcttcaagttcctgatcacagaccggcgcatcaccccccggcccctgcggcggcggctggtgtctgccaccctgaccaacatgctgcaggagaagagctgctggaagaagcacatcaagtgcagaagaagagtgcagaagtag

SEQ ID NO: 144742 - DNA, 2532 bp, synthetic construct
  misc_feature 1..2532: note = Description of Artificial Sequence: Synthetic coding sequence
  source 1..2532: mol_type = other DNA
atgagcagcgccatgctggtgacctgcctgcctgaccccagcagcagcttcagagaagatgccccccggccccctgtgcctggagaggagggggagaccccaccctgccagcccggggtgggcaagggccaggtgaccaagcccatgcctgtgagcagcaacaccaggagaaatgaagatggcctgggggagcctgagggccgggccagcccagacagccccctgacccgctggaccaagagcctgcacagcctgctgggggaccaggatggagcctacctgttccgcaccttcctggagcgggagaagtgtgtggacaccctggacttctggtttgcctgcaatggcttccggcagatgaacctgaaggacaccaagaccctgcgggtggccaaggccatctacaagcgctacatcgagaacaacagcatcgtgtccaagcagctgaagccagccaccaagacctacatcagagatggcatcaagaagcagcagattgacagcatcatgtttgaccaggcccagacagagatccagagcgtgatggaggagaatgcctaccagatgttcctgaccagtgacatctacctggagtatgtgcgctctggaggagaaaatacagcctacatgagcaatggaggcctgggcagcctgaaggtggtgtgtggctacctgcccaccctgaatgaggaggaggagtggacctgtgccgacttcaagtgcaagctgagccccaccgtggtgggcctgagcagcaagaccctgcgggccacagcctctgtgcgcagcacagagaccgtggacagcggctaccgctccttcaagagaagtgaccctgtgaacccctaccacatcggcagcggctacgtgtttgccccagccaccagcgccaatgacagcgagatcagcagtgatgccctgacagatgacagcatgtccatgacagacagctctgtggatggcatccccccctacagagtgggcagcaagaagcagctgcagcgggagatgcacaggtctgtgaaggccaacggccaggtgtccctgccccacttccccaggacccaccggctgcccaaggagatgacccctgtggagcccgccacctttgctgctgagctgatcagccggctggagaagctgaagctggagctggagagccgccacagcctggaggagcggctgcagcagatccgggaggatgaggagcgggagggcagcgagctgaccctgaacagccgggagggcgcccccacccagcaccccctgagcctgctgcccagcggcagctatgaggaggacccccagaccatcctggatgaccacctgagccgggtgctgaagaccccaggctgccagagccctggggtgggccgctacagccccaggagccgcagcccagaccaccaccaccaccaccacagccagtaccacagcctgctgcccccaggcggcaagctgcccccagctgctgccagccctggggcctgccccctgctgggcggcaaaggatttgtgaccaagcagaccaccaagcacgtgcaccaccactacatccaccaccacgctgtgcccaagaccaaggaggagattgaagctgaggccacccagagggtgcactgcttctgccctgggggcagcgagtactactgctacagcaagtgcaagagccacagcaaggcccctgagaccatgcccagcgagcagtttggaggcagccggggcagcaccctgcccaagagaaatggcaagggcacagagcccggcctggccctgcctgcccgggagggcggggcccctgggggcgctggggccctgcagctgccccgggaggagggggacaggagccaggatgtgtggcagtggatgctggagagcgagcggcagagcaagcccaagccccacagcgcccagagcaccaagaaggcctaccccctggagagcgcccggagcagccctggagagcgggccagccgccaccacctgtggggcggcaacagcggccaccccaggaccaccccccgggcccacctgttcacccaggaccctgccatgccacccctgaccccacccaacaccctggcccagctggaggaggcctgccggcggctggccgaggtgtccaagccacccaagcagcgctgctgcgtggccagccagcagagggacaggaaccacagcgccaccgtgcagacaggagccacccccttcagcaaccccagcctggcccctgaggaccacaaggagcccaagaagctggccggcgtgcacgccctgcaggccagcgagctggtggtgacctacttcttctgtggggaggagatcccctacagaaggatgctgaaggcccagagcctgaccctgggccacttcaaggagcagctgagcaagaagggcaactaccgctactacttcaagaaggccagtgatgaatttgcctgtggggctgtgtttgaggagatctgggaggatgagaccgtgctgcccatgtatgagggccgcatcctgggcaaggtggagagaattgattag

SEQ ID NO: 144743 - DNA, 2337 bp, synthetic construct
  misc_feature 1..2337: note = Description of Artificial Sequence: Synthetic coding sequence
  source 1..2337: mol_type = other DNA
atgagcagcgccatgctggtgacctgcctgcctgaccccagcagcagcttcagagaagatgccccccggccccctgtgcctggagaggagggggagaccccaccctgccagcccggggtgggcaagggccaggtgaccaagcccatgcctgtgagcagcaacaccaggagaaatgaagatggcctgggggagcctgagggccgggccagcccagacagccccctgacccgctggaccaagagcctgcacagcctgctgggggaccaggatggagcctacctgttccgcaccttcctggagcgggagaagtgtgtggacaccctggacttctggtttgcctgcaatggcttccggcagatgaacctgaaggacaccaagaccctgcgggtggccaaggccatctacaagcgctacatcgagaacaacagcatcgtgtccaagcagctgaagccagccaccaagacctacatcagagatggcatcaagaagcagcagattgacagcatcatgtttgaccaggcccagacagagatccagagcgtgatggaggagaatgcctaccagatgttcctgaccagtgacatctacctggagtatgtgcgctctggaggagaaaatacagcctacatgagcaatggaggcctgggcagcctgaaggtggtgtgtggctacctgcccaccctgaatgaggaggaggagtggacctgtgccgacttcaagtgcaagctgagccccaccgtggtgggcctgagcagcaagaccctgcgggccacagcctctgtgcgcagcacagagaccgtggacagcggctaccgctccttcaagagaagtgaccctgtgaacccctaccacatcggcagcggctacgtgtttgccccagccaccagcgccaatgacagcgagatcagcagtgatgccctgacagatgacagcatgtccatgacagacagctctgtggatggcatccccccctacagagtgggcagcaagaagcagctgcagcgggagatgcacaggtctgtgaaggccaacggccaggtgtccctgccccacttccccaggacccaccggctgcccaaggagatgacccctgtggagcccgccacctttgctgctgagctgatcagccggctggagaagctgaagctggagctggagagccgccacagcctggaggagcggctgcagcagatccgggaggatgaggagcgggagggcagcgagctgaccctgaacagccgggagggcgcccccacccagcaccccctgagcctgctgcccagcggcagctatgaggaggacccccagaccatcctggatgaccacctgagccgggtgctgaagaccccaggctgccagagccctggggtgggccgctacagccccaggagccgcagcccagaccaccaccaccaccaccacagccagtaccacagcctgctgcccccaggcggcaagctgcccccagctgctgccagccctggggcctgccccctgctgggcggcaaaggatttgtgaccaagcagaccaccaagcacgtgcaccaccactacatccaccaccacgctgtgcccaagaccaaggaggagattgaagctgaggccacccagagggtgcactgcttctgccctgggggcagcgagtactactgctacagcaagtgcaagagccacagcaaggcccctgagaccatgcccagcgagcagtttggagcccagagcaccaagaaggcctaccccctggagagcgcccggagcagccctggagagcgggccagccgccaccacctgtggggcggcaacagcggccaccccaggaccaccccccgggcccacctgttcacccaggaccctgccatgccacccctgaccccacccaacaccctggcccagctggaggaggcctgccggcggctggccgaggtgtccaagccacccaagcagcgctgctgcgtggccagccagcagagggacaggaaccacagcgccaccgtgcagacaggagccacccccttcagcaaccccagcctggcccctgaggaccacaaggagcccaagaagctggccggcgtgcacgccctgcaggccagcgagctggtggtgacctacttcttctgtggggaggagatcccctacagaaggatgctgaaggcccagagcctgaccctgggccacttcaaggagcagctgagcaagaagggcaactaccgctactacttcaagaaggccagtgatgaatttgcctgtggggctgtgtttgaggagatctgggaggatgaaacagtgctgcccatgtatgagggccgcatcctgggcaaggtggagagaattgattag

SEQ ID NO: 144744 - DNA, 483 bp, synthetic construct
  misc_feature 1..483: note = Description of Artificial Sequence: Synthetic coding sequence
  source 1..483: mol_type = other DNA
atgagcagcgccatgctggtgacctgcctgcctgaccccagcagcagcttcagagaagatgccccccggccccctgtgcctggagaggagggggagaccccaccctgccagcccggggtgggcaagggccaggtgaccaagcccatgcctgtgagcagcaacaccaggagaaatgaagatggcctgggggagcctgagggccgggccagcccagacagccccctgacccgctggaccaagagcctgcacagcctgctgggggaccaggatggagcctacctgttccgcaccttcctggagcgggagaagtgtgtggacaccctggacttctggtttgcctgcaatggcttccggcagatgaacctgaaggacaccaagaccctgcgggtggtgaatgacttctgccacgacatcctcttctacctgtactgcaagctgtgcatcatcaagagcagcttcaaggagaactacctggtgcagtag

SEQ ID NO: 144745 - DNA, 921 bp, synthetic construct
  misc_feature 1..921: note = Description of Artificial Sequence: Synthetic coding sequence
  source 1..921: mol_type = other DNA
atgtctgaggtgaccaggagcctgctgcagcgctggggcgccagcttcagaagaggagctgactttgacagctggggccagctggtggaggccattgatgagtaccagatcctggcccggcacctgcagaaggaggcccaggcccagcacaacaacagcgagttcacagaggagcagaagaagaccatcggcaagatcgccacctgcctggagctgcggtctgctgccctgcagagcacccagagccaggaggagttcaagctggaggacctgaagaagctggagcccatcctgaagaacatcctgacctacaacaaggagttcccctttgatgtgcagcctgtgcccctgcggcgcatcctggcccctggagaggaggagaacctggagtttgaagaagatgaggaggagggcggggccggggccggcagcccagacagcttccctgcccgggtgcccggcaccctgctgccccggctgcccagcgagcccggcatgaccctgctgaccatcagaattgagaagattggcctgaaggatgctggccagtgcatcgacccctacatcaccgtgtctgtgaaggacctgaatggaattgacctgacccctgtgcaggacacccctgtggccagcaggaaggaggacacctacgtgcacttcaacgtggacatcgagctgcagaagcacgtggagaagctgaccaagggagctgccatcttctttgagttcaagcactacaagcccaagaagcgcttcaccagcaccaagtgctttgccttcatggagatggatgagatcaagccaggccccatcgtgattgagctgtacaagaagcccacagacttcaagaggaagaagctgcagctgctgaccaagaagcccctgtacctgcacctgcaccagaccctgcacaaggagtag

SEQ ID NO: 144746 - DNA, 675 bp, synthetic construct
  misc_feature 1..675: note = Description of Artificial Sequence: Synthetic coding sequence
  source 1..675: mol_type = other DNA
atgtctgaggtgaccaggagcctgctgcagcgctggggcgccagcttcagaagaggagctgactttgacagctggggccagctggtggaggccattgatgagtaccagatcctggcccggcacctgcagaaggaggcccaggcccagcacaacaacagcgagttcacagaggagcagaagaagaccatcggcaagatcgccacctgcctggagctgcggtctgctgccctgcagagcacccagagccaggaggagttcaagctggaggacctgaagaagctggagcccatcctgaagaacatcctgacctacaacaaggagttcccctttgatgtgcagcctgtgcccctgcggcgcatcctggcccctggagaggaggagaacctggagtttgaagaagatgaggaggagggcggggccggggccggcagcccagacagcttccctgcccgggtgcctggagctgccatcttctttgagttcaagcactacaagcccaagaagcgcttcaccagcaccaagtgctttgccttcatggagatggatgagatcaagccaggccccatcgtgattgagctgtacaagaagcccacagacttcaagaggaagaagctgcagctgctgaccaagaagcccctgtacctgcacctgcaccagaccctgcacaaggagtag

SEQ ID NO: 144747 - DNA, 849 bp, synthetic construct
  misc_feature 1..849: note = Description of Artificial Sequence: Synthetic coding sequence
  source 1..849: mol_type = other DNA
atgattgccacagaggccgtggtgcgggccgcccagggcctggcccggcacctgcagaaggaggcccaggcccagcacaacaacagcgagttcacagaggagcagaagaagaccatcggcaagatcgccacctgcctggagctgcggtctgctgccctgcagagcacccagagccaggaggagttcaagctggaggacctgaagaagctggagcccatcctgaagaacatcctgacctacaacaaggagttcccctttgatgtgcagcctgtgcccctgcggcgcatcctggcccctggagaggaggagaacctggagtttgaagaagatgaggaggagggcggggccggggccggcagcccagacagcttccctgcccgggtgcccggcaccctgctgccccggctgcccagcgagcccggcatgaccctgctgaccatcagaattgagaagattggcctgaaggatgctggccagtgcatcgacccctacatcaccgtgtctgtgaaggacctgaatggaattgacctgacccctgtgcaggacacccctgtggccagcaggaaggaggacacctacgtgcacttcaacgtggacatcgagctgcagaagcacgtggagaagctgaccaagggagctgccatcttctttgagttcaagcactacaagcccaagaagcgcttcaccagcaccaagtgctttgccttcatggagatggatgagatcaagccaggccccatcgtgattgagctgtacaagaagcccacagacttcaagaggaagaagctgcagctgctgaccaagaagcccctgtacctgcacctgcaccagaccctgcacaaggagtag

SEQ ID NO: 144748 - DNA, 2685 bp, synthetic construct
  misc_feature 1..2685: note = Description of Artificial Sequence: Synthetic coding sequence
  source 1..2685: mol_type = other DNA
atggcctggcgctgccccaggatgggccgggtgcccctggcctggtgcctggccctgtgtggctgggcctgcatggccccccggggcacccaggccgaggagagcccctttgtgggcaaccctggcaacatcactggagcccggggcctgaccggcaccctgcgctgccagctgcaggtgcagggcgagcccccagaggtgcactggctgagagatggccagatcctggagctggccgacagcacccagacccaggtgcccctgggggaggatgagcaggatgactggatcgtggtgtcccagctgcgcatcaccagcctgcagctgagtgacaccggccagtaccagtgcctggtgttcctgggccaccagacctttgtgtcccagcccggctacgtgggcctggagggcctgccctacttcctggaggagcctgaggacagaacagtggccgccaacacccccttcaacctgagctgccaggcccagggccccccagagcctgtggacctgctgtggctgcaggatgctgtgcccctggccacagcccctggccacggcccccagaggagcctgcacgtgcccggcctgaacaagaccagcagcttcagctgtgaggcccacaatgccaagggcgtgaccaccagcaggacagccaccatcaccgtgctgccccagcagcccaggaacctgcacctggtgtcccggcagcccacagagctggaggtggcctggaccccaggcctgagcggcatctaccccctgacccactgcaccctgcaggccgtgctgagcaatgatggcatgggcatccaggccggggagccagaccccccagaggagcccctgaccagccaggcctctgtgcccccccaccagctgcggctgggcagcctgcacccccacaccccctaccacatccgggtggcctgcaccagcagccagggccccagctcctggacccactggctgcctgtggagaccccagagggcgtgcccctgggccccccagagaacatcagcgccaccagaaatggcagccaggcctttgtgcactggcaggagccccgggcccccctgcagggcaccctgctgggctaccgcctggcctaccagggccaggacaccccagaggtgctgatggacatcggcctgcggcaggaggtgaccctggagctgcagggagatggctctgtgagcaacctgactgtgtgtgtggccgcctacacagctgctggagatggcccctggagcctgcctgtgcccctggaggcctggaggcctggccaggcccagcctgtgcaccagctggtgaaggagcccagcaccccagccttctcctggccctggtggtacgtgctgctgggcgctgtggtggccgccgcctgtgtgctgatcctggccctcttcctggtgcacaggaggaagaaggagaccaggtatggagaggtgtttgagcccaccgtggagcggggggagctggtggtgcgctacagagtgaggaagagctacagcaggaggaccacagaggccaccctgaacagcctgggcatcagcgaggagctgaaggagaagctgagagatgtgatggtggacagacacaaggtggccctgggcaagaccctgggggagggggagtttggagctgtgatggagggccagctgaaccaggatgacagcatcctgaaggtggccgtgaagaccatgaagatcgccatctgcaccaggtctgagctggaggacttcctgtctgaggccgtgtgcatgaaggagtttgaccaccccaacgtgatgaggctgattggagtgtgcttccagggcagcgagcgggagagcttccctgcccctgtggtgatcctgcccttcatgaagcatggagacctgcacagcttcctgctgtacagccggctgggggaccagcctgtgtacctgcccacccagatgctggtgaagttcatggctgacatcgccagcggcatggagtacctgagcaccaagcgcttcatccaccgggacctggccgccaggaactgcatgctgaatgaaaacatgtctgtgtgtgtggccgactttggcctgagcaagaagatctacaatggagactactaccggcagggccgcatcgccaagatgcctgtgaagtggatcgccatcgagagcctggccgacagagtgtacaccagcaagagtgatgtgtggagctttggagtgaccatgtgggagatcgccacccggggccagaccccctacccaggagtggagaacagcgagatctatgactacctgcggcagggcaaccggctgaagcagcctgctgactgcctggatggcctgtatgccctgatgagccgctgctgggagctgaacccccaggaccggcccagcttcacagagctgcgggaggacctggagaacaccctgaaggccctgcccccagcccaggagccagatgagatcctgtatgtgaacatggatgaaggaggcggctacccagagcccccaggagctgctggaggagctgacccccccacccagcctgaccccaaggacagctgcagctgcctgacagctgctgaggtgcaccctgctggccgctacgtgctgtgccccagcaccacccccagccctgcccagcctgctgaccggggcagccctgctgcccctggccaggaggatggagcctag

SEQ ID NO: 144749 - DNA, 2658 bp, synthetic construct
  misc_feature 1..2658: note = Description of Artificial Sequence: Synthetic coding sequence
  source 1..2658: mol_type = other DNA
atggcctggcgctgccccaggatgggccgggtgcccctggcctggtgcctggccctgtgtggctgggcctgcatggccccccggggcacccaggccgaggagagcccctttgtgggcaaccctggcaacatcactggagcccggggcctgaccggcaccctgcgctgccagctgcaggtgcagggcgagcccccagaggtgcactggctgagagatggccagatcctggagctggccgacagcacccagacccaggtgcccctgggggaggatgagcaggatgactggatcgtggtgtcccagctgcgcatcaccagcctgcagctgagtgacaccggccagtaccagtgcctggtgttcctgggccaccagacctttgtgtcccagcccggctacgtgggcctggagggcctgccctacttcctggaggagcctgaggacagaacagtggccgccaacacccccttcaacctgagctgccaggcccagggccccccagagcctgtggacctgctgtggctgcaggatgctgtgcccctggccacagcccctggccacggcccccagaggagcctgcacgtgcccggcctgaacaagaccagcagcttcagctgtgaggcccacaatgccaagggcgtgaccaccagcaggacagccaccatcaccgtgctgccccagcagcccaggaacctgcacctggtgtcccggcagcccacagagctggaggtggcctggaccccaggcctgagcggcatctaccccctgacccactgcaccctgcaggccgtgctgagcaatgatggcatgggcatccaggccggggagccagaccccccagaggagcccctgaccagccaggcctctgtgcccccccaccagctgcggctgggcagcctgcacccccacaccccctaccacatccgggtggcctgcaccagcagccagggccccagctcctggacccactggctgcctgtggagaccccagagggcgtgcccctgggccccccagagaacatcagcgccaccagaaatggcagccaggcctttgtgcactggcaggagccccgggcccccctgcagggcaccctgctgggctaccgcctggcctaccagggccaggacaccccagaggtgctgatggacatcggcctgcggcaggaggtgaccctggagctgcagggagatggctctgtgagcaacctgactgtgtgtgtggccgcctacacagctgctggagatggcccctggagcctgcctgtgcccctggaggcctggaggcctgtgaaggagcccagcaccccagccttctcctggccctggtggtacgtgctgctgggcgctgtggtggccgccgcctgtgtgctgatcctggccctcttcctggtgcacaggaggaagaaggagacccgctacggggaggtgtttgagcccaccgtggagcggggggagctggtggtgcgctacagagtgaggaagagctacagcaggaggaccacagaggccaccctgaacagcctgggcatcagcgaggagctgaaggagaagctgagagatgtgatggtggacagacacaaggtggccctgggcaagaccctgggggagggggagtttggagctgtgatggagggccagctgaaccaggatgacagcatcctgaaggtggccgtgaagaccatgaagatcgccatctgcaccaggtctgagctggaggacttcctgtctgaggccgtgtgcatgaaggagtttgaccaccccaacgtgatgaggctcatcggcgtgtgcttccagggcagcgagcgggagagcttccctgcccctgtggtgatcctgcccttcatgaagcacggggacctgcacagcttcctgctgtacagccggctgggggaccagcctgtgtacctgcccacccagatgctggtgaagttcatggctgacatcgccagcggcatggagtacctgagcaccaagcgcttcatccaccgggacctggccgccaggaactgcatgctgaatgaaaacatgtctgtgtgtgtggccgactttggcctgagcaagaagatctacaacggggactactaccggcagggcagaattgccaagatgcctgtgaagtggatcgccatcgagagcctggccgacagagtgtacaccagcaagagtgatgtgtggagctttggagtgaccatgtgggagatcgccacccggggccagaccccctacccaggagtggagaacagcgagatctatgactacctgcggcagggcaaccggctgaagcagcctgctgactgcctggatggcctgtatgccctgatgagccgctgctgggagctgaacccccaggaccggcccagcttcacagagctgcgggaggacctggagaacaccctgaaggccctgcccccagcccaggagccagatgagatcctgtatgtgaacatggatgagggcggcggctacccagagcccccaggagctgctgggggcgctgacccccccacccagcctgaccccaaggacagctgcagctgcctgacagctgctgaggtgcaccctgctggccgctacgtgctgtgccccagcaccacccccagccctgcccagcctgctgaccggggcagccctgctgcccctggccaggaggatggagcctag

SEQ ID NO: 144750 - DNA, 2439 bp, synthetic construct
  misc_feature 1..2439: note = Description of Artificial Sequence: Synthetic coding sequence
  source 1..2439: mol_type = other DNA
atggagcccctgggcaactggaggagcctgcgggcccccctgccccccatgctgctgctgctgctgctgcaggtggccggccctgtgggcgccctggccgagaccctgctgaatgccccccgggccatgggcaccagcagcagcccccccagccctgcctctgtggtggcccctggcaccaccctgtttgaggagagccggctgcctgtgttcaccctggactacccccacgtgcagatcccctttgagatcaccctgtggatcctgctggccagcctggccaagattggcttccacctgtaccacaagctgcccaccatcgtgcctgagagctgcctgctgatcatggtgggcctgctgctgggcggcatcatcttcggcgtggatgagaagagccccccagccatgaagacagatgtgttcttcctgtacctgctgccccccatcgtgctggatgctggctacttcatgcccacccggcccttctttgagaacatcggcaccatcttctggtatgctgtggtgggcaccctgtggaacagcatcggcatcggcgtgtccctgtttggcatctgccagatcgaggccttcggcctgagtgacatcaccctgctgcagaacctgctgtttggcagcctcatctctgctgtggaccctgtggccgtgctggccgtgtttgagaacatccacgtgaatgagcagctgtacatcctggtgtttggagagagcctgctgaatgatgctgtgacagtggtgctgtacaacctcttcaagagcttctgccagatgaagaccatcgagaccattgatgtgtttgctggcatcgccaacttctttgtggtgggcattggaggagtgctgattggcatcttcctgggcttcatcgccgccttcaccacccgcttcacccacaacatccgggtgattgagcccctgtttgtgttcctgtacagctacctgagctacatcacagctgagatgttccacctgagcggcatcatggccatcacagcctgtgccatgaccatgaacaagtatgtggaggagaatgtgtcccagaagagctacaccaccatcaagtacttcatgaagatgctgagctctgtgtctgagaccctcatcttcatcttcatgggcgtgtccacagtgggcaagaaccacgagtggaactgggcctttgtgtgcttcaccctggccttctgcctgatgtggagggccctgggcgtgtttgtgctgacccaggtgatcaaccgcttccgcaccatccccctgaccttcaaggaccagttcatcatcgcctacggcggcctgcggggggccatctgctttgccctggtgttcctgctgcctgctgctgtgttccccaggaagaagctgttcatcacagctgccatcgtggtgatcttcttcaccgtcttcatcctgggcatcaccatccggcccctggtggagttcctggatgtgaagaggagcaacaagaagcagcaggccgtgtctgaggagatctactgccgcctgtttgaccacgtgaagacaggaattgaagatgtgtgtggccactggggccacaacttctggagggacaagttcaagaagtttgatgacaagtacctgaggaagctgctgatccgggagaaccagcccaagagcagcatcgtgtccctgtacaagaagctggagatcaagcacgccatcgagatggccgagaccggcatgatcagcacagtgcccacctttgccagcctgaatgactgccgggaggagaagatcaggaaggtgaccagcagcgagacagatgagatccgggagctgctgagcaggaacctgtaccagatccggcagaggaccctgagctacaacagacacagcctgacagctgacaccagcgagcggcaggccaaggagatcctgatcagaagaagacacagcctgcgggagagcatcaggaaggacagcagcctgaaccgggagcaccgggccagcaccagcaccagccgctacctgagcctgcccaagaacaccaagctgcctgagaagctgcagaagaggaggaccatcagcattgctgatggcaacagcagtgacagtgatgctgatgctggcaccaccgtgctgaacctgcagccccgggcccggcgcttcctgcctgagcagttcagcaagaagagcccccagagctacaagatggagtggaagaatgaggtggatgtggacagcggccgggacatgcccagcaccccacccaccccccacagccgggagaagggcacccagaccagcggcctgctgcagcagcccctgctgagcaaggaccagagcggcagcgagcgggaggacagcctgacagagggcatcccccccaagcccccaccccggctggtgtggagggccagcgagcccggcagcaggaaggccaggtttggaagtgagaagccctag

SEQ ID NO: 144751 - DNA, 681 bp, synthetic construct
  misc_feature 1..681: note = Description of Artificial Sequence: Synthetic coding sequence
  source 1..681: mol_type = other DNA
gctgagggcaagtggggcctggcccacggccgggcagaggcccacgtgtggccaggccagggcggctggaggctgggccccccccagggccgctggacaggcagcagccccctgctggacatcgtgggcggcaggaaggcccggccccggcagttccccttcctggccagcatccagaaccagggccgccacttctgtggcggggccctgatccacgccaggtttgtgatgacagctgccagctgcttccagagccagaaccctggggtgtccacagtggtgctgggcgcctatgacctgcggcggcgggagcggcagagccggcagaccttcagcatcagctccatgtctgaaaatggctatgacccccagcagaacctgaatgacctgatgctgctgcagctggaccgggaggccaacctgaccagctctgtgaccatcctgcccctgcccctgcagaatgccaccgtggaggccggcacccgctgccaggtggccggctggggcagccagaggtctgggggccgcctgagccgcttccccaggtttgtgaatgtgacagtgaccccagaggaccagtgccggcccaacaacgtgtgcacaggagtgctgacccggcggggcggcatctgcaatgtgtctgccccctgtggcggccggcggggccctgagcgctactag

SEQ ID NO: 144752 - DNA, 7875 bp, synthetic construct
  misc_feature 1..7875: note = Description of Artificial Sequence: Synthetic coding sequence
  source 1..7875: mol_type = other DNA
atgttcagaagagcccggctgtctgtgaagcccaacgtgcggcctggggtgggcgcccggggcagcacagccagcaacccccagaggggccgggagagcccccggcccccagaccctgccacagattctgccagcaagccagctgagcccacagatgtgcccaccgtggactttggaggagctgagccccaggagaaggcccccaggagcagcacagagaagacaggaggagacaatgatgtggaggagagcagccgcagcagcagcacagtgtcccagaggaggaagaggatcagcagcaccagcagcctggtgaagagctctgtgtctgtgcccagcgagagccaccccctgagcaccatcaaccaggaggccccccagcccacagccaccagcaccaaggagaagcagccctgcagcgaccgctaccgcatctacaaggcccagaagctgcgggagatgctgaaggaggagctgaggaaggagaagaagcagtggaagaacaagtatgccatcaatgaaagccagaggcccccagacaggagcaagatgaccatgagggacttcatctactacctgcctgacaacaaccccatgaccagcagcctggagcaggagaagaagacagagaagcccagcacccctgtgcagacccgggagcaggagggcaagagcaccccaaatgctgaggacaatgagatggaggaggagacagatgatggccccctgctggtgccccgggtgaaggtggccgaggatggcagcatcatcctggatgaggagagcctgactgtggaggtgctgcggaccaagggcccctgtgtggtggaggagaatgaccccatctttgagcggggcagcaccaccacctacagcagcttcaggaagaactactacagcaagccctggagcaacaaggagacagacatgttcttcctggccatctccatggtgggcacagacttctccatgattggccagctgttcccccaccgggccagaattgagatcaagaacaagttcaagcgggaggagaagaccaacggctggagaattgacaaggccttccaggagaagaggccctttgattttgacttctttgcccacctgctgcagaaggtgctggccgaggaggagaagaggaagcagaagtctgtgaagaaccacagcctgaaggagaagaagagcaccaagcccaggaagaatgtgaaggtgaagaaggtggcctgtgagggcgtgaacaatgaccctgatgagagcatgagcagccgcatcagtgacacagagaggagccagaaggatgcccagacagtggaggaggagagcctgaccctgagccgggaggatgctgagcaggtggccctggaggtggacctgaaccagaagaagagaagaaggaagaagcaggatggagccaatgagctgggcgtgaacaacctgctggagaatgccaccgtgcaggccggccccagcaagggggagaagcacaagaacaagtgccaggccatccggcctgagctgaaggagggagaatgttccaaggagcagatgctgagctgcacccagaacattgatggcatcgtgggctttgccagcacagagaaggtggagaagaggacagaccccatcctgagcctgagcaaccagcaggatgccacctctgtggccacagagagcagcgagagcagcaccagtgacctgcccagctttgaggtgggcatccgggccctgtgtgaggtgaacaatgctgagggcagctgcatcgaggagagaaatgtggacctgaagaacaacagcctggagattgaccagacagaaaatgtgaagcccatgctgcggggccgcttccagaggcccaagcccaacctgagccgggccggcaagaagtctgtgctgagccagggcaagacagaaagtgagagcaagaacagccacagcaagacctctgtggagaagaaccacgtggagaaggacaagatgaacaccctggacatcctgaggatggagaccacagagcgggagaaccctgaggccgagaccgtgtctgtgctgggggagaagaactgcctgcaggagggcagccagctgaaggccctgcggcctgtgcaggtgcggggccgcctgcagaagcccaagcccaatgccggcaaggctgctgagaggaaggagatcctgatcagccaggaggagattggagccaacgtggagaagaatgaaaatgaaagctgtgccgaccgggacaccccccagcacatggaggaccagagcaggaaggactttgaggaggaggatgtgatcctgcagcctgagaagaatgacagcttccagaatgtgcagccagatgagcccaaggtgctgaatgaatgtctgtctgtgcaggagaacaacaaggccaacaagctgaaccaggtgcccatcctgcggacccgcttccagaagcccaagcccaacatcggccggggcaccggccggcgggagatcagcagcaaggaggaggtgctggagaagatcctggtgtctggagagatggctgctgccctgcgggagaccgtgcggctggacaccagccccaaggagatggtgcctgctgagatcaacaccaaggagatgcagagcgacctgaaggagactggaagaagagccatcagcccccgggagaagatcctggatgtgattgatgacaccatcgagatggagaccggcctgaaggccatgggccgggagatctgcctgcgggagaagaccccagaggtgattgatgccacagaggagattgacaaggacctggaggaggccggccggcgggagatcagcccccagaagaatggacctgaggaggtgaagcccctgggggaggtggagacagacctgaaggccactggaaatgaaagcagcccccgggagaagaccccagaggtgacagatgccacagaggagattgacaagaacctggaggagactggaagaaggaagatcagcccccgggagaatggacctgaggaggtgaagcctgtggatgagatggagacagacctgaatgccaccggccgggagagcagcccccgggagaagaccccagaggtgattgatgccacagaggagattgacctggaggagacagagcgggaggtgagcccccaggagaatggcctggaggaggtgaagcccctgggggagatggagacagacctgaaggccaccggccgggacagcttcccccggggcaagaccccagaggtgattgatgccatcgaggagattgaaattgacctggaggagacagagcgggagatcagcccccaggagaatggcctggaggaggtgaagcccctgggggagatgcagacagacctgaaggccaccggccgggagatcagcccccgggagaagaccccagaggtgattgatgccacagaggagattgacaaggacctggaggagaccggccggcgggagatcagcccagaagaaaatggacctgaggaggtgaagcctgtggatgagatggagacagacctgaagaccaccggccgggagggcagcagccgggagaagacccgggaggtgattgatgctgctgaggtgattgaaacagacctggaggagacagagcgggagatcagcccccaggagaatggacctgaggaggtgaagcctgtgggcaagatggagacagacctgaaggagatccgggaggagatcagccagcgggagaaggtgctggccgagttcagcgccatccgggagaaggagattgacctgaaggagaccgggaagagggacatccccatcatggagaaggtgtctgggaagatggctgtggtggaggagatggaggccgacctgaaggagaccgggaaggagaacttccgggagcggggcagcgaggagatctgtgtgacagaggagaaggtggccgagctgaagcagacaggcaagacagacatcagcccccgggagaatgagctggaggagaccagcaccagccggcagacagacacccacctgatgcagagcggcagcaatgacttctctgctgtgcccagcctggacatccagaacatcagcagcgaggtgctgtccatgatgcacacccctgtggaggagaagagaaattctgagaaggaggtgagcagccacttcagccacttcaagatcagcagccagacccatgaaagtgacaagacagaggtgcagggcatccagagcccagatgtgcctgagcagttcagtgacatcaacctgagcaagagcctgccccaggagcagaagcccctggagatcaagccagccccctttgtgcgcagccgcttcaagaggcccaagcccaacctggcccgggccgccctgaagcgggagaccacagaaagtgagaagtacatctatgagaagaagtctgagaccaagaagatggagaccatcgtgatgcaggagaacaatgagcagacagacaccctgcccagccagcatgatgaggccagcctgatgatcagccgggagaaggacaccctgggccacagaaatgaggaggccgtcatcctgccctgcacccagacagaaagaaacctgagccccagcaacagctgtgagcccaaggaggagagccagagcgcccctgtgcagaagaatgattctgtggtgtctgtgggcaccaacaacgtgaacaccttccagcaggagatgaaggagagcgtcatccagacagcccggcaggtgcggggccgcctgcagaggccccggcccaacatcaggaagacaggccagaggcagatcgtggacaagggggaggccaagggcatcatcaaggagggccgcaccatcctgcccaaggatgaaacagagaagaaggtgctgactgtgagcaacagccagattgaaacagaaattgaggtgcccagcagcgctgtgcctgagcacaggatgtatgagaaccagagccaggtggtgctggtggagaacctgcacgtgaacaagaccaatgagaccatcagacatgagaacaagccctacgtgcccagcagcgcccagatgaccaggaggaagttccagaaggccaagcccaacctgggccgggcccacagcaagaaggaggagcctgtgctggagaaggtgaccacagaccagagcaaggagggcaagccagaggaccacctgctgcagaagggggccagcaacacccagctgctgctgaaggagaaggccgagctgctgaccagcctggaggtgtctgccaggaaggactgtgtgggcagcaaggagagcgccctggccaagattgatgctgagctggaggaggtgggccccagccggcgggtgggggaggagaccgtgggggacaacagccccagctctgtggtggaggagcagtacctgaacaagctgaccagctgcccccagcccctgaatgagaccagctacagcaagatcgccctggatggcaagaccaccatcagcagcaccagtgaatatgaaagaaacagaggagagcggcgcagccacaagaagttcaagcccaacgtgacccggggccggggcagcaagagggtgcggggcaagaccagcaagaaggagccccgggccagcaaggccatgctggtgaccctgcgggccagccaggaggaggatgatgatgctgatgactttgaaagtgactatgaggaggagagctaccacctggcccctgaggaggtgaacaaggcccctgtgtttgtgcctgtgggcctgcggagccctgagcctgtgtctgcccagatcgaggagaccatggaggagctggagatcaccgtgaatgtgcctgatgtgggctgcatcgctgtggtggagcacgagctgcccaacacagatgtgaccacagaggagatgaagcaggaggagaacctgtctgtgccctttgagatgaccaccagcgagcacatccaggatgagcccggcaccaatgatggcagcacagaagctgccatcaccctgctgaccatgggagacctggtgctgcagagcgagatcagcagcgagcagggagatgtgggcgtgtgcatcatcccccacgtgcacagcaaggacaagagccacatccccagcagcctggacaacgtgaaccacaagatcgtgcatgagtgccaggagctgagcagccctgtgatcaccaccagccctgccagctttgaggagaacaagatcgtgctggaggagcagagcagccgggaggagatcagcctgatggagaaggtgaaggaaaatgccacccccaccaggaacaccatcagcaaggtgaccagcaacctgcgcatccgcagccggctggccaagcccaagcccaacctggagaagaccctgggcaccaaccggctggatgactaccaggaggtgagcagcctgtgtgtgaccaagggagctgagatggagacccagcgggagacagagaagaatgccagcaaggccacagagctggagaacaagaacctgggccctgtgaccacagctgagaacaaggaccagagcaagctggcctgtgtgcacggcatcaagggcaccagcatcagcagcgaggtgaacctgacagaaagaaatgaaaaccaggaggagagcagccaggaggtgcacatgctgtctgtggcccctgtggccagcagcgagaccggcccctgcaccctgggcctggaccggggcctgggagaaaattctgtggaggagccccagatcaaggacagcaaaggagacagcgtgctgaccctgcctgtgcctgagtacacccccaccagcatccctgaggtgcagcaggagaacatcatcaacccccaggacctgactgtgaacctggtggccaacgtgccccaggatggagaagatgagcaggccttcatcctgaccctggtggagatcccagccaatgctgtggaggagttcacagatgccacagcccagttcatgcccaaccccctgctgcctgcccccatcctggtgaagtctgtgaacacagaggagcggggggacatgagcatctgcctgcctgccacctctgtgggccaggatgccatgggcctgagcatcagcggccgggacaacagcaagaagcccccagacaacctggacctggtgtccaggaagcgcttccagtgccgcctggacaagaatgaccacatccccccagccaagaagaggagcctgaccctgagagatgactgccaggagtacaccacagaggtgcacagcaaggagctgaccaacgtgtttgaggagactggagagagccacaagggccaggacatcttcctgaccagcggcagcaccctgaccaccccagagccccagaggcagcaggtggaggccgccttccagagccggggcagccgcagcccagatgcctgcatggacaagaatgtgccccagctgccccaggatgagatgattgtgtctgacaaggaggagaggacagatgctgcccccaagagccagcagatggacagcaggaccagcagcagcaaggccagcctgagccggcccggccggcggcccctgggcttcctgagcctcatctgcagcaagaacagcctggagagtgatgagcccatgcaggtgcacagcaagaagaggctgaagcccctcatccctggcctgaggaagaagctgaagaggagcaaccccttcaatgaaagccaggagaagaaccgggagagcagtgacctgctgcccagccccagcgtcatcaccacccagagcgagaacatcagcagcagcgccacccaggtgtcctgtgaccagcccctgctgaaggagggctacaagagcgcccagaagagggccccccagggcgaggccaccaccgtgtctgagtacttcttcaatgacatcttcatcgaggtggatgaaacagaatag

SEQ ID NO: 144753 - DNA, 1392 bp, synthetic construct
  misc_feature 1..1392: note = Description of Artificial Sequence: Synthetic coding sequence
  source 1..1392: mol_type = other DNA
atgctggtgaccctgcgggccagccaggaggaggatgatgatgctgatgactttgaaagtgactatgaggaggagagctaccacctggcccctgaggaggtgaacaaggcccctgtgtttgtgcctgtgggcctgcggagccctgagcctgtgtctgcccagatcgaggagaccatggaggagctggagatcaccgtgaatgtgcctgatgtgggctgcatcgctgtggtggagcacgagctgcccaacacagatgtgaccacagaggagatgaagcaggaggagaacctgtctgtgccctttgagatgaccaccagcgagcacatccaggatgagcccggcaccaatgatggcagcacagaggccgccatcaccctgctgaccatgggagacctggtgctgcagagcgagatcagcagcgagcagggagatggagtgtgcatcatcccccacgtgcacagcaaggacaagagccacatccccagcagcctggacaacgtgaaccacaagatcgtgcatgagtgccaggagctgagcagccctgtgatcaccaccagccctgccagctttgaggagaacaagatcgtgctggaggagcagagcagccgggaggagatcagcctgatggagaaggtgaaggaaaatgccacccccaccaggaacaccatcagcaaggtgaccagcaacctgcgcatccgcagccggctggccaagcccaagcccaacctggagaagaccctgggcaccaaccggctggatgactaccaggaggtgagcagcctgtgtgtgaccaagggagctgagatggagacccagcgggagacagagaagaatgccagcaaggccacagagctggagaacaagaacctgggccctgtgaccacagctgagaacaaggaccagagcaagctggcctgtgtgcacggcatcaagggcaccagcatcagcagcgaggtgaacctgacagaaagaaatgaaaaccaggaggagagcagccaggaggtgcacatgctgtctgtggcccctgtggccagcagcgagaccggcccctgcaccctgggcctggaccggggcctgggagaaaattctgtggaggagccccagatcaaggacagcaaaggagacagcgtgctgaccctgcctgtgcctgagtacacccccaccagcatccctgaggtgcagcaggagaacatcatcaacccccaggacctgactgtgtttgtgtaccagcagctgcagctggtgaagatgccctgggtgtacctgttcctggaggagatcatcctgaagagccgcctcatcatctggatcctgtacctgggccgggacttcaatgccggcctcatcaagatgaccaccttcctgctgcccaagaatgtgcacagcctgtag

SEQ ID NO: 144754 - DNA, 2445 bp, synthetic construct
  misc_feature 1..2445: note = Description of Artificial Sequence: Synthetic coding sequence
  source 1..2445: mol_type = other DNA
atgttcagaagagcccggctgtctgtgaagcccaacgtgcggcctggggtgggcgcccggggcagcacagccagcaacccccagaggggccgggagagcccccggcccccagaccctgccacagattctgccagcaagccagctgagcccacagatgtgcccaccgtggactttggaggagctgagccccaggagaaggcccccaggagcagcacagagaagacaggaggagacaatgatgtggaggagagcagccgcagcagcagcacagtgtcccagaggaggaagaggatcagcagcaccagcagcctggtgaagagctctgtgtctgtgcccagcgagagccaccccctgagcaccatcaaccaggaggccccccagcccacagccaccagcaccaaggagaagcagccctgcagcgaccgctaccgcatctacaaggcccagaagctgcgggagatgctgaaggaggagctgaggaaggagaagaagcagtggaagaacaagtatgccatcaatgaaagccagaggcccccagacaggagcaagatgaccatgagggacttcatctactacctgcctgacaacaaccccatgaccagcagcctggagcaggagaagaagacagagaagcccagcacccctgtgcagacccgggagcaggagggcaagagcaccccaaatgctgaggacaatgagatggaggaggagacagatgatggccccctgctggtgccccgggtgaaggtggccgaggatggcagcatcatcctggatgaggagagcctgactgtggaggtgctgcggaccaagggcccctgtgtggtggaggagaatgaccccatctttgagcggggcagcaccaccacctacagcagcttcaggaagaactactacagcaagccctggagcaacaaggagacagacatgttcttcctggccatctccatggtgggcacagacttctccatgattggccagctgttcccccaccgggccagaattgagatcaagaacaagttcaagcgggaggagaagaccaacggctggagaattgacaaggccttccaggagaagaggccctttgattttgacttctttgcccacctgctgcagaaggtgctggccgaggaggagaagaggaagcagaagtctgtgaagaaccacagcctgaaggagaagaagagcaccaagcccaggaagaatgtgaaggtgaagaaggtggcctgtgagggcgtgaacaatgaccctgatgagagcatgagcagccgcatcagtgacacagagaggagccagaaggatgcccagacagtggaggaggagagcctgaccctgagccgggaggatgctgagcaggtggccctggaggtggacctgaaccagaagaagagaagaaggaagaagcaggatggagccaatgagctgggcgtgaacaacctgctggagaatgccaccgtgcaggccggccccagcaagggggagaagcacaagaacaagtgccaggccatccggcctgagctgaaggagggagaatgttccaaggagcagatgctgagctgcacccagaacattgatggcatcgtgggctttgccagcacagagaaggtggagaagaggacagaccccatcctgagcctgagcaaccagcaggatgccacctctgtggccacagagagcagcgagagcagcaccagtgacctgcccagctttgaggtgggcatccgggccctgtgtgaggtgaacaatgctgagggcagctgcatcgaggagagaaatgtggacctgaagaacaacagcctggagattgaccagacagaaaatgtgaagcccatgctgcggggccgcttccagaggcccaagcccaacctgagccgggccggcaagaagtctgtgctgagccagggcaagacagaaagtgagagcaagaacagccacagcaagacctctgtggagaagaaccacgtggagaaggacaagatgaacaccctggacatcctgaggatggagaccacagagcgggagaaccctgaggccgagaccgtgtctgtgctgggggagaagaactgcctgcaggagggcagccagctgaaggccctgcggcctgtgcaggtgcggggccgcctgcagaagcccaagcccaatgccggcaaggctgctgagaggaaggagatcctgatcagccaggaggagattggagccaacgtggagaagaatgaaaatgaaagctgtgccgaccgggacaccccccagcacatggaggaccagagcaggaaggactttgaggaggaggatgtgatcctgcagcctgagaagaatgacagcttccagaatgtgcagccagatgagcccaaggtgctgaatgaatgtctgtctgtgcaggagaacaacaaggccaacaagctgaaccaggtgcccatcctgcggacccgcttccagaagccctag

SEQ ID NO: 144755 - DNA, 2541 bp, synthetic construct
  misc_feature 1..2541: note = Description of Artificial Sequence: Synthetic coding sequence
  source 1..2541: mol_type = other DNA
atgttcagaagagcccggctgtctgtgaagcccaacgtgcggcctggggtgggcgcccggggcagcacagccagcaacccccagaggggccgggagagcccccggcccccagaccctgccacagattctgccagcaagccagctgagcccacagatgtgcccaccgtggactttggaggagctgagccccaggagaaggcccccaggagcagcacagagaagacaggaggagacaatgatgtggaggagagcagccgcagcagcagcacagtgtcccagaggaggaagaggatcagcagcaccagcagcctggtgaagagctctgtgtctgtgcccagcgagagccaccccctgagcaccatcaaccaggaggccccccagcccacagccaccagcaccaaggagaagcagccctgcagcgaccgctaccgcatctacaaggcccagaagctgcgggagatgctgaaggaggagctgaggaaggagaagaagcagtggaagaacaagtatgccatcaatgaaagccagaggcccccagacaggagcaagatgaccatgagggacttcatctactacctgcctgacaacaaccccatgaccagcagcctggagcaggagaagaagacagagaagcccagcacccctgtgcagacccgggagcaggagggcaagagcaccccaaatgctgaggacaatgagatggaggaggagacagatgatggccccctgctggtgccccgggtgaaggtggccgaggatggcagcatcatcctggatgaggagagcctgactgtggaggtgctgcggaccaagggcccctgtgtggtggaggagaatgaccccatctttgagcggggcagcaccaccacctacagcagcttcaggaagaactactacagcaagccctggagcaacaaggagacagacatgttcttcctggccatctccatggtgggcacagacttctccatgattggccagctgttcccccaccgggccagaattgagatcaagaacaagttcaagcgggaggagaagaccaacggctggagaattgacaaggccttccaggagaagaggccctttgattttgacttctttgcccacctgctgcagaaggtgctggccgaggaggagaagaggaagcagaagtctgtgaagaaccacagcctgaaggagaagaagagcaccaagcccaggaagaatgtgaaggtgaagaaggtggcctgtgagggcgtgaacaatgaccctgatgagagcatgagcagccgcatcagtgacacagagaggagccagaaggatgcccagacagtggaggaggagagcctgaccctgagccgggaggatgctgagcaggtggccctggaggtggacctgaaccagaagaagagaagaaggaagaagcaggatggagccaatgagctgggcgtgaacaacctgctggagaatgccaccgtgcaggccggccccagcaagggggagaagcacaagaacaagtgccaggccatccggcctgagctgaaggagggagaatgttccaaggagcagatgctgagctgcacccagaacattgatggcatcgtgggctttgccagcacagagaaggtggagaagaggacagaccccatcctgagcctgagcaaccagcaggatgccacctctgtggccacagagagcagcgagagcagcaccagtgacctgcccagctttgaggtgggcatccgggccctgtgtgaggtgaacaatgctgagggcagctgcatcgaggagagaaatgtggacctgaagaacaacagcctggagattgaccagacagaaaatgtgaagcccatgctgcggggccgcttccagaggcccaagcccaacctgagccgggccggcaagaagtctgtgctgagccagggcaagacagaaagtgagagcaagaacagccacagcaagacctctgtggagaagaaccacgtggagaaggacaagatgaacaccctggacatcctgaggatggagaccacagagcgggagaaccctgaggccgagaccgtgtctgtgctgggggagaagaactgcctgcaggagggcagccagctgaaggccctgcggcctgtgcaggtgcggggccgcctgcagaagcccaagcccaatgccggcaaggctgctgagaggaaggagatcctgatcagccaggaggagattggagccaacgtggagaagaatgaaaatgaaagctgtgccgaccgggacaccccccagcacatggaggaccagagcaggaaggactttgaggaggaggatgtgatcctgcagcctgagaagaatgacagcttccagaatgtgcagccagatgagcccaaggtgctgaatgaatgtctgtctgtgcaggagaacaacaaggccaacaagctgaaccaggtgcccatcctgcggacccgcttccagaagcccaagcccaacatcggccggggcaccggccggcgggagatcagcagcaaggaggaggtgctggagaagatcctgagcctgggcaagtggaggcagcactag

SEQ ID NO: 144756 - DNA, 6399 bp, synthetic construct
  misc_feature 1..6399: note = Description of Artificial Sequence: Synthetic coding sequence
  source 1..6399: mol_type = other DNA
atgagcagccgcatcagtgacacagagaggagccagaaggatgcccagacagtggaggaggagagcctgaccctgagccgggaggatgctgagcaggtggccctggaggtggacctgaaccagaagaagagaagaaggaagaagcaggatggagccaatgagctgggcgtgaacaacctgctggagaatgccaccgtgcaggccggccccagcaagggggagaagcacaagaacaagtgccaggccatccggcctgagctgaaggagggagaatgttccaaggagcagatgctgagctgcacccagaacattgatggcatcgtgggctttgccagcacagagaaggtggagaagaggacagaccccatcctgagcctgagcaaccagcaggatgccacctctgtggccacagagagcagcgagagcagcaccagtgacctgcccagctttgaggtgggcatccgggccctgtgtgaggtgaacaatgctgagggcagctgcatcgaggagagaaatgtggacctgaagaacaacagcctggagattgaccagacagaaaatgtgaagcccatgctgcggggccgcttccagaggcccaagcccaacctgagccgggccggcaagaagtctgtgctgagccagggcaagacagaaagtgagagcaagaacagccacagcaagacctctgtggagaagaaccacgtggagaaggacaagatgaacaccctggacatcctgaggatggagaccacagagcgggagaaccctgaggccgagaccgtgtctgtgctgggggagaagaactgcctgcaggagggcagccagctgaaggccctgcggcctgtgcaggtgcggggccgcctgcagaagcccaagcccaatgccggcaaggctgctgagaggaaggagatcctgatcagccaggaggagattggagccaacgtggagaagaatgaaaatgaaagctgtgccgaccgggacaccccccagcacatggaggaccagagcaggaaggactttgaggaggaggatgtgatcctgcagcctgagaagaatgacagcttccagaatgtgcagccagatgagcccaaggtgctgaatgaatgtctgtctgtgcaggagaacaacaaggccaacaagctgaaccaggtgcccatcctgcggacccgcttccagaagcccaagcccaacatcggccggggcaccggccggcgggagatcagcagcaaggaggaggtgctggagaagatcctggtgtctggagagatggctgctgccctgcgggagaccgtgcggctggacaccagccccaaggagatggtgcctgctgagatcaacaccaaggagatgcagagcgacctgaaggagactggaagaagagccatcagcccccgggagaagatcctggatgtgattgatgacaccatcgagatggagaccggcctgaaggccatgggccgggagatctgcctgcgggagaagaccccagaggtgattgatgccacagaggagattgacaaggacctggaggaggccggccggcgggagatcagcccccagaagaatggacctgaggaggtgaagcccctgggggaggtggagacagacctgaaggccactggaaatgaaagcagcccccgggagaagaccccagaggtgacagatgccacagaggagattgacaagaacctggaggagactggaagaaggaagatcagcccccgggagaatggacctgaggaggtgaagcctgtggatgagatggagacagacctgaatgccaccggccgggagagcagcccccgggagaagaccccagaggtgattgatgccacagaggagattgacctggaggagacagagcgggaggtgagcccccaggagaatggcctggaggaggtgaagcccctgggggagatggagacagacctgaaggccaccggccgggacagcttcccccggggcaagaccccagaggtgattgatgccatcgaggagattgaaattgacctggaggagacagagcgggagatcagcccccaggagaatggcctggaggaggtgaagcccctgggggagatgcagacagacctgaaggccaccggccgggagatcagcccccgggagaagaccccagaggtgattgatgccacagaggagattgacaaggacctggaggagaccggccggcgggagatcagcccagaagaaaatggacctgaggaggtgaagcctgtggatgagatggagacagacctgaagaccaccggccgggagggcagcagccgggagaagacccgggaggtgattgatgctgctgaggtgattgaaacagacctggaggagacagagcgggagatcagcccccaggagaatggacctgaggaggtgaagcctgtgggcaagatggagacagacctgaaggagatccgggaggagatcagccagcgggagaaggtgctggccgagttcagcgccatccgggagaaggagattgacctgaaggagaccgggaagagggacatccccatcatggagaaggtgtctgggaagatggctgtggtggaggagatggaggccgacctgaaggagaccgggaaggagaacttccgggagcggggcagcgaggagatctgtgtgacagaggagaaggtggccgagctgaagcagacaggcaagacagacatcagcccccgggagaatgagctggaggagaccagcaccagccggcagacagacacccacctgatgcagagcggcagcaatgacttctctgctgtgcccagcctggacatccagaacatcagcagcgaggtgctgtccatgatgcacacccctgtggaggagaagagaaattctgagaaggaggtgagcagccacttcagccacttcaagatcagcagccagacccatgaaagtgacaagacagaggtgcagggcatccagagcccagatgtgcctgagcagttcagtgacatcaacctgagcaagagcctgccccaggagcagaagcccctggagatcaagccagccccctttgtgcgcagccgcttcaagaggcccaagcccaacctggcccgggccgccctgaagcgggagaccacagaaagtgagaagtacatctatgagaagaagtctgagaccaagaagatggagaccatcgtgatgcaggagaacaatgagcagacagacaccctgcccagccagcatgatgaggccagcctgatgatcagccgggagaaggacaccctgggccacagaaatgaggaggccgtcatcctgccctgcacccagacagaaagaaacctgagccccagcaacagctgtgagcccaaggaggagagccagagcgcccctgtgcagaagaatgattctgtggtgtctgtgggcaccaacaacgtgaacaccttccagcaggagatgaaggagagcgtcatccagacagcccggcaggtgcggggccgcctgcagaggccccggcccaacatcaggaagacaggccagaggcagatcgtggacaagggggaggccaagggcatcatcaaggagggccgcaccatcctgcccaaggatgaaacagagaagaaggtgctgactgtgagcaacagccagattgaaacagaaattgaggtgcccagcagcgctgtgcctgagcacaggatgtatgagaaccagagccaggtggtgctggtggagaacctgcacgtgaacaagaccaatgagaccatcagacatgagaacaagccctacgtgcccagcagcgcccagatgaccaggaggaagttccagaaggccaagcccaacctgggccgggcccacagcaagaaggaggagcctgtgctggagaaggtgaccacagaccagagcaaggagggcaagccagaggaccacctgctgcagaagggggccagcaacacccagctgctgctgaaggagaaggccgagctgctgaccagcctggaggtgtctgccaggaaggactgtgtgggcagcaaggagagcgccctggccaagattgatgctgagctggaggaggtgggccccagccggcgggtgggggaggagaccgtgggggacaacagccccagctctgtggtggaggagcagtacctgaacaagctgaccagctgcccccagcccctgaatgagaccagctacagcaagatcgccctggatggcaagaccaccatcagcagcaccagtgaatatgaaagaaacagaggagagcggcgcagccacaagaagttcaagcccaacgtgacccggggccggggcagcaagagggtgcggggcaagaccagcaagaaggagccccgggccagcaaggccatgctggtgaccctgcgggccagccaggaggaggatgatgatgctgatgactttgaaagtgactatgaggaggagagctaccacctggcccctgaggaggtgaacaaggcccctgtgtttgtgcctgtgggcctgcggagccctgagcctgtgtctgcccagatcgaggagaccatggaggagctggagatcaccgtgaatgtgcctgatgtgggctgcatcgctgtggtggagcacgagctgcccaacacagatgtgaccacagaggagatgaagcaggaggagaacctgtctgtgccctttgagatgaccaccagcgagcacatccaggatgagcccggggtgtgcatcatcccccacgtgcacagcaaggacaagagccacatccccagcagcctggacaacgtgaaccacaagatcgtgcatgagtgccaggagctgagcagccctgtgatcaccaccagccctgccagctttgaggagaacaagatcgtgctggaggagcagagcagccgggaggagatcagcctgatggagaaggtgaaggaaaatgccacccccaccaggaacaccatcagcaaggtgaccagcaacctgcgcatccgcagccggctggccaagcccaagcccaacctggagaagaccctgggcaccaaccggctggatgactaccaggaggtgagcagcctgtgtgtgaccaagggagctgagatggagacccagcgggagacagagaagaatgccagcaaggccacagagctggagaacaagaacctgggccctgtgaccacagctgagaacaaggaccagagcaagctggcctgtgtgcacggcatcaagggcaccagcatcagcagcgaggtgaacctgacagaaagaaatgaaaaccaggaggagagcagccaggaggtgcacatgctgtctgtggcccctgtggccagcagcgagaccggcccctgcaccctgggcctggaccggggcctgggagaaaattctgtggaggagccccagatcaaggacagcaaaggagacagcgtgctgaccctgcctgtgcctgagtacacccccaccagcatccctgaggtgcagcaggagaacatcatcaacccccaggacctgactgtgaacctggtggccaacgtgccccaggatggagaagatgagcaggccttcatcctgaccctggtggagatcccagccaatgctgtggaggagttcacagatgccacagcccagttcatgcccaaccccctgctgcctgcccccatcctggtgaagtctgtgaacacagaggagcggggggacatgagcatctgcctgcctgccacctctgtgggccaggatgccatgggcctgagcatcagcggccgggacaacagcaagaagcccccagacaacctggacctggtgtccaggaagcgcttccagtgccgcctggacaagaatgaccacatccccccagccaagaagaggagcctgaccctgagagatgactgccaggagtacaccacagaggtgcacagcaaggagctgaccaacgtgtttgaggagactggagagagccacaagggccaggacatcttcctgaccagcggcagcaccctgaccaccccagagccccagaggcagcaggtggaggccgccttccagagccggggcagccgcagcccagatgcctgcatggacaagaatgtgccccagctgccccaggatgagatgattgtgtctgacaaggaggagaggacagatgctgcccccaagagccagcagatggacagcaggaccagcagcagcaaggccagcctgagccggcccggccggcggcccctgggcttcctgagcctcatctgcagcaagaacagcctggagagtgatgagcccatgcaggtgcacagcaagaagaggctgaagcccctcatccctggcctgaggaagaagctgaagaggagcaaccccttcaatgaaagccaggagaagaaccgggagagcagtgacctgctgcccagccccagcgtcatcaccacccagagcgagaacatcagcagcagcgccacccagagccccttctag

SEQ ID NO: 144757 - DNA, 1392 bp, synthetic construct; identical to SEQ ID NO: 144753
  misc_feature 1..1392: note = Description of Artificial Sequence: Synthetic coding sequence
  source 1..1392: mol_type = other DNA

SEQ ID NO: 144758 - DNA, 1518 bp, synthetic construct
  misc_feature 1..1518: note = Description of Artificial Sequence: Synthetic coding sequence
  source 1..1518: mol_type = other DNA
atgggcctggtgagcagcaagaagccagacaaggagaagcccatcaaggagaaggacaagggccagtggagccccctgaaggtgtctgcccaggacaaggatgccccacccctgccccccctggtggtgttcaaccacctgaccccacctcctccagatgagcacctggatgaggacaagcactttgtggtggccctgtatgactacacagccatgaatgaccgggacctgcagatgctgaagggggagaagctgcaggtgctgaagggcactggagactggtggctggcccggagcctggtgacaggccgggagggctacgtgcccagcaactttgtggcccgggtggagagcctggagatggagcgctggttcttccgcagccagggcaggaaggaggccgagcggcagctgctggcccccatcaacaaggccggcagcttcctgatccgggagagcgagaccaacaagggggccttcagcctgtctgtgaaggatgtgaccacccagggcgagctgatcaagcactacaagatccgctgcctggatgaaggaggctactacatcagcccccgcatcaccttccccagcctgcaggccctggtgcagcactacagcaagaagggagatggcctgtgccagaggctgaccctgccctgtgtgcggcctgccccccagaacccctgggcccaggatgagtgggagatcccccggcagagcctgcggctggtgaggaagctgggcagcggccagtttggagaggtgtggatgggctactacaagaacaacatgaaggtggccatcaagaccctgaaggagggcaccatgagccctgaggccttcctgggggaggccaacgtgatgaaggccctgcagcacgagcggctggtgcggctgtatgctgtggtgaccaaggagcccatctacatcgtgacagagtacatggcccggggctgcctgctggacttcctgaagacagatgagggcagccggctgagcctgccccggctgattgacatgtctgcccagattgctgagggcatggcctacattgaaagaatgaacagcatccaccgggacctgcgggccgccaacatcctggtgtctgaggccctgtgctgcaagattgctgactttggcctggcccgcatcattgattctgagtacacagcccaggagggcgccaagttccccatcaagtggacagcccctgaggccatccactttggagtcttcaccatcaaggcagatgtgtggagctttggagtgctgctgatggaggtggtgacctacggccgggtgccctacccaggcatgagcaaccctgaggtgatccggaacctggagcggggctacaggatgcccaggccagacacctgccccccagagctgtacagaggagtgattgctgagtgctggaggagcaggcctgaggagcggcccacctttgagttcctgcagagcgtgctggaggacttctacacagccacagagcggcagtatgagctgcagccctag

SEQ ID NO: 144759 - DNA, 1773 bp, synthetic construct
  misc_feature 1..1773: note = Description of Artificial Sequence: Synthetic coding sequence
  source 1..1773: mol_type = other DNA
atgggcctggtgagcagcaagaagccagacaaggagaagcccatcaaggagaaggacaagggccagtggagccccctgaaggtgtctgcccaggacaaggatgccccacccctgccccccctggtggtgttcaaccacctgaccccacctcctccagatgagcacctggatgaggacaagcactttgtggtggccctgtatgactacacagccatgaatgaccgggacctgcagatgctgaagggggagaagctgcaggtgctgaagggcactggagactggtggctggcccggagcctggtgacaggccgggagggctacgtgcccagcaactttgtggcccgggtggagagcctggagatggagcgctggttcttccgcagccagggcaggaaggaggccgagcggcagctgctggcccccatcaacaaggccggcagcttcctgatccgggagagcgagaccaacaagggggccttcagcctgtctgtgaaggatgtgaccacccagggcgagctgatcaagcactacaagatccgctgcctggatgaaggaggctactacatcagcccccgcatcaccttccccagcctgcaggccctggtgcagcactacagcaagaagggagatggcctgtgccagaggctgaccctgccctgtgtgcggcctgccccccagaacccctgggcccaggatgagtgggagatcccccggcagagcctgcggctggtgaggaagctgggcagcggccagtttggagaggtgtggatgggctactacaagaacaacatgaaggtggccatcaagaccctgaaggagggcaccatgagccctgaggccttcctgggggaggccaacgtgatgaaggccctgcagcacgagcggctggtgcggctgtatgctgtggtgaccaaggagcccatctacatcgtgacagagtacatggcccggggctgcctgctggacttcctgaagacagatgagggcagccggctgagcctgccccggctgattgacatgtctgcccagattgctgagggcatggcctacattgaaagaatgaacagcatccaccgggacctgcgggccgccaacatcctggtgtctgaggccctgtgctgcaagattgctgactttggcctggcccgcatcattgattctgagtacacagcccaggagggcgccaagttccccatcaagtggacagcccctgaggccatccactttggagtcttcaccatcaaggcagatgtgtggagctttggagtgctgctgatggaggtggtgacctacggccgggtgccctacccaggcatgagcaaccctgaggtgatccggaacctggagcggggctacaggatgcccaggccagacacctgccccccagagctgtacagaggagtgattgctgagtgctggaggagcaggcctgaggagcggcccacctttgactgcaccccaggccgggtgacccggcccctgtgtgccgccagctttgtggagggctgcaacagcgacctggcccggagcagtggagtgctgagccccagcaaggtgttcagaacaggcaagaggctgagcagcagcaaggcccctgtgctgggcacccccagggctggccgggtgcctgccagcgccccctgtgtggaccctgccctgccccgctaccgcagccagacaggcagccggggccggcagcagggccagccccagccccggctgcggagcagcacagctggcctcttctgcaacaaggtgacctctgtgaggtag

SEQ ID NO: 144760 - DNA, 615 bp, synthetic construct
  misc_feature 1..615: note = Description of Artificial Sequence: Synthetic coding sequence
  source 1..615: mol_type = other DNA
atggccacagccagccccagcgtcttcctgctgatggtgaatggccaggtggagagcgcccagtttcctgaatatgatgacctgtactgcaagtactgctttgtgtatggccaggactgggcccccacagctggcctggaggagggcatcagccagatcaccagcaagagccaggatgtgcggcaggccctggtgtggaacttccccattgatgtgaccttcaagagcaccaacccctacggctggccccagatcgtgctgtctgtgtatggcccagatgtgtttggaaatgatgtggtgcggggctatggagctgtgcacgtgcccttcagccctggccgccacaagaggaccatccccatgtttgtgcctgagagcaccagcaagctgcagaagttcacctcctggttcatgggccggcggcctgagtacacagaccccaaggtggtggcccagggcgagggccgggaggtgaccagggtgcgcagccagggctttgtgaccctgctcttcaacgtggtgaccaaggacatgaggaagctgggctatgacaccggccccagcgacacccagggcgtgctgggccccagccccccccagagcttcccccagtag

SEQ ID NO: 144761 - DNA, 462 bp, synthetic construct
  misc_feature 1..462: note = Description of Artificial Sequence: Synthetic coding sequence
  source 1..462: mol_type = other DNA
atggccacagccagccccagcgtcttcctgctgatggtgaatggccaggtggagagcgcccagtttcctgaatatgatgacctgtactgcaagtactgctttgtgtatggccaggactgggcccccacagctggcctggaggagggcatcagccagatcaccagcaagagccaggatgtgcggcaggccctggtgtggaacttccccattgatgtgaccttcaagagcaccaacccctacggctggccccagatcgtgctgtctgtgtatggcccagatgtgtttggaaatgatgtggtgcggggctatggagctgtgcacgtgcccttcagccctggccgccacaagaggaccatccccatgtttgtgcctgagagcaccagcaagctgcagaagttcaccagcctgtgcctggtggccagcagtgacctgcaggccgccccacccacagaggacaagtag

SEQ ID NO: 144762 - DNA, 486 bp, synthetic construct
  misc_feature 1..486: note = Description of Artificial Sequence: Synthetic coding sequence
  source 1..486: mol_type = other DNA
atggccacagccagccccagcgtcttcctgctgatggtgaatggccaggtggagagcgcccagtttcctgaatatgatgacctgtactgcaagtactgctttgtgtatggccaggactgggcccccacagctggcctggaggagggcatcagccagatcaccagcaagagccaggatgtgcggcaggccctggtgtggaacttccccattgatgtgaccttcaagagcaccaacccctacggctggccccagatcgtgctgtctgtgtatggcccagatgtgtttggaaatgatgtggtgcggggctatggagctgtgcacgtgcccttcagccctggccgccacaagaggaccatccccatgtttgtgcctgagagcaccagcaagctgcagaagttcacctcctggttcatgggccggcggcctgagtacacagaccccaaggtggtggcccagggcgagggccgggaggcccagcccggctag

SEQ ID NO: 144763 - DNA, 564 bp, synthetic construct
  misc_feature 1..564: note = Description of Artificial Sequence: Synthetic coding sequence
  source 1..564: mol_type = other DNA
atggccacagccagccccagcgtcttcctgctgatggtgaatggccaggtggagagcgcccagtttcctgaatatgatgacctgtactgcaagtactgctttgtgtatggccaggactgggcccccacagctggcctggaggagggcatcagccagatcaccagcaagagccaggatgtgcggcaggccctggtgtggaacttccccattgatgtgaccttcaagagcaccaacccctacggctggccccagatcgtgctgtctgtgtatggcccagatgtgtttggaaatgatgtggtgcggggctatggagctgtgcacgtgcccttcagccctggccgccacaagaggaccatccccatgtttgtgcctgagagcaccagcaagctgcagaagttcacctcctggttcatgggccggcggcctgagtacacagaccccaaggtggtggcccagggcgagggcagagaagatgaaaatgctgaggccgagatccccaggagcacctgggtgtccctgtgccccagccctgcctggctgatgctgcccttctgcccccagtag

SEQ ID NO: 144764 - DNA, 402 bp, synthetic construct
  misc_feature 1..402: note = Description of Artificial Sequence: Synthetic coding sequence
  source 1..402: mol_type = other DNA
ctgctgatggtgaatggccaggtggagagcgcccagtttcctgaatatgatgacctgtactgcaagtactgctttgtgtatggccaggactgggcccccacagctggcctggaggagggcatcagccagatcaccagcaagagccaggatgtgcggcaggccctggtgtggaacttccccattgatgtgaccttcaagagcaccaacccctacggctggccccagatcgtgctgtctgtgtatggcccagatgtgtttggaaatgatgtggtgcggggctacggggctgtgcacgtgcccttcagccctggccgccacaagaggaccatccccatgtttgtgcctgagagcaccagcaagctgcagaagttcaccaggtctgccagctgcagcacccactag

SEQ ID NO: 144765 - DNA, 615 bp, synthetic construct; identical to SEQ ID NO: 144760
  misc_feature 1..615: note = Description of Artificial Sequence: Synthetic coding sequence
  source 1..615: mol_type = other DNA

SEQ ID NO: 144766 - DNA, 444 bp, synthetic construct
  misc_feature 1..444: note = Description of Artificial Sequence: Synthetic coding sequence
  source 1..444: mol_type = other DNA
atgatgaccagcacagccagcacagccctgtgcacagccaggactggaccaccccagagggtgtggaggcggggcagccacaggagccacccccgggccaagatgtgtgggaagcactggtgtggcaccagccccctgatgagccccctgaaggcccccacccccacagctggccacaggagctgcagcgcctgcatggaccagatgtgcagcggcaccatgtggtttgaggccatgggcccctgcacctgccccagccacctggccggcaccaagggccccagcccctgcctgagccagaacctgcggctgaactgccgcagcctgcaggccggctcctggggcggcggccccagcacccagaccccccgctggtggctgcgggtgaaggccggcaagccacccagcggcctgtctgtgaaggacagctctgtgtccaggtag

SEQ ID NO: 144767 - DNA, 528 bp, synthetic construct
  misc_feature 1..528: note = Description of Artificial Sequence: Synthetic coding sequence
  source 1..528: mol_type = other DNA
atggccgaggtgcacgtgattggccagatcattggagccagcggcttcagcgagagcagcctcttctgcaagtggggcatccacactggagctgcctggaagctgctgtctggagtgcgggagggccagacccaggtggacaccccccagattggagacatggcctactggagccaccccatcgacctgcactttgccaccaagggcctgcagggctggccccggctgcacttccaggtgtggagccaggacagctttggccgctgccagctggccggctacggcttctgccacgtgcccagcagccctggcacccaccagctggcctgccccacctggaggcccctgggctcctggagggagcagctggcccgggcctttgtgggcggcggcccccagctgctgcacggggacaccatctacagcggggctgaccgctaccgcctgcacacagctgctgggggcaccgtgcacctggagatcggcctgctgctgaggaactttgacagatatggagtggagtgctag

SEQ ID NO: 144768 - DNA, 1452 bp, synthetic construct
  misc_feature 1..1452: note = Description of Artificial Sequence: Synthetic coding sequence
  source 1..1452: mol_type = other DNA
atgacagaggtggagtacacccagctgcagcacatcctgtgcagccacatggaggccgctgctgatggagagctggagacccggctgaacagcgccctgctggccgctgctggccctggagctggagctgggggctttgctgctgggggccagggcggggccgcccctgtgtaccctgtgctgtgccccagcgccctggccgcagatgccccctgcctgggccacatcgacttccaggagctgaggatgatgctgctgtctgaggccggggctgctgagaagaccagcggcggcggagatggagcccgggcccgggcagatggagctgccaaggagggcgctggagctgctgctgctgctgctggcccagatggagcccctgaggcccgggccaagccagctgtgcgggtgcggctggaggaccgcttcaacagcatcccagctgagcccccaccagccccccggggccctgagcccccagagcccggcggggccctgaacaacctggtgaccctcatccgccaccccagcgagctgatgaatgtgcccctgcagcagcagaacaagtgcacagccctggtgaagaacaagacagctgccaccaccacagccctgcagttcacctaccccctcttcaccaccaatgcctgcagcaccagcggcaacagcaacctgagccagacccagagcagcagcaacagctgcagcgtgctggaggccgccaagcaccaggacatcggcctgccccgggccttctccttctgctaccagcaggagattgagagcaccaagcagaccctgggcagcaggaacaaggtgctgcctgagcaggtgtggatcaaggtgggggaggccgccctgtgcaagcaggccctgaagaggaacagaagcaggatgaggcagctggacaccaacgtggagcggcgggccctgggggagatccagaatgtgggggagggcgccacagccacccagggcgcctggcagagcagcgagagcagccaggccaacctgggggagcaggcccagagcggcccccagggcggccgcagccagaggcgggagcggcacaacaggatggagcgggacagaagaagacgcatccgcatctgctgtgatgagctgaacctgctggtgcccttctgcaatgctgagacagacaaggccaccaccctgcagtggaccacagccttcctgaagtacatccaggagcggcacggggacagcctgaagaaggtgctgagcaccaacagccgctacgtgatgctgtggacctgcttcctgaagatgaagtctgctgtggatggcaagaacccccagcacgcctacagaacagccaaccacaagtggctgtgcctgcacgaggcccggagctttgcctttgaggtgtccatctgggcccacttccagctgttccgggtgcgcatccctgagggcttcctgagcatctag

SEQ ID NO: 144769 - DNA, 843 bp, synthetic construct
  misc_feature 1..843: note = Description of Artificial Sequence: Synthetic coding sequence
  source 1..843: mol_type = other DNA
atgggccccaaggacagcgccaagtgcctgcaccggggcccccagcccagccactgggccgctggagatggccccacccaggagcgctgtggccccaggagcctgggcagccctgtgctgggcctggacacctgccgggcctgggaccacgtggatggccagatcctgggccagctgcggcccctgacagaggaggaggaggaggagggcgctggggccaccctgagccggggccctgccttccctggcatgggcagcgaggagctgcggctggccagcttctatgactggcccctgacagctgaggtgcccccagagctgctggccgctgctggcttcttccacacaggccaccaggacaaggtgcgctgcttcttctgctacggcggcctgcagagctggaagagaggagatgacccctggacagagcacgccaagtggttccccagctgccagttcctgctgcggagcaagggccgggactttgtgcacagcgtgcaggagacccacagccagctgctgggctcctgggacccctgggaggagccagaagatgctgcccctgtggcccccagcgtgcctgccagcggctacccagagctgcccaccccaagaagagaggtgcagagcgagagcgcccaggagcccggggccagagatgtggaggcccagctgcggcggctgcaggaggagaggacctgcaaggtgtgcctggacagagctgtgtccatcgtgtttgtgccctgtggccacctggtgtgtgccgagtgtgcccctggcctgcagctgtgccccatctgccgggcccctgtgcgcagccgggtgaggaccttcctgtcctag

SEQ ID NO: 144770 - DNA, 3564 bp, synthetic construct
  misc_feature 1..3564: note = Description of Artificial Sequence: Synthetic coding sequence
  source 1..3564: mol_type = other DNA
atgaggcccaggggggccgcctttgctgctggccccccaggggacctgcacctgggcacagccatcggctttgctggggccatctggaggagccgcagccctgccatgagcaccctgctggacatcaagagctctgtgctgcggcaggtgcaggtgtgccccagcttcagaagaagaacagagcaggaccccggcagcgccagcgctgacccccaggagcccgccaccggggcctggaagccaggagatggagtggagttctttgcccacatgaggctgatgctgaagaagggggagggccggcagggcctgccctgcctggaggtgcccctgcggagcggcagccctgcccctcctgagcctgtggaccccagcctgggcctgcgggccctggcccctgaggaggtggagatgctgtatgaggaggccctgtacacagtgctgtacagagctggcaccatgggccctgaccaggtggatgatgaggaggccctgctgagctacctgcagcaggtgtttggcaccagcctggaggagcacacagaggccatcgagcgggtgaggaaggccaaggcccccacctacgccctgaaggtgtctgtgatgagggccaagaacctgctggccaaggaccccaacggcttcagtgacccctactgcatgctgggcatcctgcctgccagtgatgccacccgggagccccgggcccagaaggagcagcgcttcggcttcaggaagggcagcaagagaggaggccccctgcctgccaagtgcatccaggtgacagaggtgaagagcagcaccctgaaccctgtgtggaaggagcacttcctgtttgaaattgaagatgtgtccacagaccagctgcacctggacatctgggaccatgatgatgatgtgtccctggtggaggcctgcaggaagctgaatgaggtgattggcctgaagggcatgggccgctacttcaagcagatcgtgaagagcgcccgggccaacggcacagctggccccacagaggaccacacagatgacttcctgggctgcctgaacatccctgtgcgggaggtgcctgtggccggcgtggaccgctggttcaagctggagcccaggagcagcgccagccgggtgcagggccactgccacctggtgctgaagctgatcaccacccagagggacacagccatgagccagaggggccgcagcggcttcctgagccacctgctgctgctgagccacctgctgcggctggagcacagcgctgaggagcccaacagcagctcctggagaggagagctgagcaccccagctgccaccatcctgtgcctgcatggagcccagagcaacctgagccccctgcagctggccgtgctgcactggcaggtgagcagccgccaccaccagacctgcaccctggactacagctacctgctgggcctgctggaggacatgcaggcccactgggaggaggcccccagcctgccccaggagcaggaggagagcctggccgacagcctgagcgccttcagcgagtttggcctgcagctgctgcggcagctgcgggactacttccctgccaccaacagcacagctgtgcaccggctggagctgctgctgaagtgcctgggcaagctgcagctgttccagcccagctttgagatctgcccctttgagagcgagctgaacatggacattgctgctgccctgaagaggggcaaccgggagtggtatgaccgcatcctgaatgacaagagcccccgggagcagcccggcccccagaggctgcccggcctggtggtgctggctgatgctgtgtatgatgacctgcagttctgctacagcgtgtatgccagcctcttccacagcatcctgaatgtggatgtgttcaccctgaccttccggcagctggagcggctggtggccgaggaggcctgggtgctgacagaggagctgagccccaagatgaccctggaggtggccagcggcctgtttgagctgtacctgaccctggccgacctgcagcgcttctgggacagcatccctggccgggacagccgcagcctggccctggccggcatccacgcccccttcctgcctgctgtgaagctgtggttccaggtgctgcgggaccaggccaagtggaggctgcagggcgctgtggacatggacaccctggagcctgtggatgccagcagccgccacagcagcagcgctgccacagctggcctgtgcctgagccacatccaggagctgtgggtgcggctggcctggccagaccctgcccaggcccagggcctgggcacccagctgggccaggatgtgtgtgaggccaccctcttctacacagagctgctgaggaagaaggtggacacccagcccggggctgctggggaggccgtgtctgaggccctgtgtgtggtgctgaacaacgtggagctggtgaggaaggctgctggccaggccctgaagggcctggcctggccagagggcgccactggacctgagggcgtgctgccccggcccctgctgagctgcacccaggccctggatgatgacctgcagcgggaggcccacacagtgacagcccacctgaccagcaagatggtgggggacatcagaaaatatgtgcagcacatcagcctgagcccagacagcatccagaatgatgaggccgtggcccccctgatgaagtacctggatgagaagctggccctgctgaatgccagcctggtgaagggcaacctgagccgggtgctggaggccctgtgggagctgctgctgcaggccatcctgcaggccctgggcgccaacagagatgtgtctgctgacttctacagccgcttccacttcaccctggaggccctggtgtccttcttccacgccgagggccagggcctgcccctggagagcctgagagatggcagctacaagaggctgaaggaggagctgcggctgcacaagtgcagcaccagagaatgtattgagcagttctacctggacaagctgaagcagaggaccctggagcagaacagatttggccgcctgtctgtgcgctgccactatgaggccgctgagcagaggctggccgtggaggtgctgcacgccgctgacctgctgcccctggatgccaacggcctgagtgacccctttgtgattgtggagctgggccccccccacctgttccccctggtgcgcagccagaggacccaggtgaagaccaggaccctgcaccctgtgtatgatgagctgttctacttctctgtgcctgctgaggcctgcagaagaagagctgcctgtgtgctcttcaccgtgatggaccatgactggctgagcaccaatgactttgctggggaggccgccctgggcctgggcggcgtgactggagtggcccggccccaggtgggcggcggggcccgggccggccagcctgtgaccctgcacctgtgccggccccgggcccaggtgcgcagcgccctgcggcggctggagggccgcaccagcaaggaggcccaggagtttgtgaagaagctgaaggagctggagaagtgcatggaggccgacccctag

SEQ ID NO: 144771 - DNA, 3510 bp, synthetic construct
  misc_feature 1..3510: note = Description of Artificial Sequence: Synthetic coding sequence
  source 1..3510: mol_type = other DNA
atgagcaccctgctggacatcaagagctctgtgctgcggcaggtgcaggtgtgccccagcttcagaagaagaacagagcaggaccccggcagcgccagcgctgacccccaggagcccgccactggagcctggaagccaggagatggagtggagttctttgcccacatgaggctgatgctgaagaagggggagggccggcagggcctgccctgcctggaggcctggggcagcccctgccggcagagcccccaccctggcccccacacccaggtgcccctgcggagcggcagccctgcccctcctgagcctgtggaccccagcctgggcctgcgggccctggcccctgaggaggtggagatgctgtatgaggaggccctgtacacagtgctgtacagagctggcaccatgggccctgaccaggtggatgatgaggaggccctgctgagctacctgcagcaggtgtttggcaccagcctggaggagcacacagaggccatcgagcgggtgaggaaggccaaggcccccacctacgccctgaaggtgtctgtgatgagggccaagaacctgctggccaaggaccccaacggcttcagtgacccctactgcatgctgggcatcctgcctgccagtgatgccacccgggagccccgggcccagaaggagcagcgcttcggcttcaggaagggcagcaagagaggaggccccctgcctgccaagtgcatccaggtgacagaggtgaagagcagcaccctgaaccctgtgtggaaggagcacttcctgtttgaaattgaagatgtgtccacagaccagctgcacctggacatctgggaccatgatgatgatgtgtccctggtggaggcctgcaggaagctgaatgaggtgattggcctgaagggcatgggccgctacttcaagcagatcgtgaagagcgcccgggccaacggcacagctggccccacagaggaccacacagatgacttcctgggctgcctgaacatccctgtgcgggaggtgcctgtggccggcgtggaccgctggttcaagctggagcccaggagcagcgccagccgggtgcagggccactgccacctggtgctgaagctgatcaccacccagagggacacagccatgagccagaggggccgcagcggcttcctgagccacctgctgctgctgagccacctgctgcggctggagcacagcgctgaggagcccaacagcagctcctggagaggagagctgagcaccccagctgccaccatcctgtgcctgcatggagcccagagcaacctgagccccctgcagctggccgtgctgcactggcaggtgagcagccgccaccaccagacctgcaccctggactacagctacctgctgggcctgctggaggacatgcaggcccactgggaggaggcccccagcctgccccaggagcaggaggagagcctggccgacagcctgagcgccttcagcgagtttggcctgcagctgctgcggcagctgcgggactacttccctgccaccaacagcacagctgtgcaccggctggagctgctgctgaagtgcctgggcaagctgcagctgttccagcccagctttgagatctgcccctttgagagcgagctgaacatggacattgctgctgccctgaagaggggcaaccgggagtggtatgaccgcatcctgaatgacaagagcccccgggagcagcccggcccccagaggctgcccggcctggtggtgctggctgatgctgtgtatgatgacctgcagttctgctacagcgtgtatgccagcctcttccacagcatcctgaatgtggatgtgttcaccctgaccttccggcagctggagcggctggtggccgaggaggcctgggtgctgacagaggagctgagccccaagatgaccctggaggtggccagcggcctgtttgagctgtacctgaccctggccgacctgcagcgcttctgggacagcatccctggccgggacagccgcagcctggccctggccggcatccacgcccccttcctgcctgctgtgaagctgtggttccaggtgctgcgggaccaggccaagtggaggctgcagggcgctgtggacatggacaccctggagcctgtggatgccagcagccgccacagcagcagcgctgccacagctggcctgtgcctgagccacatccaggagctgtgggtgcggctggcctggccagaccctgcccaggcccagggcctgggcacccagctgggccaggatgtgtgtgaggccaccctcttctacacagagctgctgaggaagaaggtggacacccagcccggggctgctggggaggccgtgtctgaggccctgtgtgtggtgctgaacaacgtggagctggtgaggaaggctgctggccaggccctgaagggcctggcctggccagagggcgccactggacctgagggcgtgctgccccggcccctgctgagctgcacccaggccctggatgatgacctgcagcgggaggcccacacagtgacagcccacctgaccagcaagatggtgggggacatcagaaaatatgtgcagcacatcagcctgagcccagacagcatccagaatgatgaggccgtggcccccctgatgaagtacctggatgagaagctggccctgctgaatgccagcctggtgaagggcaacctgagccgggtgctggaggccctgtgggagctgctgctgcaggccatcctgcaggccctgggcgccaacagagatgtgtctgctgacttctacagccgcttccacttcaccctggaggccctggtgtccttcttccacgccgagggccagggcctgcccctggagagcctgagagatggcagctacaagaggctgaaggaggagctgcggctgcacaagtgcagcaccagagaatgtattgagcagttctacctggacaagctgaagcagaggaccctggagcagaacagatttggccgcctgtctgtgcgctgccactatgaggccgctgagcagaggctggccgtggaggtgctgcacgccgctgacctgctgcccctggatgccaacggcctgagtgacccctttgtgattgtggagctgggccccccccacctgttccccctggtgcgcagccagaggacccaggtgaagaccaggaccctgcaccctgtgtatgatgagctgttctacttctctgtgcctgctgaggcctgcagaagaagagctgcctgtgtgctcttcaccgtgatggaccatgactggctgagcaccaatgactttgctggggaggccgccctgggcctgggcggcgtgactggagtggcccggccccaggtgggcggcggggcccgggccggccagcctgtgaccctgcacctgtgccggccccgggcccaggtgcgcagcgccctgcggcggctggagggccgcaccagcaaggaggcccaggagtttgtgaagaagctgaaggagctggagaagtgcatggaggccgacccctag

SEQ ID NO: 144772 - DNA, 3510 bp, synthetic construct; identical to SEQ ID NO: 144771
  misc_feature 1..3510: note = Description of Artificial Sequence: Synthetic coding sequence
  source 1..3510: mol_type = other DNA

SEQ ID NO: 144773 - DNA, 3351 bp, synthetic construct
  misc_feature 1..3351: note = Description of Artificial Sequence: Synthetic coding sequence
  source 1..3351: mol_type = other DNA
atgagcaccctgctggacatcaagagctctgtgctgcggcaggtgcaggtgtgccccagcttcagaagaagaacagagcaggaccccggcagcgccagcgctgacccccaggagcccgccactggagcctggaagccaggagatggagtggagttctttgcccacatgaggctgatgctgaagaagggggagggccggcagggcctgccctgcctggaggtgcccctgcggagcggcagccctgcccctcctgagcctgtggaccccagcctgggcctgcgggccctggcccctgaggaggtggagatgctgtatgaggaggccctgtacacagtgctgtaccgggccggcaccatgggccctgaccaggtggatgatgaggaggccctgctgagctacctgcagcaggtgtttggcaccagcctggaggagcacacagaggccatcgagcgggtgaggaaggccaaggcccccacctacgccctgaaggtgtctgtgatgagggccaagaacctgctggccaaggaccccaacggcttcagtgacccctactgcatgctgggcatcctgcctgccagtgatgccacccgggagccccgggcccagaaggagcagagatttggcttcaggaagggcagcaagaggggcggccccctgcctgccaagtgcatccaggtgacagaggtgaagagcagcaccctgaaccctgtgtggaaggagcacttcctgtttgaaattgaagatgtgtccacagaccagctgcacctggacatctgggaccatgatgatgatgtgtccctggtggaggcctgcaggaagctgaatgaagtcatcggcctgaagggcatgggccgctacttcaagcagatcgtgaagagcgcccgggccaatggaacagctggccccacagaggaccacacagatgacttcctgggctgcctgaacatccctgtgagaagagacacagccatgagccagaggggccgcagcggcttcctgagccacctgctgctgctgagccacctgctgcggctggagcacagcgctgaggagcccaacagcagctcctggagaggagagctgagcaccccagctgccaccatcctgtgcctgcacggggcccagagcaacctgagccccctgcagctggccgtgctgcactggcaggtgagcagccgccaccaccagacctgcaccctggactacagctacctgctgggcctgctggaggacatgcaggcccactgggaggaggcccccagcctgccccaggagcaggaggagagcctggccgacagcctgagcgccttcagcgagtttggcctgcagctgctgcggcagctgcgggactacttccctgccaccaacagcacagctgtgcaccggctggagctgctgctgaagtgcctgggcaagctgcagctgttccagcccagctttgagatctgcccctttgaaagtgagctgaacatggacattgctgctgccctgaagaggggcaaccgggagtggtatgaccgcatcctgaatgacaagagcccccgggagcagcccggcccccagaggctgcccggcctggtggtgctggctgatgctgtgtatgatgacctgcagttctgctacagcgtgtatgccagcctcttccacagcatcctgaatgtggatgtgttcaccctgaccttccggcagctggagcggctggtggccgaggaggcctgggtgctgacagaggagctgagccccaagatgaccctggaggtggccagcggcctgtttgagctgtacctgaccctggccgacctgcagcgcttctgggacagcatccctggccgggacagccgcagcctggccctggccggcatccacgcccccttcctgcctgctgtgaagctgtggttccaggtgctgcgggaccaggccaagtggaggctgcagggcgctgtggacatggacaccctggagcctgtggatgccagcagccgccacagcagcagcgctgccacagctggcctgtgcctgagccacatccaggagctgtgggtgcggctggcctggccagaccctgcccaggcccagggcctgggcacccagctgggccaggatgtgtgtgaggccaccctcttctacacagagctgctgaggaagaaggtggacacccagcctggagctgctggggaggccgtgtctgaggccctgtgtgtggtgctgaacaacgtggagctggtgaggaaggccgccggccaggccctgaagggcctggcctggccagagggcgccaccggccctgagggcgtgctgccccggcccctgctgagctgcacccaggccctggatgatgacctgcagcgggaggcccacacagtgacagcccacctgaccagcaagatggtgggggacatcagaaaatatgtgcagcacatcagcctgagcccagacagcatccagaatgatgaagctgtggcccccctgatgaagtacctggatgagaagctggccctgctgaatgccagcctggtgaagggcaacctgagccgggtgctggaggccctgtgggagctgctgctgcaggccatcctgcaggccctgggcgccaacagagatgtgtctgctgacttctacagccgcttccacttcaccctggaggccctggtgtccttcttccacgccgagggccagggcctgcccctggagagcctgagagatggcagctacaagaggctgaaggaggagctgcggctgcacaagtgcagcacccgggagtgcatcgagcagttctacctggacaagctgaagcagaggaccctggagcagaaccgcttcggccgcctgtctgtgcgctgccactatgaagctgctgagcagaggctggccgtggaggtgctgcatgctgctgacctgctgcccctggatgccaacggcctgagtgaccccttcgtcatcgtggagctgggccccccccacctgttccccctggtgcgcagccagaggacccaggtgaagaccaggaccctgcaccctgtgtatgatgagctgttctacttctctgtgcctgctgaggcctgcagaagaagagctgcctgtgtgctcttcaccgtgatggaccatgactggctgagcaccaatgactttgctggggaggccgccctgggcctgggcggcgtgactggagtggcccggccccaggtgggcggcggggcccgggccggccagcctgtgaccctgcacctgtgccggccccgggcccaggtgcgcagcgccctgcggcggctggagggccgcaccagcaaggaggcccaggagtttgtgaagaagctgaaggagctggagaagtgcatggaggccgacccctag

SEQ ID NO: 144774 - DNA, 3459 bp, synthetic construct
  misc_feature 1..3459: note = Description of Artificial Sequence: Synthetic coding sequence
  source 1..3459: mol_type = other DNA
atgagcaccctgctggacatcaagagctctgtgctgcggcaggtgcaggtgtgccccagcttcagaagaagaacagagcaggaccccggcagcgccagcgctgacccccaggagcccgccactggagcctggaagccaggagatggagtggagttctttgcccacatgaggctgatgctgaagaagggggagggccggcagggcctgccctgcctggaggtgcccctgcggagcggcagccctgcccctcctgagcctgtggaccccagcctgggcctgcgggccctggcccctgaggaggtggagatgctgtatgaggaggccctgtacacagtgctgtaccgggccggcaccatgggccctgaccaggtggatgatgaggaggccctgctgagctacctgcagcaggtgtttggcaccagcctggaggagcacacagaggccatcgagcgggtgaggaaggccaaggcccccacctacgccctgaaggtgtctgtgatgagggccaagaacctgctggccaaggaccccaacggcttcagtgacccctactgcatgctgggcatcctgcctgccagtgatgccacccgggagccccgggcccagaaggagcagagatttggcttcaggaagggcagcaagaggggcggccccctgcctgccaagtgcatccaggtgacagaggtgaagagcagcaccctgaaccctgtgtggaaggagcacttcctgtttgaaattgaagatgtgtccacagaccagctgcacctggacatctgggaccatgatgatgatgtgtccctggtggaggcctgcaggaagctgaatgaagtcatcggcctgaagggcatgggccgctacttcaagcagatcgtgaagagcgcccgggccaatggaacagctggccccacagaggaccacacagatgacttcctgggctgcctgaacatccctgtgcgggaggtgcctgtggccggcgtggaccgctggttcaagctggagcccaggagcagcgccagccgggtgcagggccactgccacctggtgctgaagctgatcaccacccagagggacacagccatgagccagaggggccgcagcggcttcctgagccacctgctgctgctgagccacctgctgcggctggagcacagcgctgaggagcccaacagcagctcctggagaggagagctgagcaccccagctgccaccatcctgtgcctgcacggggcccagagcaacctgagccccctgcagctggccgtgctgcactggcaggtgagcagccgccaccaccagacctgcaccctggactacagctacctgctgggcctgctggaggacatgcaggcccactgggaggaggcccccagcctgccccaggagcaggaggagagcctggccgacagcctgagcgccttcagcgagtttggcctgcagctgctgcggcagctgcgggactacttccctgccaccaacagcacagctgtgcaccggctggagctgctgctgaagtgcctgggcaagctgcagctgttccagcccagctttgagatctgcccctttgaaagtgagctgaacatggacattgctgctgccctgaagaggggcaaccgggagtggtatgaccgcatcctgaatgacaagagcccccgggagcagcccggcccccagaggctgcccggcctggtggtgctggctgatgctgtgtatgatgacctgcagttctgctacagcgtgtatgccagcctcttccacagcatcctgaatgtggatgtgttcaccctgaccttccggcagctggagcggctggtggccgaggaggcctgggtgctgacagaggagctgagccccaagatgaccctggaggtggccagcggcctgtttgagctgtacctgaccctggccgacctgcagcgcttctgggacagcatccctggccgggacagccgcagcctggccctggccggcatccacgcccccttcctgcctgctgtgaagctgtggttccaggtgctgcgggaccaggccaagtggaggctgcagggcgctgtggacatggacaccctggagcctgtggatgccagcagccgccacagcagcagcgctgccacagctggcctgtgcctgagccacatccaggagctgtgggtgcggctggcctggccagaccctgcccaggcccagggcctgggcacccagctgggccaggatgtgtgtgaggccaccctcttctacacagagctgctgaggaagaaggtggacacccagcctggagctgctggggaggccgtgtctgaggccctgtgtgtggtgctgaacaacgtggagctggtgaggaaggccgccggccaggccctgaagggcctggcctggccagagggcgccaccggccctgagggcgtgctgccccggcccctgctgagctgcacccaggccctggatgatgacctgcagcgggaggcccacacagtgacagcccacctgaccagcaagatggtgggggacatcagaaaatatgtgcagcacatcagcctgagcccagacagcatccagaatgatgaagctgtggcccccctgatgaagtacctggatgagaagctggccctgctgaatgccagcctggtgaagggcaacctgagccgggtgctggaggccctgtgggagctgctgctgcaggccatcctgcaggccctgggcgccaacagagatgtgtctgctgacttctacagccgcttccacttcaccctggaggccctggtgtccttcttccacgccgagggccagggcctgcccctggagagcctgagagatggcagctacaagaggctgaaggaggagctgcggctgcacaagtgcagcacccgggagtgcatcgagcagttctacctggacaagctgaagcagaggaccctggagcagaaccgcttcggccgcctgtctgtgcgctgccactatgaagctgctgagcagaggctggccgtggaggtgctgcatgctgctgacctgctgcccctggatgccaacggcctgagtgaccccttcgtcatcgtggagctgggccccccccacctgttccccctggtgcgcagccagaggacccaggtgaagaccaggaccctgcaccctgtgtatgatgagctgttctacttctctgtgcctgctgaggcctgcagaagaagagctgcctgtgtgctcttcaccgtgatggaccatgactggctgagcaccaatgactttgctggggaggccgccctgggcctgggcggcgtgactggagtggcccggccccaggtgggcggcggggcccgggccggccagcctgtgaccctgcacctgtgccggccccgggcccaggtgcgcagcgccctgcggcggctggagggccgcaccagcaaggaggcccaggagtttgtgaagaagctgaaggagctggagaagtgcatggaggccgacccctag

SEQ ID NO: 144775 - DNA, 537 bp, synthetic construct
  misc_feature 1..537: note = Description of Artificial Sequence: Synthetic coding sequence
  source 1..537: mol_type = other DNA
atgagccagaggggccgcagcggcttcctgagccacctgctgctgctgagccacctgctgcggctggagcacagcgctgaggagcccaacagcagctcctggagaggagagctgagcaccccagctgccaccatcctgtgcctgcatggagcccagagcaacctgagccccctgcagctggccgtgctgcactggcaggtgagcagccgccaccaccagacctgcaccctggactacagctacctgctgggcctgctggaggacatgcaggcccactgggaggaggcccccagcctgccccaggagcaggaggagagcctggccgacagcctgagcgccttcagcgagtttggcctgcagctgctgcggcagctgcgggactacttccctgccaccaacagcacagctgtgcaccggctggagctgctgctgaagtgcctgggcaagctgcagctgttccagcccagctttgagatctgcccccgggtgggcgctgagcacggccactgctgcggccctgaggagcggcagccctag

SEQ ID NO: 144776 - DNA, 1782 bp, synthetic construct
  misc_feature 1..1782: note = Description of Artificial Sequence: Synthetic coding sequence
  source 1..1782: mol_type = other DNA
atggctgctgccagcagcagtgacagtgatgcctgtggggctgagagcaatgaggccaacagcaagtggctggatgcccactatgaccccatggccaacatccacaccttcagcgcctgcctggccctggccgacctgcatggagatggagagtacaagctggtggtgggggacctgggccctgggggccagcagccccggctgaaggtgctgaagggccccctggtgatgacagagagccccctgcctgccctgcctgctgctgctgccaccttcctgatggagcagcacgagcccaggaccccagccctggccctggccagcggcccctgtgtgtatgtgtacaagaacctgcggccctacttcaagttcagcctgccccagctgccccccaaccccctggagcaggacctgtggaaccaggccaaggaggacagaattgaccccctgaccctgaaggagatgctggagagcatccgggagacagctgaggagcccctgagcatccagagcctgcgcttcctgcagctggagctgtctgagatggaggcctttgtgaaccagcacaagagcaacagcatcaagaggcagaccgtcatcaccaccatgaccaccctgaagaagaacctggctgatgaagatgctgtgtcctgcctggtgctgggcacagagaacaaggagctgctggtgctggaccctgaggccttcaccatcctggccaagatgagcctgcccagcgtgcctgtgttcctggaggtgtctggccagtttgatgtggagttccggctggccgccgcctgcagaaatggaaacatctacatcctgcggcgggacagcaagcaccccaagtactgcatcgagctgagcgcccagcctgtgggcctcatccgggtgcacaaggtgctggtggtgggcagcacccaggacagcctgcacggcttcacccacaagggcaagaagctgtggacagtgcagatgcctgctgccatcctgaccatgaacctgctggagcagcacagccggggcctgcaggccgtgatggccggcctggccaacggggaggtgcgcatctacagagacaaggccctgctgaatgtcatccacaccccagatgctgtgaccagcctgtgcttcggccgctatggccgggaggacaacaccctcatcatgaccacccggggcggcggcctcatcatcaagatcctgaagaggacagctgtgtttgtggagggcggcagcgaggtgggccccccaccagcccaggccatgaagctgaatgtgcccaggaagacccggctgtatgtggaccagaccctgcgggagcgggaggccggcacagccatgcaccgggccttccagacagacctgtacctgctgcggctgcgggccgcccgggcctacctgcaggccctggagagcagcctgagccccctgagcaccacagcccgggagcccctgaagctgcatgctgtggtgcagggcctgggccccaccttcaagctgaccctgcacctgcagaacaccagcaccaccaggcctgtgctgggcctgctggtgtgcttcctgtacaatgaggccctgtacagcctgccccgggccttcttcaaggtgcccctgctggtgcccggcctgaactaccccctggagacctttgtggagagcctgagcaacaagggcatcagtgacatcatcaaggtgctggtgctgcgggagggccagagcgcccccctgctgagcgcccacgtgaacatgcctggcagcgagggcctggccgccgcctag

SEQ ID NO: 144777 - DNA, 498 bp, synthetic construct
  misc_feature 1..498: note = Description of Artificial Sequence: Synthetic coding sequence
  source 1..498: mol_type = other DNA
atgagccctggcccccagctgtggcacctgctgcaggccctggtgtccatgtgcatccgcatcagtgaccccaccagcagcagcgcctgccccaactgcctgcagatcctgtggaacaagaccttcggcacccggcccaagcgggagacagctgaggagcccctgagcatccagagcctgcgcttcctgcagctggagctgtctgagatggaggcctttgtgaaccagcacaagagcaacagcatcaagaggcagaccgtcatcaccaccatgaccaccctgaagaagaacctggctgatgaagatgctgtgtcctgcctggtgctgggcacagagaacaaggagctgctggtgctggaccctgaggccttcaccatcctggccaagatgagcctgcccagcgtgcctgtgttcctggaggtgtctggccagtttgatgtggagttccggctggccgccgcctgcagaaatggaaacatctacatcctgcggaggtag

SEQ ID NO: 144778 - DNA, 2172 bp, synthetic construct
  misc_feature 1..2172: note = Description of Artificial Sequence: Synthetic coding sequence
  source 1..2172: mol_type = other DNA
atgctgagctccatggctgctgctggctctgtgaaggccgccctgcaggtggccgaggtgctggaggccatcgtgtcctgctgcgtgggccctgagggccggcaggtgctgtgcaccaagcccaccggggaggtgctgctgagcagaaatggaggccgcctgctggaggccctgcacctggagcaccccatcgccaggatgattgtggactgtgtgagcagccacctgaagaagacaggagatggagccaagaccttcatcatcttcctgtgccacctgctgcggggcctgcacgccatcacagaccgggagaaggaccccctgatgtgtgagaacatccagacccacggccgccactggaagaactgcagccgctggaagttcatcagccaggccctgctgaccttccagacccagatcctggatggcatcatggaccagtacctgagccgccacttcctgagcatcttcagcagcgccaaggagaggaccctgtgccgcagcagcctggagctgctgctggaggcctacttctgtggccgggtgggcaggaacaaccacaagttcatcagccagctgatgtgtgactacttcttcaagtgcatgacctgcaagagcggcatcggcgtgtttgagctggtggatgaccactttgtggagctgaatgtgggcgtgacaggcctgcctgtgtctgacagccgcatcatcgccggcctggtgctgcagaaggacttctctgtgtacagaccagcagatggagacatgaggatggtgattgtgacagagaccatccagcccctcttcagcaccagcggcagcgagttcatcctgaacagcgaggcccagttccagaccagccagttctggatcatggagaagaccaaggccatcatgaagcacctgcacagccagaatgtgaagctgctgatcagctctgtgaagcagcctgacctggtgtcctactatgccggcgtgaatggcatctctgtggtggagtgcctgagcagcgaggaggtgtccctcatccgccgcatcatcggcctgagcccctttgtgcccccccaggccttcagccagtgtgagatccccaacacagccctggtgaagttctgcaagcccctcatcctgcggagcaagagatatgtgcacctgggcctcatcagcacctgtgccttcatcccccacagcatcgtgctgtgtggccctgtgcacggcctgattgagcagcatgaagatgccctgcatggagccctgaagatgctgcggcagctgttcaaggacctggacctgaactacatgacccagaccaatgaccagaatggcaccagcagcctcttcatctacaagaacagcggggagagctaccaggccccagaccctggaaatggcagcatccagaggccctaccaggacacagtggccgagaacaaggatgccctggagaagacccagacctacctgaaggtgcacagcaacctggtgatcccagatgtggagctggagacctacatcccctacagcacccccaccctgacccccacagacaccttccagacagtggagaccctgacctgcctgagcctggagaggaaccggctgacagactactatgagcccctgctgaagaacaacagcacagcctacagcacccggggcaacagaattgagatctcctatgagaacctgcaggtgaccaacatcaccaggaagggctccatgctgcctgtgtcctgcaagctgcccaacatgggcaccagccagagctacctgagcagctccatgcctgctggctgtgtgctgcctgtgggcggcaactttgagatcctgctgcactactacctgctgaactatgccaagaagtgccaccagagcgaggagaccatggtgtccatgatcatcgccaatgccctgctgggcatccccaaggtgctgtacaagagcaagacaggcaagtacagcttcccccacacctacatccgggctgtgcacgccctgcagaccaaccagcccctggtgagcagccagacaggcctggagagcgtgatgggcaagtaccagctgctgacctctgtgctgcagtgcctgaccaagatcctgaccatcgacatggtgatcaccgtgaagaggcacccccagaaggtgcacaaccaggacagtgaagatgagctgtag

SEQ ID NO: 144779 - DNA, 2133 bp, synthetic construct
  misc_feature 1..2133: note = Description of Artificial Sequence: Synthetic coding sequence
  source 1..2133: mol_type = other DNA
atggtgatggcctgccgggtggtgaacaagagaagacacatgggcctgcagcagctgagcagctttgctgagactggaagaaccttcctgggccccctgaagagcagcaagttcatcattgatgaagaatgtcatgaatctgtgctgatcagcagcacagtgcggctgctggagagcctggacctgaccagcgctgtgggccagctgctgaatgaagctgtgcaggcccagaacaacacctacagaacaggcatcagcaccctgctcttcctggtgggcgcctggagcagcgctgtggaggagtgcctgcacctgggcgtgcccatcagcatcatcgtgtctgtgatgtctgagggcctgaacttctgcagcgaggaggtggtgtccctgcacgtgcctgtgcacaacatctttgactgcatggacagcaccaagaccttcagccagctggagaccttctctgtgtccctgtgccccttcctgcaggtgcccagcgacacagacctgattgaggagctgcacggcctgaaggatgtggccagccagaccctgaccatcagcaacctgagcggccggcccctgaagagctatgagctgttcaagccccagaccaaggtggaggccgacaacaacaccagcaggaccctgaagaacagcctgctggccgacacctgctgccggcagagcatcctgatccacagccgccacttcaacagaacagacaacacagaaggagtgtccaagccagatggcttccaggagcacgtgacagccacccacaagacctaccgctgcaatgacctggtggagctggccgtgggcctgagccatggagaccacagctccatgaagctggtggaggaggccgtgcagctgcagtaccagaatgcctgtgtgcagcagggcaactgcaccaagcccttcatgtttgacatcagccgcatcttcacctgctgcctgcccggcctgcctgagaccagcagctgtgtgtgccccggctacatcaccgtggtgtctgtgagcaacaaccctgtgatcaaggagctgcagaaccagcctgtgcgcatcgtgctgattgaaggagacctgacagagaactaccgccacctgggcttcaacaagagcgccaacatcaagacagtgctggacagcatgaggctgcaggaggacagcagcgaggagctgtgggccaaccacgtgctgcaggtgctgatccagttcaaggtgaacctggtgctggtgcagggcaatgtgtctgagcggctgattgagaagtgcatcaacagcaagaggctggtgattggctctgtgaatggatctgtgatgcaggcctttgctgaggccgccggggctgtgcaggtggcctacatcacccaggtgaatgaagactgtgtgggagatggagtgtgtgtgaccttctggaggagcagccccctggatgtggtggacaggaacaaccgcatcgccatcctgctgaagacagagggcatcaacctggtgacagctgtgctgaccaaccctgtgacagcccagatgcagatcaaggaggaccgcttctggacctgtgcctaccgcctgtactatgccctgaaggaggagaaggtgttcctgggcggcggcgctgtggagttcctgtgcctgagctgcctgcacatcctggccgagcagagcctgaagaaggaaaatcatgcctgcagcggctggctgcacaacaccagctcctggctggccagcagcctggccatctaccggcccaccgtgctgaagttcctggccaacggctggcagaagtacctgagcaccctgctgtacaacacagccaactacagcagcgagtttgaggccagcacctacatccagcaccacctgcagaatgccacagattctggcagccccagcagctacatcctgaatgagtacagcaagctgaacagccgcatcttcaacagcgacatcagcaacaagctggagcagatcccccgggtgtatgatgtggtgacccccaagattgaggcctggaggcgggccctggacctggtgctgctggtgctgcagacagacagcgagatcatcaccggccacggccacacccagatcaacagccaggagctgaccggcttcctgttcctgtag

SEQ ID NO: 144780 - DNA, 576 bp, synthetic construct
  misc_feature 1..576: note = Description of Artificial Sequence: Synthetic coding sequence
  source 1..576: mol_type = other DNA
atggtgatggcctgccgggtggtgaacaagagaagacacatgggcctgcagcagctgagcagctttgctgagactggaagaaccttcctgggccccctgaagagcagcaagttcatcattgatgaagaatgtcatgaatctgtgctgatcagcagcacagtgcggctgctggagagcctggacctgaccagcgctgtgggccagctgctgaatgaagctgtgcaggcccagaacaacacctacagaacaggcatcagcaccctgctcttcctggtgggcgcctggagcagcgctgtggaggagtgcctgcacctgggcgtgcccatcagcatcatcgtgtctgtgatgtctgagggcctgaacttctgcagcgaggaggtggtgtccctgcacgtgcctgtgcacaacatctttgactgcatggacagcaccaagaccttcagccagctggagaccttctctgtgtccctgtgccccttcctgcaggtgcccagcgacacagacctgattgaggagctgcacggcctgaaggatgtggccagccagaccctgaccatcagcaacctgagcggctag

SEQ ID NO: 144781 - DNA, 2133 bp, synthetic construct; identical to SEQ ID NO: 144779
  misc_feature 1..2133: note = Description of Artificial Sequence: Synthetic coding sequence
  source 1..2133: mol_type = other DNA

SEQ ID NO: 144782 - DNA, 2166 bp, synthetic construct
  misc_feature 1..2166: note = Description of Artificial Sequence: Synthetic coding sequence
  source 1..2166: mol_type = other DNA
atgctgctgcccgtcttcaccctgaagctgcggcacaagatcagccccaggatggtggccatcggccgctatgatggcacccacccctgcctggccgccgccacccagacaggcaaggtgttcatccacaacccccacaccaggaaccagcacgtgtctgccagcagggtcttccagagccccctggagagtgatgtgtccctgctgagcatcaaccaggccgtgtcctgcctgacagctggggtgctgaaccctgagctgggctatgatgccctgctggtgggcacccagaccaacctgctggcctatgatgtgtacaacaacagcgacctcttctaccgggaggtggctgatggagccaatgccatcgtgctgggcaccctgggggacatcagcagccccctggccatcatcggcggcaactgtgccctgcagggcttcaaccacgagggcagtgacctcttctggacagtgactggagacaacgtgaacagcctggccctgtgtgactttgatggagatggcaagaaggagctgctggtgggcagcgaggactttgacatccgggtcttcaaggaggatgagatcgtggccgagatgacagaaacagaaattgtgaccagcctgtgccccatgtatggcagcagatttggctacgccctgagcaatggaacagtgggcgtgtatgacaagaccagccgctactggaggatcaagagcaagaaccacgccatgagcatccacgcctttgacctgaacagtgatggagtgaatgagctgatcaccggctggagcaatggcaaggtggatgcccggagtgacagaactggagaggtgatcttcaaggacaacttcagcagcgccatcgccggcgtggtggagggggactacaggatggatggccacatccagctgatctgctgcagcgtggatggagagatccggggctacctgcctggaacagctgagatgaggggcaacctgatggacaccagcgctgagcaggacctgatccgggagctgagccagaagaagcagaacctgctgctggagctgagaaattatgaagaaaatgccaaggccgagctggccagccccctgaatgaagcagatggccaccggggcatcatcccagccaacacccggctgcacaccaccctgtctgtgtccctgggcaatgagacccagacagcccacacagagctgcgcatcagcaccagcaatgacaccatcatccgggctgtgctgatctttgctgagggcatcttcaccggggagagccacgtggtgcaccccagcatccacaacctgagcagcagcatctgcatccccatcgtgccccccaaggatgtgcctgtggacctgcacctgaaggcctttgtgggctaccgcagcagcacccagttccacgtgtttgagagcacccggcagctgccccgcttctccatgtatgccctgaccagcctggaccctgccagcgagcccatctcctatgtgaacttcaccatcgccgagcgggcccagagggtggtggtgtggctgggccagaacttcctgctgcctgaggacacccacatccagaatgcccccttccaggtgtgcttcaccagcctgagaaatggaggccacctgcacatcaagatcaagctgtctggagagatcaccatcaacacagatgacatcgacctggccggggacatcatccagagcatggccagcttctttgccatcgaggacctgcaggtggaggccgacttccctgtgtactttgaggagctgaggaaggtgctggtgaaggtggatgagtaccacagcgtgcaccagaagctgtctgctgacatggctgaccacagcaacctgatccgcagcctgctggtgggcgcagaagatgcccggctgatgagggacatgaagaccatgaagagccgctacatggagctgtatgacctgaacagagacctgctgaatggctacaagatccgctgcaacaaccacacagagctgctgggcaacctgaaggctgtgaaccaggccatccagagagctggccgcctgcgggtgggcaagcccaagaaccaggtgatcacagcctgcagagatgccatccgcagcaacaacatcaacaccctcttcaagatcatgagggtgggcacagccagcagctag

SEQ ID NO: 144783 - DNA, 1560 bp, synthetic construct
  misc_feature 1..1560: note = Description of Artificial Sequence: Synthetic coding sequence
  source 1..1560: mol_type = other DNA
atggccgaggagcgggtggccaccaggacccagtttcctgtgtccacagagagccagaagccccggcagaagaaggcccctgagttccccatcctggagaagcagaactggctgatccacctgcactacatcaggaaggactatgaggcctgcaaggctgtgatcaaggagcagctgcaggagacccagggcctgtgtgaatatgccatctacgtgcaggccctgatcttccggctggagggcaacatccaggagagcctggagctgttccagacctgtgctgtgctgagcccccagagcgctgacaacctgaagcaggtggcccggagcctcttcctgctgggcaagcacaaggccgccatcgaggtgtacaatgaagctgccaagctgaaccagaaggactgggagatcagccacaacctgggcgtgtgctacatctacctgaagcagttcaacaaggcccaggaccagctgcacaatgccctgaacctgaacagacatgacctgacctacatcatgctgggcaagatccacctgctggagggggacctggacaaggccatcgaggtgtacaagaaggctgtggagttcagccctgagaacacagagctgctgaccaccctgggcctgctgtacctgcagctgggcatctaccagaaggcctttgagcacctgggcaatgccctgacctatgaccccaccaactacaaggccatcctggccgccggctccatgatgcagacccatggagactttgatgtggccctgaccaagtacagagtggtggcctgtgctgtgcctgagagcccccccctgtggaacaacatcggcatgtgcttcttcggcaagaagaagtatgtggccgccatcagctgcctgaagagggccaactacctggccccctttgactggaagatcctgtacaacctgggcctggtgcacctgaccatgcagcagtatgccagcgccttccacttcctgtctgctgccatcaacttccagcccaagatgggagagctgtacatgctgctggccgtggccctgaccaacctggaggacattgaaaatgccaagagggcctatgcagaggccgtgcacctggacaagtgcaaccccctggtgaacctgaactatgctgtgctgctgtacaaccagggcgagaagaagaatgccctggcccagtaccaggagatggagaagaaggtgtccctgctgaaggacaacagcagcctggagtttgattctgagatggtggagatggcccagaagctgggcgccgccctgcaggtgggggaggccctggtgtggaccaagcctgtgaaggaccccaagagcaagcaccagaccaccagcaccagcaagccagccagcttccagcagcccctgggcagcaaccaggccctgggccaggccatgagcagcgctgctgcctaccgcaccctgcccagcggggccggcggcaccagccagttcaccaagccacccagcctgcccctggagcctgagcctgctgtggagagcagccccacagagaccagcgagcagatccgggagaagtag

SEQ ID NO: 144784 - DNA, 1584 bp, synthetic construct
  misc_feature 1..1584: note = Description of Artificial Sequence: Synthetic coding sequence
  source 1..1584: mol_type = other DNA
atggccctgactgtggtgcccagcttctctgtgtctggagtgtggaagaggacccagtttcctgtgtccacagagagccagaagccccggcagaagaaggcccctgagttccccatcctggagaagcagaactggctgatccacctgcactacatcaggaaggactatgaggcctgcaaggctgtgatcaaggagcagctgcaggagacccagggcctgtgtgaatatgccatctacgtgcaggccctgatcttccggctggagggcaacatccaggagagcctggagctgttccagacctgtgctgtgctgagcccccagagcgctgacaacctgaagcaggtggcccggagcctcttcctgctgggcaagcacaaggccgccatcgaggtgtacaatgaagctgccaagctgaaccagaaggactgggagatcagccacaacctgggcgtgtgctacatctacctgaagcagttcaacaaggcccaggaccagctgcacaatgccctgaacctgaacagacatgacctgacctacatcatgctgggcaagatccacctgctggagggggacctggacaaggccatcgaggtgtacaagaaggctgtggagttcagccctgagaacacagagctgctgaccaccctgggcctgctgtacctgcagctgggcatctaccagaaggcctttgagcacctgggcaatgccctgacctatgaccccaccaactacaaggccatcctggccgccggctccatgatgcagacccatggagactttgatgtggccctgaccaagtacagagtggtggcctgtgctgtgcctgagagcccccccctgtggaacaacatcggcatgtgcttcttcggcaagaagaagtatgtggccgccatcagctgcctgaagagggccaactacctggccccctttgactggaagatcctgtacaacctgggcctggtgcacctgaccatgcagcagtatgccagcgccttccacttcctgtctgctgccatcaacttccagcccaagatgggagagctgtacatgctgctggccgtggccctgaccaacctggaggacattgaaaatgccaagagggcctatgcagaggccgtgcacctggacaagtgcaaccccctggtgaacctgaactatgctgtgctgctgtacaaccagggcgagaagaagaatgccctggcccagtaccaggagatggagaagaaggtgtccctgctgaaggacaacagcagcctggagtttgattctgagatggtggagatggcccagaagctgggcgccgccctgcaggtgggggaggccctggtgtggaccaagcctgtgaaggaccccaagagcaagcaccagaccaccagcaccagcaagccagccagcttccagcagcccctgggcagcaaccaggccctgggccaggccatgagcagcgctgctgcctaccgcaccctgcccagcggggccggcggcaccagccagttcaccaagccacccagcctgcccctggagcctgagcctgctgtggagagcagccccacagagaccagcgagcagatccgggagaagtag

SEQ ID NO: 144785 - DNA, 1524 bp, synthetic construct
  misc_feature 1..1524: note = Description of Artificial Sequence: Synthetic coding sequence
  source 1..1524: mol_type = other DNA
atgatctggaacaccaggaacagcacctacatcttcaccgcccctgagttccccatcctggagaagcagaactggctgatccacctgcactacatcaggaaggactatgaggcctgcaaggctgtgatcaaggagcagctgcaggagacccagggcctgtgtgaatatgccatctacgtgcaggccctgatcttccggctggagggcaacatccaggagagcctggagctgttccagacctgtgctgtgctgagcccccagagcgctgacaacctgaagcaggtggcccggagcctcttcctgctgggcaagcacaaggccgccatcgaggtgtacaatgaagctgccaagctgaaccagaaggactgggagatcagccacaacctgggcgtgtgctacatctacctgaagcagttcaacaaggcccaggaccagctgcacaatgccctgaacctgaacagacatgacctgacctacatcatgctgggcaagatccacctgctggagggggacctggacaaggccatcgaggtgtacaagaaggctgtggagttcagccctgagaacacagagctgctgaccaccctgggcctgctgtacctgcagctgggcatctaccagaaggcctttgagcacctgggcaatgccctgacctatgaccccaccaactacaaggccatcctggccgccggctccatgatgcagacccatggagactttgatgtggccctgaccaagtacagagtggtggcctgtgctgtgcctgagagcccccccctgtggaacaacatcggcatgtgcttcttcggcaagaagaagtatgtggccgccatcagctgcctgaagagggccaactacctggccccctttgactggaagatcctgtacaacctgggcctggtgcacctgaccatgcagcagtatgccagcgccttccacttcctgtctgctgccatcaacttccagcccaagatgggagagctgtacatgctgctggccgtggccctgaccaacctggaggacattgaaaatgccaagagggcctatgcagaggccgtgcacctggacaagtgcaaccccctggtgaacctgaactatgctgtgctgctgtacaaccagggcgagaagaagaatgccctggcccagtaccaggagatggagaagaaggtgtccctgctgaaggacaacagcagcctggagtttgattctgagatggtggagatggcccagaagctgggcgccgccctgcaggtgggggaggccctggtgtggaccaagcctgtgaaggaccccaagagcaagcaccagaccaccagcaccagcaagccagccagcttccagcagcccctgggcagcaaccaggccctgggccaggccatgagcagcgctgctgcctaccgcaccctgcccagcggggccggcggcaccagccagttcaccaagccacccagcctgcccctggagcctgagcctgctgtggagagcagccccacagagaccagcgagcagatccgggagaagtag

SEQ ID NO: 144786 - DNA, 1044 bp, synthetic construct
  misc_feature 1..1044: note = Description of Artificial Sequence: Synthetic coding sequence
  source 1..1044: mol_type = other DNA
atgctgggcaagatccacctgctggagggggacctggacaaggccatcgaggtgtacaagaaggctgtggagttcagccctgagaacacagagctgctgaccaccctgggcctgctgtacctgcagctgggcatctaccagaaggcctttgagcacctgggcaatgccctgacctatgaccccaccaactacaaggccatcctggccgccggctccatgatgcagacccatggagactttgatgtggccctgaccaagtacagagtggtggcctgtgctgtgcctgagagcccccccctgtggaacaacatcggcatgtgcttcttcggcaagaagaagtatgtggccgccatcagctgcctgaagagggccaactacctggccccctttgactggaagatcctgtacaacctgggcctggtgcacctgaccatgcagcagtatgccagcgccttccacttcctgtctgctgccatcaacttccagcccaagatgggagagctgtacatgctgctggccgtggccctgaccaacctggaggacattgaaaatgccaagagggcctatgcagaggccgtgcacctggacaagtgcaaccccctggtgaacctgaactatgctgtgctgctgtacaaccagggcgagaagaagaatgccctggcccagtaccaggagatggagaagaaggtgtccctgctgaaggacaacagcagcctggagtttgattctgagatggtggagatggcccagaagctgggcgccgccctgcaggtgggggaggccctggtgtggaccaagcctgtgaaggaccccaagagcaagcaccagaccaccagcaccagcaagccagccagcttccagcagcccctgggcagcaaccaggccctgggccaggccatgagcagcgctgctgcctaccgcaccctgcccagcggggccggcggcaccagccagttcaccaagccacccagcctgcccctggagcctgagcctgctgtggagagcagccccacagagaccagcgagcagatccgggagaagtag

SEQ ID NO: 144787 - DNA, 1026 bp, synthetic construct
  misc_feature 1..1026: note = Description of Artificial Sequence: Synthetic coding sequence
  source 1..1026: mol_type = other DNA
atgtctgtgctggatgccctgtgggaggacagagatgtgcgctttgacctgagcgcccagcagatgaagaccaggcctggagaggtgctgattgactgcctggacagcattgaggacaccaagggcaacaacggggaccggggccgcctgctggtgaccaacctgcgcatcctgtggcacagcctggccctgagccgggtgaatgtgtctgtgggctacaactgcatcctgaacatcaccaccaggacagccaacagcaagctgcggggccagacagaggccctgtacatcctgaccaagtgcaacagcaccaggtttgagttcatcttcaccaacctggtgcccggcagccccaggctcttcacctctgtgatggctgtgcaccgggcctatgagaccagcaagatgtacagagacttcaagctgcggagcgccctgatccagaacaagcagctgcggctgctgccccaggagcacgtgtatgacaagatcaatggagtgtggaacctgagcagtgaccagggcaacctgggcaccttcttcatcaccaacgtgagaattgtgtggcacgccaacatgaatgacagcttcaacgtgtccatcccctacctgcagatccgcagcatcaagatccgggacagcaagtttggcctggccctggtgattgagagcagccagcagagcggcggctacgtgctgggcttcaagattgatcctgtggagaagctgcaggagagcgtgaaggagatcaacagcctgcacaaggtgtacagcgccagccccatctttggagtggactatgagatggaggagaagccccagcccctggaggccctgactgtggagcagatccaggatgatgtggagattgacagtgatggccacacagatgcctttgtggcctactttgctgatggcaacaagcagcaggaccgggagcccgtcttcagcgaggagctgggcctggccatcgagaagctgaaggatggcttcaccctgcagggcctgtgggaggtgatgtcctag

SEQ ID NO: 144788 - DNA, 963 bp, synthetic construct
  misc_feature 1..963: note = Description of Artificial Sequence: Synthetic coding sequence
  source 1..963: mol_type = other DNA
atgtctgtgctggatgccctgtgggaggacagagatgtgcgctttgacctgagcgcccagcagatgaagaccaggcctggagaggtgctgattgactgcctggacagcattgaggacaccaagggcaacaacggggaccggggccgcctgctggtgaccaacctgcgcatcctgtggcacagcctggccctgagccgggtgaatgtgtctgtgggctacaactgcatcctgaacatcaccaccaggacagccaacagcaagctgcggggccagacagaggccctgtacatcctgaccaagtgcaacagcaccaggtttgagttcatcttcaccaacctggtgcccggcagccccaggctcttcacctctgtgatggctgtgcaccgggcctatgagaccagcaagatgtacagagacttcaagctgcggagcgccctgatccagaacaagcagctgcggctgctgccccaggagcacgtgtatgacaagatcaatggagtgtggaacctgagcagtgaccagggcaacctgggcaccttcttcatcaccaacgtgagaattgtgtggcacgccaacatgaatgacagcttcaacgtgtccatcccctacctgcagatcagcggcggctacgtgctgggcttcaagattgatcctgtggagaagctgcaggagagcgtgaaggagatcaacagcctgcacaaggtgtacagcgccagccccatcttcggcgtggactatgagatggaggagaagccccagcccctggaggccctgactgtggagcagatccaggatgatgtggagattgacagtgatggccacacagatgcctttgtggcctactttgctgatggcaacaagcagcaggaccgggagcctgtgttcagcgaggagctgggcctggccatcgagaagctgaaggatggcttcaccctgcagggcctgtgggaggtgatgtcctag

SEQ ID NO: 144789 - DNA, 1635 bp, synthetic construct
  misc_feature 1..1635: note = Description of Artificial Sequence: Synthetic coding sequence
  source 1..1635: mol_type = other DNA
atgtctgtgctggatgccctgtgggaggacagagatgtgcgctttgacctgagcgcccagcagatgaagaccaggcctggagaggtgctgattgactgcctggacagcattgaggacaccaagggcaacaacggggaccggggccgcctgctggtgaccaacctgcgcatcctgtggcacagcctggccctgagccgggtgaatgtgtctgtgggctacaactgcatcctgaacatcaccaccaggacagccaacagcaagctgcggggccagacagaggccctgtacatcctgaccaagtgcaacagcaccaggtttgagttcatcttcaccaacctggtgcccggcagccccaggctcttcacctctgtgatggctgtgcaccgggcctatgagaccagcaagatgtacagagacttcaagctgcggagcgccctgatccagaacaagcagctgcggctgctgccccaggagcacgtgtatgacaagatcaatggagtgtggaacctgagcagtgaccagggcaacctgggcaccttcttcatcaccaacgtgagaattgtgtggcacgccaacatgaatgacagcttcaacgtgtccatcccctacctgcagatccgcagcatcaagatccgggacagcaagtttggcctggccctggtgattgagagcagccagcagagcggcggctacgtgctgggcttcaagattgatcctgtggagaagctgcaggagagcgtgaaggagatcaacagcctgcacaaggtgtacagcgccagccccatctttggagtggactatgagatggaggagaagccccagcccctggaggccctgactgtggagcagatccaggatgatgtggagattgacagtgatggccacacagatgcctttgtggcctactttgctgatggcaacaagctggacagcatcgccagcgagtgggtgggcctgccccccctgcccagcgcccgctgcctgtttggcctgggggaggtggatgacaagatctacgtggtggccggcaaggacctgcagacagaggccagcctggacagcgtgctgtgctatgaccctgtggccgccaagtggaatgaggtgaagaagctgcccatcaaggtgtatggccacaacgtcatcagccacaagggcatgatctactgcctgggcggcaagacagatgacaagaagtgcaccaacagagtcttcatcttcaaccccaagaagggggactggaaggacctggcccccatgaagatccccaggtccatgtttggagtggccgtgcacaagggcaagatcgtgattgctgggggcgtgacagaagatggcctgagcgcctctgtggaggcctttgacctgaccaccaacaagtgggatgtgatgacagagttcccccaggagaggagcagcatcagcctggtgtccctggccggcagcctgtatgccatcggcggctttgccatgatccagctggagagcaaggagtttgcccccacagaggtgaatgacatctggaagtatgaagatgacaagaaggagtgggccggcatgctgaaggagatccgctatgccagcggggccagctgcctggccacccggctgaacctcttcaagctgagcaagctgtag

SEQ ID NO: 144790 - DNA, 2148 bp, synthetic construct
  misc_feature 1..2148: note = Description of Artificial Sequence: Synthetic coding sequence
  source 1..2148: mol_type = other DNA
atggacctgatcctgaacaggatggactacctgcaggtgggcgtgaccagccagaagaccatgaagctgatcccagccagccgccaccgggccacccagaaggtggtgattggagaccatgatggagtggtgatgtgcttcggcatgaagaagggggaggccgctgctgtgttcaagaccctgcccggccccaagatcgcccggctggagctgggcggcgtcatcaacaccccccaggagaagatcttcatcgccgccgccagcgagatccggggcttcaccaagaggggcaagcagttcctgagctttgagaccaacctgacagagagcatcaaggccatgcacatcagcggcagtgacctcttcctgagcgccagctacatctacaaccactactgtgactgcaaggaccagcactactacctgagcggggacaagatcaatgatgtgatctgcctgcctgtggagcggctgagccgcatcacccctgtgctggcctgccaggacagagtgctgcgggtgctgcagggcagtgatgtgatgtatgctgtggaggtgcccggccccccaacagtgctggccctgcacaatggaaatggaggagacagcggggaggacctgctgtttggcaccagtgatggcaagctggccctgatccagatcaccaccagcaagcctgtgaggaagtgggagatccagaatgagaagaagagaggaggcatcctgtgcatcgacagctttgatattgtgggagatggagtgaaggacctgctggtgggcagagatgatggcatggtggaggtgtacagctttgacaatgccaatgaacctgtgctgcgctttgaccagatgctgtctgagagcgtgaccagcatccagggcggctgtgtgggcaaggacagctatgatgaaattgtggtgtccacctacagcggctgggtgacaggcctgaccacagagcccatccacaaggagagcggccctggagaggagctgaagatcaaccaggagatgcagaacaagatcagcagcctgagaaatgagctggagcacctgcagtacaaggtgctgcaggagcgggagaactaccagcagagcagccagagcagcaaggccaagtctgctgtgcccagctttggcatcaatgacaagttcaccctgaacaaggatgatgccagctacagcctcatcctggaggtgcagacagccatcgacaacgtgctgatccagagtgatgtgcccatcgacctgctggatgtggacaagaacagcgctgtggtgtccttcagcagctgtgacagcgagagcaatgacaacttcctgctggccacctaccgctgccaggccgacaccacccggctggagctgaagatccgcagcattgagggccagtatggcaccctgcaggcctacgtgaccccccgcatccagcccaagacctgccaggtgcggcagtaccacatcaagcccctgagcctgcaccagaggacccacttcatcgaccatgaccggcccatgaacaccctgaccctgaccggccagttctcctttgctgaggtgcacagctgggtggtgttctgcctgcctgaggtgcctgagaagcccccagctggagaatgtgtgaccttctacttccagaacaccttcctggacacccagctggagagcacctacaggaagggggagggcgtcttcaagagtgacaacatcagcaccatcagcatcctgaaggatgtgctgagcaaggaggccaccaagaggaagatcaacctgaacatctcctatgagatcaatgaggtgtctgtgaagcacaccctgaagctgatccaccccaagctggagtaccagctgctgctggccaagaaggtgcagctgattgatgccctgaaggagctgcagatccacgagggcaacaccaacttcctgatccctgagtaccactgcatcctggaggaggccgaccacctgcaggaggagtacaagaagcagcctgcccacctggagcggctgtatggcatgatcacagacctcttcatcgacaagttcaagttcaagggcaccaacgtgaagaccaaggtgcccctgctgctggagatcctggacagctatgaccagaatgccctgatctccttctttgatgctgcctag

SEQ ID NO: 144791 - DNA, 2019 bp, synthetic construct
  misc_feature 1..2019: note = Description of Artificial Sequence: Synthetic coding sequence
  source 1..2019: mol_type = other DNA
atggacctgatcctgaacaggatggactacctgcaggtgggcgtgaccagccagaagaccatgaagctgatcccagccagccgccaccgggccacccagaaggtggtgattggagaccatgatggagtggtgatgtgcttcggcatgaagaagggggaggccgctgctgtgttcaagaccctgcccggccccaagatcgcccggctggagctgggcggcgtcatcaacaccccccaggagaagatcttcatcgccgccgccagcgagatccggggcttcaccaagaggggcaagcagttcctgagctttgagaccaacctgacagagagcatcaaggccatgcacatcagcggcagtgacctcttcctgagcgccagctacatctacaaccactactgtgactgcaaggaccagcactactacctgagcggggacaagatcaatgatgtgatctgcctgcctgtggagcggctgagccgcatcacccctgtgctggcctgccaggacagagtgctgcgggtgctgcagggcagtgatgtgatgtatgctgtggaggtgcccggccccccaacagtgctggccctgcacaatggaaatggaggagacagcggggaggacctgctgtttggcaccagtgatggcaagctggccctgatccagatcaccaccagcaagcctgtgaggaagtgggagatccagaatgagaagaagagaggaggcatcctgtgcatcgacagctttgatattgtgggagatggagtgaaggacctgctggtgggcagagatgatggcatggtggaggtgtacagctttgacaatgccaatgaacctgtgctgcgctttgaccagatgctgtctgagagcgtgaccagcatccagggcggctgtgtgggcaaggacagctatgatgaaattgtggtgtccacctacagcggctgggtgacaggcctgaccacagagcccatccacaaggagagcggccctggagaggagctgaagatcaaccaggagatgcagaacaagatcagcagcctgagaaatgagctggagcacctgcagtacaaggtgctgcaggagcgggagaactaccagcagagcagccagagcagcaaggccaagtctgctgtgcccagctttggcatcaatgacaagttcaccctgaacaaggatgatgccagctacagcctcatcctggaggtgcagacagccatcgacaacgtgctgatccagagtgatgtgcccatcgacctgctggatgtggacaagaacagcgctgtggtgtccttcagcagctgtgacagcgagagcaatgacaacttcctgctggccacctaccgctgccaggccgacaccacccggctggagctgaagatccgcagcattgagggccagtatggcaccctgcaggcctacgtgaccccccgcatccagcccaagacctgccaggtgcggcagtaccacatcaagcccctgagcctgcaccagaggacccacttcatcgaccatgaccggcccatgaacaccctgaccctgaccggccagttctcctttgctgaggtgcacagctgggtggtgttctgcctgcctgaggtgcctgagaagcccccagctggagaatgtgtgaccttctacttccagaacaccttcctggacacccagctggagagcacctacaggaagggggagggcgtcttcaagagtgacaacatcagcaccatcagcatcctgaaggatgtgctgagcaaggaggccaccaagaggaagatcaacctgaacatctcctatgagatcaatgaggtgtctgtgaagcacaccctgaagctgatccaccccaagctggagtaccagctgctgctggccaagaaggtgcagctgattgatgccctgaaggagctgcagatccacgagggcaacaccaacttcctgatccctgagtaccactgcatcctggaggaggccgaccacctgcaggaggagtacaagaagcagcctgcccacctggagcggctgtatggatag

SEQ ID NO: 144792 - DNA, 417 bp, synthetic construct
  misc_feature 1..417: note = Description of Artificial Sequence: Synthetic coding sequence
  source 1..417: mol_type = other DNA
gatgtgctgagcaaggaggccaccaagaggaagatcaacctgaacatctcctatgagatcaatgaggtgtctgtgaagcacaccctgaagctgatccaccccaagctggagtaccagctgctgctggccaagaaggtgcagctgattgatgccctgaaggagctgcagatccacgagggcaacaccaacttcctgatccctgagtaccactgcatcctggaggaggccgaccacctgcaggaggagtacaagaagcagcctgcccacctggagcggctgtatggcatgatcacagacctcttcatcgacaagttcaagttcaagggcaccaacgtgaagaccaaggtgcccctgctgctggagatcctggacagctatgaccagaatgccctgatctccttctttgatgctgcctag

SEQ ID NO: 144793 - DNA, 2664 bp, synthetic construct
  misc_feature 1..2664: note = Description of Artificial Sequence: Synthetic coding sequence
  source 1..2664: mol_type = other DNA
atgagcctcttcaaggcccgggactggtggagcaccatcctgggggacaaggaggagtttgaccagggctgcctgtgcctggccaacgtggacaacagcggaaatggccaggacaagatcatcgtgggcagcttcatgggctacctgcgcatcttcagcccccacccagccaagacaggagatggagcccaggccgaggacctgctgctggaggtggacctgcgggaccctgtgctgcaggtggaggtgggcaagtttgtgtctggaacagagatgctgcacctggccgtgctgcacagcaggaagctgtgtgtgtacagcgtgtctggcaccctgggcaatgtggagcacggcaaccagtgccagatgaagctgatgtatgagcacaacctgcagaggacagcctgcaacatgacctacggcagctttggaggagtgaagggccgggacctgatctgcatccagagcatggatggcatgctgatggtgtttgagcaggagagctatgccttcggccgcttcctgcccggcttcctgctgcccggccccctggcctacagcagcaggacagacagcttcctgactgtgagcagctgccagcaggtggagagctacaagtaccaggtgctggcctttgccacagatgctgacaagaggcaggagacagagcagcagaagctgggcagcggcaagaggctggtggtggactggaccctgaacattggagagcaggccctggacatctgcatcgtgtccttcaaccagagcgccagctctgtgtttgtgctgggggagaggaacttcttctgcctgaaggacaatggccagatccgcttcatgaagaagctggactggagccccagctgcttcctgccctactgcagcgtgtctgagggcaccatcaacaccctgattggcaaccacaacaacatgctgcacatctaccaggatgtgaccctgaagtgggccacccagctgccccacatccctgtggccgtgcgggtgggctgcctgcatgacctgaagggcgtgattgtgaccctgagtgatgatggccacctgcagtgcagctacctgggcacagaccccagcctcttccaggcccccaacgtgcagagccgggagctgaactatgatgagctggatgtggagatgaaggagctgcagaagatcatcaaggatgtgaacaagagccagggcgtgtggcccatgacagagcgggaggatgacctgaatgtgtctgtggtggtgagccccaactttgattctgtgtcccaggccacagatgtggaggtgggcacagacctggtgcccagcgtgacagtgaaggtgaccctgcagaacagagtcatcctgcagaaggccaagctgtctgtgtatgtgcagccccccctggagctgacctgtgaccagttcacctttgagttcatgaccccagacctgaccaggacagtgtccttctctgtgtacctgaagaggagctacacccccagcgagctggagggcaatgctgtggtgtcctacagccggcccacagacaggaacccagatggcatccccagggtcatccagtgcaagttccggctgcccctgaagctgatctgcctgcccggccagcccagcaagacagccagccacaagatcaccatcgacaccaacaagagccctgtgtccctgctgagcctcttccctggctttgccagccagagtgatgatgaccaggtgaatgtgatgggcttccacttcctgggcggggcccgcatcaccgtgctggccagcaagaccagccagcgctaccgcatccagagcgagcagtttgaggacctgtggctgatcaccaatgagctgatcctgcggctgcaggagtactttgagaagcagggcgtgaaggactttgcctgcagcttcagcggcagcatccccctgcaggagtactttgagctgattgaccaccactttgagctgcgcatcaacggggagaagctggaggagctgctgtctgaaagagctgtgcagttccgggccatccagaggcggctgctggcccgcttcaaggacaagaccccagcccccctgcagcacctggacaccctgctggatggcacctacaagcaggtgattgccctggctgatgctgtggaggagaaccagggcaacctcttccagagcttcacccggctgaagagcgccacccacctggtgatcctgctgattgccctgtggcagaagctgtctgctgaccaggtggccatcctggaggccgccttcctgcccctgcaggaggacacccaggagctgggctgggaggagaccgtggatgctgccatcagccacctgctgaagacctgcctgagcaagagcagcaaggagcaggccctgaacctgaacagccagctgaacatccccaaggacaccagccagctgaagaagcacatcaccctgctgtgtgaccggctgagcaaaggaggccgcctgtgcctgagcacagatgctgctgccccccagaccatggtgatgcctgggggctgcaccaccatccctgagagtgacctggaggagaggtctgtggagcaggacagcacagagctgttcaccaaccaccgccacctgacagctgagacccccaggcctgaggtgagccccctgcagggcgtgtctgagtag

SEQ ID NO: 144794 - DNA, 2544 bp, synthetic construct
  misc_feature 1..2544: note = Description of Artificial Sequence: Synthetic coding sequence
  source 1..2544: mol_type = other DNA
atgagcctcttcaaggcccgggactggtggagcaccatcctgggggacaaggaggagtttgaccagggctgcctgtgcctggccaacgtggacaacagcggaaatggccaggacaagatcatcgtgggcagcttcatgggctacctgcgcatcttcagcccccacccagccaagacaggagatggagcccaggccgaggacctgctgctggaggtggacctgcgggaccctgtgctgcaggtggaggtgggcaagtttgtgtctggaacagagatgctgcacctggccgtgctgcacagcaggaagctgtgtgtgtacagcgtgtctggcaccctgggcaatgtggagcacggcaaccagtgccagatgaagctgatgtatgagcacaacctgcagaggacagcctgcaacatgacctacggcagctttggaggagtgaagggccgggacctgatctgcatccagagcatggatggcatgctgatggtgtttgagcaggagagctatgccttcggccgcttcctgcccggcttcctgctgcccggccccctggcctacagcagcaggacagacagcttcctgactgtgagcagctgccagcaggtggagagctacaagtaccaggtgctggcctttgccacagatgctgacaagaggcaggagacagagcagcagaagctgggcagcggcaagaggctggtggtggactggaccctgaacattggagagcaggccctggacatctgcatcgtgtccttcaaccagagcgccagctctgtgtttgtgctgggggagaggaacttcttctgcctgaaggacaatggccagatccgcttcatgaagaagctggactggagccccagctgcttcctgccctactgcagcgtgtctgagggcaccatcaacaccctgattggcaaccacaacaacatgctgcacatctaccaggatgtgaccctgaagtgggccacccagctgccccacatccctgtggccgtgcgggtgggctgcctgcatgacctgaagggcgtgattgtgaccctgagtgatgatggccacctgcagtgcagctacctgggcacagaccccagcctcttccaggcccccaacgtgcagagccgggagctgaactatgatgagctggatgtggagatgaaggagctgcagaagatcatcaaggatgtgaacaagagccagggcgtgtggcccatgacagagcgggaggatgacctgaatgtgtctgtggtggtgagccccaactttgattctgtgtcccaggccacagatgtggaggtgggcacagacctggtgcccagcgtgacagtgaaggtgaccctgcagaacagagtcatcctgcagaaggccaagctgtctgtgtatgtgcagccccccctggagctgacctgtgaccagttcacctttgagttcatgagcatccccagggtcatccagtgcaagttccggctgcccctgaagctgatctgcctgcccggccagcccagcaagacagccagccacaagatcaccatcgacaccaacaagagccctgtgtccctgctgagcctcttccctggctttgccagccagagtgatgatgaccaggtgaatgtgatgggcttccacttcctgggcggggcccgcatcaccgtgctggccagcaagaccagccagcgctaccgcatccagagcgagcagtttgaggacctgtggctgatcaccaatgagctgatcctgcggctgcaggagtactttgagaagcagggcgtgaaggactttgcctgcagcttcagcggcagcatccccctgcaggagtactttgagctgattgaccaccactttgagctgcgcatcaacggggagaagctggaggagctgctgtctgaaagagctgtgcagttccgggccatccagaggcggctgctggcccgcttcaaggacaagaccccagcccccctgcagcacctggacaccctgctggatggcacctacaagcaggtgattgccctggctgatgctgtggaggagaaccagggcaacctcttccagagcttcacccggctgaagagcgccacccacctggtgatcctgctgattgccctgtggcagaagctgtctgctgaccaggtggccatcctggaggccgccttcctgcccctgcaggaggacacccaggagctgggctgggaggagaccgtggatgctgccatcagccacctgctgaagacctgcctgagcaagagcagcaaggagcaggccctgaacctgaacagccagctgaacatccccaaggacaccagccagctgaagaagcacatcaccctgctgtgtgaccggctgagcaaaggaggccgcctgtgcctgagcacagatgctgctgccccccagaccatggtgatgcctgggggctgcaccaccatccctgagagtgacctggaggagaggtctgtggagcaggacagcacagagctgttcaccaaccaccgccacctgacagctgagacccccaggcctgaggtgagccccctgcagggcgtgtctgagtag

SEQ ID NO: 144795 - DNA, 2559 bp, synthetic construct
  misc_feature 1..2559: note = Description of Artificial Sequence: Synthetic coding sequence
  source 1..2559: mol_type = other DNA
atgagcctcttcaaggcccgggactggtggagcaccatcctgggggacaaggaggagtttgaccagggctgcctgtgcctggccaacgtggacaacagcggaaatggccaggacaagatcatcgtgggcagcttcatgggctacctgcgcatcttcagcccccacccagccaagacaggagatggagcccaggccgaggacctgctgctggaggtggacctgcgggaccctgtgctgcaggtggaggtgggcaagtttgtgtctggaacagagatgctgcacctggccgtgctgcacagcaggaagctgtgtgtgtacagcgtgtctggcaccctgggcaatgtggagcacggcaaccagtgccagatgaagctgatgtatgagcacaacctgcagaggacagcctgcaacatgacctacggcagctttggaggagtgaagggccgggacctgatctgcatccagagcatggatggcatgctgatggtgtttgagcaggagagctatgccttcggccgcttcctgcccggcttcctgctgcccggccccctggcctacagcagcaggacagacagcttcctgactgtgagcagctgccagcaggtggagagctacaagtaccaggtgctggcctttgccacagatgctgacaagaggcaggagacagagcagcagaagctgggcagcggcaagaggctggtggtggactggaccctgaacattggagagcaggccctggacatctgcatcgtgtccttcaaccagagcgccagctctgtgtttgtgctgggggagaggaacttcttctgcctgaaggacaatggccagatccgcttcatgaagaagctggactggagccccagctgcttcctgccctactgcagcgtgtctgagggcaccatcaacaccctgattggcaaccacaacaacatgctgcacatctaccaggatgtgaccctgaagtgggccacccagctgccccacatccctgtggccgtgcgggtgggctgcctgcatgacctgaagggcgtgattgtgaccctgagtgatgatggccacctgcagtgcagctacctgggcacagaccccagcctcttccaggcccccaacgtgcagagccgggagctgaactatgatgagctggatgtggagatgaaggagctgcagaagatcatcaaggatgtgaacaagagccagggcgtgtggcccatgacagagcgggaggatgacctgaatgtgtctgtggtggtgagccccaactttgattctgtgtcccaggccacagatgtggaggtgggcacagacctggtgcccagcgtgacagtgaaggtgaccctgcagaacagagtcatcctgcagaaggccaagctgtctgtgtatgtgcagccccccctggagctgacctgtgaccagttcacctttgagttcatgagcctgaatgtgctgggcatccccagggtcatccagtgcaagttccggctgcccctgaagctgatctgcctgcccggccagcccagcaagacagccagccacaagatcaccatcgacaccaacaagagccctgtgtccctgctgagcctcttccctggctttgccagccagagtgatgatgaccaggtgaatgtgatgggcttccacttcctgggcggggcccgcatcaccgtgctggccagcaagaccagccagcgctaccgcatccagagcgagcagtttgaggacctgtggctgatcaccaatgaactcatcctgcggctgcaggagtactttgagaagcagggcgtgaaggactttgcctgcagcttcagcggcagcatccccctgcaggagtactttgagctgattgaccaccactttgagctgcgcatcaatggagagaagctggaggagctgctgtctgaaagagctgtgcagttccgggccatccagaggcggctgctggcccgcttcaaggacaagaccccagcccccctgcagcacctggacaccctgctggatggcacctacaagcaggtgattgccctggctgatgctgtggaggagaaccagggcaacctcttccagagcttcacccggctgaagagcgccacccacctggtgatcctgctgattgccctgtggcagaagctgtctgctgaccaggtggccatcctggaggccgccttcctgcccctgcaggaggacacccaggagctgggctgggaggagaccgtggatgctgccatcagccacctgctgaagacctgcctgagcaagagcagcaaggagcaggccctgaacctgaacagccagctgaacatccccaaggacaccagccagctgaagaagcacatcaccctgctgtgtgaccggctgagcaagggcggccgcctgtgcctgagcacagatgctgctgccccccagaccatggtgatgcctgggggctgcaccaccatccctgagagtgacctggaggagaggtctgtggagcaggacagcacagagctgttcaccaaccaccgccacctgacagctgagacccccaggcctgaggtgagccccctgcagggcgtgtctgagtag

SEQ ID NO: 144796 - DNA, 2649 bp, synthetic construct
  misc_feature 1..2649: note = Description of Artificial Sequence: Synthetic coding sequence
  source 1..2649: mol_type = other DNA
atgagcctcttcaaggcccgggactggtggagcaccatcctgggggacaaggaggagtttgaccagggctgcctgtgcctggccaacgtggacaacagcggaaatggccaggacaagatcatcgtgggcagcttcatgggctacctgcgcatcttcagcccccacccagccaagacaggagatggagcccaggccgaggacctgctgctggaggtggacctgcgggaccctgtgctgcaggtggaggtgggcaagtttgtgtctggaacagagatgctgcacctggccgtgctgcacagcaggaagctgtgtgtgtacagcgtgtctggcaccctgggcaatgtggagcacggcaaccagtgccagatgaagctgatgtatgagcacaacctgcagaggacagcctgcaacatgacctacggcagctttggaggagtgaagggccgggacctgatctgcatccagagcatggatggcatgctgatggtgtttgagcaggagagctatgccttcggccgcttcctgcccggcttcctgctgcccggccccctggcctacagcagcaggacagacagcttcctgactgtgagcagctgccagcaggtggagagctacaagtaccaggtgctggcctttgccacagatgctgacaagaggcaggagacagagcagcagaagctgggcagcggcaagaggctggtggtggactggaccctgaacattggagagcaggccctggacatctgcatcgtgtccttcaaccagagcgccagctctgtgtttgtgctgggggagaggaacttcttctgcctgaaggacaatggccagatccgcttcatgaagaagctggactggagccccagctgcttcctgccctactgcagcgtgtctgagggcaccatcaacaccctgattggcaaccacaacaacatgctgcacatctaccaggatgtgaccctgaagtgggccacccagctgccccacatccctgtggccgtgcgggtgggctgcctgcatgacctgaagggcgtgattgtgaccctgagtgatgatggccacctgcagtgcagctacctgggcacagaccccagcctcttccaggcccccaacgtgcagagccgggagctgaactatgatgagctggatgtggagatgaaggagctgcagaagatcatcaaggatgtgaacaagagccagggcgtgtggcccatgacagagcgggaggatgacctgaatgtgtctgtggtggtgagccccaactttgattctgtgtcccaggccacagatgtggaggtgggcacagacctggtgcccagcgtgacagtgaaggtgaccctgcagaacagagtcatcctgcagaaggccaagctgtctgtgtatgtgcagccccccctggagctgacctgtgaccagttcacctttgagttcatgaccccagacctgaccaggacagtgtccttctctgtgtacctgaagaggagctacacccccagcgagctggagggcaatgctgtggtgtcctacagccggcccaccggcatccccagggtcatccagtgcaagttccggctgcccctgaagctgatctgcctgcccggccagcccagcaagacagccagccacaagatcaccatcgacaccaacaagagccctgtgtccctgctgagcctcttccctggctttgccagccagagtgatgatgaccaggtgaatgtgatgggcttccacttcctgggcggggcccgcatcaccgtgctggccagcaagaccagccagcgctaccgcatccagagcgagcagtttgaggacctgtggctgatcaccaatgaactcatcctgcggctgcaggagtactttgagaagcagggcgtgaaggactttgcctgcagcttcagcggcagcatccccctgcaggagtactttgagctgattgaccaccactttgagctgcgcatcaatggagagaagctggaggagctgctgtctgaaagagctgtgcagttccgggccatccagaggcggctgctggcccgcttcaaggacaagaccccagcccccctgcagcacctggacaccctgctggatggcacctacaagcaggtgattgccctggctgatgctgtggaggagaaccagggcaacctcttccagagcttcacccggctgaagagcgccacccacctggtgatcctgctgattgccctgtggcagaagctgtctgctgaccaggtggccatcctggaggccgccttcctgcccctgcaggaggacacccaggagctgggctgggaggagaccgtggatgctgccatcagccacctgctgaagacctgcctgagcaagagcagcaaggagcaggccctgaacctgaacagccagctgaacatccccaaggacaccagccagctgaagaagcacatcaccctgctgtgtgaccggctgagcaagggcggccgcctgtgcctgagcacagatgctgctgccccccagaccatggtgatgcctgggggctgcaccaccatccctgagagtgacctggaggagaggtctgtggagcaggacagcacagagctgttcaccaaccaccgccacctgacagctgagacccccaggcctgaggtgagccccctgcagggcgtgtctgagtag

SEQ ID NO: 144797 - DNA, 1446 bp, synthetic construct
  misc_feature 1..1446: note = Description of Artificial Sequence: Synthetic coding sequence
  source 1..1446: mol_type = other DNA
atgagcctcttcaaggcccgggactggtggagcaccatcctgggggacaaggaggagtttgaccagggctgcctgtgcctggccaacgtggacaacagcggaaatggccaggacaagatcatcgtgggcagcttcatgggctacctgcgcatcttcagcccccacccagccaagacaggagatggagcccaggccgaggacctgctgctggaggtggacctgcgggaccctgtgctgcaggtggaggtgggcaagtttgtgtctggaacagagatgctgcacctggccgtgctgcacagcaggaagctgtgtgtgtacagcgtgtctggcaccctgggcaatgtggagcacggcaaccagtgccagatgaagctgatgtatgagcacaacctgcagaggacagcctgcaacatgacctacggcagctttggaggagtgaagggccgggacctgatctgcatccagagcatggatggcatgctgatggtgtttgagcaggagagctatgccttcggccgcttcctgcccggcttcctgctgcccggccccctggcctacagcagcaggacagacagcttcctgactgtgagcagctgccagcaggtggagagctacaagtaccaggtgctggcctttgccacagatgctgacaagaggcaggagacagagcagcagaagctgggcagcggcaagaggctggtggtggactggaccctgaacattggagagcaggccctggacatctgcatcgtgtccttcaaccagagcgccagctctgtgtttgtgctgggggagaggaacttcttctgcctgaaggacaatggccagatccgcttcatgaagaagctggactggagccccagctgcttcctgccctactgcagcgtgtctgagggcaccatcaacaccctgattggcaaccacaacaacatgctgcacatctaccaggatgtgaccctgaagtgggccacccagctgccccacatccctgtggccgtgcgggtgggctgcctgcatgacctgaagggcgtgattgtgaccctgagtgatgatggccacctgcagtgcagctacctgggcacagaccccagcctcttccaggcccccaacgtgcagagccgggagctgaactatgatgagctggatgtggagatgaaggagctgcagaagatcatcaaggatgtgaacaagagccagggcgtgtggcccatgacagagcgggaggatgacctgaatgtgtctgtggtggtgagccccaactttgattctgtgtcccaggccacagatgtggaggtgggcacagacctggtgcccagcgtgacagtgaaggtgaccctgcagaacagagtcatcctgcagaaggccaagctgtctgtgtatgtgcagccccccctggagctgacctgtgaccagttcacctttgagttcatgaacttccccagctag

SEQ ID NO: 144798 - DNA, 2559 bp, synthetic construct
  misc_feature 1..2559: note = Description of Artificial Sequence: Synthetic coding sequence
  source 1..2559: mol_type = other DNA
atgagcctcttcaaggcccgggactggtggagcaccatcctgggggacaaggaggagtttgaccagggctgcctgtgcctggccaacgtggacaacagcggaaatggccaggacaagatcatcgtgggcagcttcatgggctacctgcgcatcttcagcccccacccagccaagacaggagatggagcccaggccgaggacctgctgctggaggtggacctgcgggaccctgtgctgcaggtggaggtgggcaagtttgtgtctggaacagagatgctgcacctggccgtgctgcacagcaggaagctgtgtgtgtacagcgtgtctggcaccctgggcaatgtggagcacggcaaccagtgccagatgaagctgatgtatgagcacaacctgcagaggacagcctgcaacatgacctacggcagctttggaggagtgaagggccgggacctgatctgcatccagagcatggatggcatgctgatggtgtttgagcaggagagctatgccttcggccgcttcctgcccggcttcctgctgcccggccccctggcctacagcagcaggacagacagcttcctgactgtgagcagctgccagcaggtggagagctacaagtaccaggtgctggcctttgccacagatgctgacaagaggcaggagacagagcagcagaagctgggcagcggcaagaggctggtggtggactggaccctgaacattggagagcaggccctggacatctgcatcgtgtccttcaaccagagcgccagctctgtgtttgtgctgggggagaggaacttcttctgcctgaaggacaatggccagatccgcttcatgaagaagctggactggagccccagctgcttcctgccctactgcagcgtgtctgagggcaccatcaacaccctgattggcaaccacaacaacatgctgcacatctaccaggatgtgaccctgaagtgggccacccagctgccccacatccctgtggccgtgcgggtgggctgcctgcatgacctgaagggcgtgattgtgaccctgagtgatgatggccacctgcagtgcagctacctgggcacagaccccagcctcttccaggcccccaacgtgcagagccgggagctgaactatgatgagctggatgtggagatgaaggagctgcagaagatcatcaaggatgtgaacaagagccagggcgtgtggcccatgacagagcgggaggatgacctgaatgtgtctgtggtggtgagccccaactttgattctgtgtcccaggccacagatgtggaggtgggcacagacctggtgcccagcgtgacagtgaaggtgaccctgcagaacagagtcatcctgcagaaggccaagctgtctgtgtatgtgcagccccccctggagctgacctgtgaccagttcacctttgagttcatgaacagaaatccagatggcatccccagggtcatccagtgcaagttccggctgcccctgaagctgatctgcctgcccggccagcccagcaagacagccagccacaagatcaccatcgacaccaacaagagccctgtgtccctgctgagcctcttccctggctttgccagccagagtgatgatgaccaggtgaatgtgatgggcttccacttcctgggcggggcccgcatcaccgtgctggccagcaagaccagccagcgctaccgcatccagagcgagcagtttgaggacctgtggctgatcaccaatgaactcatcctgcggctgcaggagtactttgagaagcagggcgtgaaggactttgcctgcagcttcagcggcagcatccccctgcaggagtactttgagctgattgaccaccactttgagctgcgcatcaatggagagaagctggaggagctgctgtctgaaagagctgtgcagttccgggccatccagaggcggctgctggcccgcttcaaggacaagaccccagcccccctgcagcacctggacaccctgctggatggcacctacaagcaggtgattgccctggctgatgctgtggaggagaaccagggcaacctcttccagagcttcacccggctgaagagcgccacccacctggtgatcctgctgattgccctgtggcagaagctgtctgctgaccaggtggccatcctggaggccgccttcctgcccctgcaggaggacacccaggagctgggctgggaggagaccgtggatgctgccatcagccacctgctgaagacctgcctgagcaagagcagcaaggagcaggccctgaacctgaacagccagctgaacatccccaaggacaccagccagctgaagaagcacatcaccctgctgtgtgaccggctgagcaagggcggccgcctgtgcctgagcacagatgctgctgccccccagaccatggtgatgcctgggggctgcaccaccatccctgagagtgacctggaggagaggtctgtggagcaggacagcacagagctgttcaccaaccaccgccacctgacagctgagacccccaggcctgaggtgagccccctgcagggcgtgtctgagtag

SEQ ID NO: 144799 - DNA, 2664 bp, synthetic construct
  misc_feature 1..2664: note = Description of Artificial Sequence: Synthetic coding sequence
  source 1..2664: mol_type = other DNA
atgagcctcttcaaggcccgggactggtggagcaccatcctgggggacaaggaggagtttgaccagggctgcctgtgcctggccaacgtggacaacagcggaaatggccaggacaagatcatcgtgggcagcttcatgggctacctgcgcatcttcagcccccacccagccaagacaggagatggagcccaggccgaggacctgctgctggaggtggacctgcgggaccctgtgctgcaggtggaggtgggcaagtttgtgtctggaacagagatgctgcacctggccgtgctgcacagcaggaagctgtgtgtgtacagcgtgtctggcaccctgggcaatgtggagcacggcaaccagtgccagatgaagctgatgtatgagcacaacctgcagaggacagcctgcaacatgacctacggcagctttggaggagtgaagggccgggacctgatctgcatccagagcatggatggcatgctgatggtgtttgagcaggagagctatgccttcggccgcttcctgcccggcttcctgctgcccggccccctggcctacagcagcaggacagacagcttcctgactgtgagcagctgccagcaggtggagagctacaagtaccaggtgctggcctttgccacagatgctgacaagaggcaggagacagagcagcagaagctgggcagcggcaagaggctggtggtggactggaccctgaacattggagagcaggccctggacatctgcatcgtgtccttcaaccagagcgccagctctgtgtttgtgctgggggagaggaacttcttctgcctgaaggacaatggccagatccgcttcatgaagaagctggactggagccccagctgcttcctgccctactgcagcgtgtctgagggcaccatcaacaccctgattggcaaccacaacaacatgctgcacatctaccaggatgtgaccctgaagtgggccacccagctgccccacatccctgtggccgtgcgggtgggctgcctgcatgacctgaagggcgtgattgtgaccctgagtgatgatggccacctgcagtgcagctacctgggcacagaccccagcctcttccaggcccccaacgtgcagagccgggagctgaactatgatgagctggatgtggagatgaaggagctgcagaagatcatcaaggatgtgaacaagagccagggcgtgtggcccatgacagagcgggaggatgacctgaatgtgtctgtggtggtgagccccaactttgattctgtgtcccaggccacagatgtggaggtgggcacagacctggtgcccagcgtgacagtgaaggtgaccctgcagaacagagtcatcctgcagaaggccaagctgtctgtgtatgtgcagccccccctggagctgacctgtgaccagttcacctttgagttcatgaccccagacctgaccaggacagtgtccttctctgtgtacctgaagaggagctacacccccagcgagctggagggcaatgctgtggtgtcctacagccggcccaccgtgcagaacagcctgggcatccccagggtcatccagtgcaagttccggctgcccctgaagctgatctgcctgcccggccagcccagcaagacagccagccacaagatcaccatcgacaccaacaagagccctgtgtccctgctgagcctcttccctggctttgccagccagagtgatgatgaccaggtgaatgtgatgggcttccacttcctgggcggggcccgcatcaccgtgctggccagcaagaccagccagcgctaccgcatccagagcgagcagtttgaggacctgtggctgatcaccaatgagctgatcctgcggctgcaggagtactttgagaagcagggcgtgaaggactttgcctgcagcttcagcggcagcatccccctgcaggagtactttgagctgattgaccaccactttgagctgcgcatcaacggggagaagctggaggagctgctgtctgaaagagctgtgcagttccgggccatccagaggcggctgctggcccgcttcaaggacaagaccccagcccccctgcagcacctggacaccctgctggatggcacctacaagcaggtgattgccctggctgatgctgtggaggagaaccagggcaacctcttccagagcttcacccggctgaagagcgccacccacctggtgatcctgctgattgccctgtggcagaagctgtctgctgaccaggtggccatcctggaggccgccttcctgcccctgcaggaggacacccaggagctgggctgggaggagaccgtggatgctgccatcagccacctgctgaagacctgcctgagcaagagcagcaaggagcaggccctgaacctgaacagccagctgaacatccccaaggacaccagccagctgaagaagcacatcaccctgctgtgtgaccggctgagcaaaggaggccgcctgtgcctgagcacagatgctgctgccccccagaccatggtgatgcctgggggctgcaccaccatccctgagagtgacctggaggagaggtctgtggagcaggacagcacagagctgttcaccaaccaccgccacctgacagctgagacccccaggcctgaggtgagccccctgcagggcgtgtctgagtag

SEQ ID NO: 144800 - DNA, 933 bp, synthetic construct
  misc_feature 1..933: note = Description of Artificial Sequence: Synthetic coding sequence
  source 1..933: mol_type = other DNA
atgggctacctgcgcatcttcagcccccacccagccaagacaggagatggagcccaggccgaggacctgctgctggaggtggacctgcgggaccctgtgctgcaggtggaggtgggcaagtttgtgtctggaacagagatgctgcacctggccgtgctgcacagcaggaagctgtgtgtgtacagcgtgtctggcaccctgggcaatgtggagcacggcaaccagtgccagatgaagctgatgtatgagcacaacctgcagaggacagcctgcaacatgacctacggcagctttggaggagtgaagggccgggacctgatctgcatccagagcatggatggcatgctgatggtgtttgagcaggagagctatgccttcggccgcttcctgcccggcttcctgctgcccggccccctggcctacagcagcaggacagacagcttcctgactgtgagcagctgccagcaggtggagagctacaagtaccaggtgctggcctttgccacagatgctgacaagaggcaggagacagagcagcagaagctgggcagcggcaagaggctggtggtggactggaccctgaacatcggggagcaggccctggacatctgcatcgtgtccttcaaccagagcgccagctctgtgtttgtgctgggggagaggaacttcttctgcctgaaggacaatggccagatccgcttcatgaagaagctggactggagccccagctgcttcctgccctactgcagcgtgtctgagggcaccatcaacaccctcatcggcaaccacaacaacatgctgcacatctaccaggatgtgaccctgaagtgggccacccagctgccccacatccctgtggccgtgcgggtgggctgcctgcagttcagcctgtggaagcacctgctgcccaggagcagcaccctggagaagtag

SEQ ID NO: 144801 - DNA, 294 bp, synthetic construct
  misc_feature 1..294: note = Description of Artificial Sequence: Synthetic coding sequence
  source 1..294: mol_type = other DNA
atgagcctcttcaaggcccgggactggtggagcaccatcctgggggacaaggaggagtttgaccagggctgcctgtgcctggccaacgtggacaacagcggaaatggccaggacaagatcatcgtgggcagcttcatgggctacctgcgcatcttcagcccccacccagccaagacaggagatggagcccaggccgaggacctgctgctggaggtggacctgcgggaccctgtgctgcaggtggaggtgggcaagtttgtgtctggaacagagatgctgcacctggccgtgtag

SEQ ID NO: 144802 - DNA, 1365 bp, synthetic construct
  misc_feature 1..1365: note = Description of Artificial Sequence: Synthetic coding sequence
  source 1..1365: mol_type = other DNA
tgagacctggtgcccagcgtgacagtgaaggtgaccctgcagaacagagtcatcctgcagaaggccaagctgtctgtgtatgtgcagccccccctggagctgacctgtgaccagttcacctttgagttcatgaccccagacctgaccaggacagtgtccttctctgtgtacctgaagaggagctacaccccatctgagctggagggcaatgctgtggtgtcctacagccggcccacagacagaaatccagatggcatccccagggtcatccagtgcaagttccggctgcccctgaagctgatctgcctgcccggccagcccagcaagacagccagccacaagatcaccatcgacaccaacaagagccctgtgtccctgctgagcctcttccctggctttgccagccagagtgatgatgaccaggtgaatgtgatgggcttccacttcctgggcggggcccgcatcaccgtgctggccagcaagaccagccagcgctaccgcatccagagcgagcagtttgaggacctgtggctgatcaccaatgaactcatcctgcggctgcaggagtactttgagaagcagggcgtgaaggactttgcctgcagcttcagcggcagcatccccctgcaggagtactttgagctgattgaccaccactttgagctgcgcatcaatggagagaagctggaggagctgctgtctgaaagagctgtgcagttccgggccatccagaggcggctgctggcccgcttcaaggacaagaccccagcccccctgcagcacctggacaccctgctggatggcacctacaagcaggtgattgccctggctgatgctgtggaggagaaccagggcaacctcttccagagcttcacccggctgaagagcgccacccacctggtgatcctgctgattgccctgtggcagaagctgtctgctgaccaggtggccatcctggaggccgccttcctgcccctgcaggaggacacccaggagctgggctgggaggagaccgtggatgctgccatcagccacctgctgaagacctgcctgagcaagagcagcaaggagcaggccctgaacctgaacagccagctgaacatccccaaggacaccagccagctgaagaagcacatcaccctgctgtgtgaccggctgagcaagggcggccgcctgtgcctgagcacagatgctgctgccccccagaccatggtgatgcctgggggctgcaccaccatccctgagagtgacctggaggagaggtctgtggagcaggacagcacagagctgttcaccaaccaccgccacctgacagctgagacccccaggcctgggaagaggctggatggcctgcacaagaggtag

SEQ ID NO: 144803 - DNA, 1227 bp, synthetic construct
  misc_feature 1..1227: note = Description of Artificial Sequence: Synthetic coding sequence
  source 1..1227: mol_type = other DNA
atgaagctgatgtatgagcacaacctgcagaggacagcctgcaacatgacctacggcagctttggaggagtgaagggccgggacctgatctgcatccagagcatggatggcatgctgatggtgtttgagcaggagagctatgccttcggccgcttcctgcccggcttcctgctgcccggccccctggcctacagcagcaggacagacagcttcctgactgtgagcagctgccagcaggtggagagctacaagtaccaggtgctggcctttgccacagatgctgacaagaggcaggagacagagcagcagaagctgggcagcggcaagaggctggtggtggactggaccctgaacattggagagcaggccctggacatctgcatcgtgtccttcaaccagagcgccagctctgtgtttgtgctgggggagaggaacttcttctgcctgaaggacaatggccagatccgcttcatgaagaagctggactggagccccagctgcttcctgccctactgcagcgtgtctgagggcaccatcaacaccctgattggcaaccacaacaacatgctgcacatctaccaggatgtgaccctgaagtgggccacccagctgccccacatccctgtggccgtgcgggtgggctgcctgcatgacctgaagggcgtgattgtgaccctgagtgatgatggccacctgcagtgcagctacctgggcacagaccccagcctcttccaggcccccaacgtgcagagccgggagctgaactatgatgagctggatgtggagatgaaggagctgcagaagatcatcaaggatgtgaacaagagccagggcgtgtggcccatgacagagcgggaggatgacctgaatgtgtctgtggtggtgagccccaactttgattctgtgtcccaggccacagatgtggaggtgggcacagacctggtgcccagcgtgacagtgaaggtgaccctgcagaacagagtcatcctgcagaaggccaagctgtctgtgtatgtgcagccccccctggagctgacctgtgaccagttcacctttgagttcatgaccccagacctgaccaggacagtgtccttctctgtgtacctgaagaggagcatccaccaccagaactggaaggagatgctgctcttcctgatcccagaccagcagatcgagatcctgatggccttccgggagctgagcaatgtgaacctggacttcccctag

SEQ ID NO: 144804 - DNA, 984 bp, synthetic construct
  misc_feature 1..984: note = Description of Artificial Sequence: Synthetic coding sequence
  source 1..984: mol_type = other DNA
atggagggcagcaatggatttggaattgacagcatcctgagccacagagctggcagccctgccctgcccaagggggaccccctgctgggggactgccgcagccccctggagctgagccccaggtctgagagcagcagtgactgcagcagccctgccagccctggccgggactgcctggagaccggcacccccaggcctgggggcgccagcggccctggcctggacagccacctgcagcccggccagctgagcgccccagcccagagcaggacagtgaccagcagcttcctgatccgggacatcctggccgactgcaagcccctggccgcctgtgccccctacagcagcagcggccagcctgctgcccctgagcccggcggccgcctggccgccaaggctgctgaggacttccgggacaagctggacaagagcggcagcaatgccagcagtgacagcgagtacaaggtgaaggaggagggggaccgggagatcagcagcagccgggacagcccccctgtgcggctgaagaagcccaggaaggccaggacagccttcacagaccaccagctggcccagctggagaggagctttgagcggcagaagtacctgtctgtgcaggacaggatggagctggccgccagcctgaacctgacagacacccaggtgaagacctggtaccagaacagaaggaccaagtggaagaggcagacagctgtgggcctggagctgctggccgaggccggcaactacagcgccctgcagaggatgttccccagcccctacttctacccccagagcctggtgagcaacctggaccctggagctgccctgtacctgtaccggggccccagcgcccctcctccagccctgcagaggcccctggtgccccgcatcctgattcatggcctgcagggcgccagcgagcccccaccacccctgccccccctggccggcgtgctgcccagggctgcccagcccaggtag

SEQ ID NO: 144805 - DNA, 984 bp, synthetic construct; identical to SEQ ID NO: 144804
  misc_feature 1..984: note = Description of Artificial Sequence: Synthetic coding sequence
  source 1..984: mol_type = other DNA

SEQ ID NO: 144806 - DNA, 270 bp, synthetic construct
  misc_feature 1..270: note = Description of Artificial Sequence: Synthetic coding sequence
  source 1..270: mol_type = other DNA
atgaccaccagccagaagcaccgggactttgtggccgagcccatgggagagaagcctgtgggcagcctggccggcatcggggaggtgctgggcaagaagctggaggagcggggctttgacaaggcctacgtggtgctgggccagttcctggtgctgaagaaggatgaggacctcttccgggagtggctgaaggacacctgtggggccaatgccaagcagagccgggactgcttcggctgcctgcgggagtggtgtgatgccttcctgtag

SEQ ID NO: 144807 - DNA, 270 bp, synthetic construct; identical to SEQ ID NO: 144806
  misc_feature 1..270: note = Description of Artificial Sequence: Synthetic coding sequence
  source 1..270: mol_type = other DNA

SEQ ID NO: 144808 - DNA, 270 bp, synthetic construct; identical to SEQ ID NO: 144806
  misc_feature 1..270: note = Description of Artificial Sequence: Synthetic coding sequence
  source 1..270: mol_type = other DNA

SEQ ID NO: 144809 - DNA, 87 bp, synthetic construct
  misc_feature 1..87: note = Description of Artificial Sequence: Synthetic coding sequence
  source 1..87: mol_type = other DNA
atgaccaccagccagaagcaccgggactttgtggccgagcccatgggagagaagcctgtgggcagcctggccggcatcggggagtag

SEQ ID NO: 144810 - DNA, 270 bp, synthetic construct; identical to SEQ ID NO: 144806
  misc_feature 1..270: note = Description of Artificial Sequence: Synthetic coding sequence
  source 1..270: mol_type = other DNA

SEQ ID NO: 144811 - DNA, 963 bp, synthetic construct
  misc_feature 1..963: note = Description of Artificial Sequence: Synthetic coding sequence
  source 1..963: mol_type = other DNA
atggctgatgagaagaccttcagaattggcttcatcgtgctgggcctcttcctgctggccctgggcaccttcctgatgagccatgaccggccccaggtgtatggcaccttctacgccatgggctctgtgatggtgattggaggcatcatctggagcatgtgccagtgctaccccaagatcacctttgtgcctgctgacagcgacttccagggcatcctgagccccaaggccatgggcctgctggagaatggcctggccgctgagatgaagagccccagcccccagcccccctacgtgcggctgtgggaggaggccgcctatgaccagagcctgcctgacttcagccacatccagatgaaggtgatgagctacagcgaggaccacaggagcctgctggcccctgagatgggccagcccaagctgggcaccagtgatggaggagagggcggccctggagatgtgcaggcctggatggaggccgctgtggtgatccacaagggcagtgatgaaagtgaaggagagcggcggctgacccagagctggccaggccccctggcctgcccccagggccctgcccccctggccagcttccaggatgacctggacatggacagcagcgagggcagcagccccaatgccagcccccatgaccgggaggaggcctgcagcccccagcaggagccccagggctgccgctgccccctggaccgcttccaggactttgccctgattgatgcccccaccctggaggatgagccccaggagggccagcagtgggagatcgccctgcccaacaactggcagcgctaccccaggaccaaggtggaggagaaggaggccagtgacacaggaggagaggagcctgagaaggaggaggaggacctgtactacggcctgcctgatggagctggggacctgctgcctgacaaggagctgggctttgagccagacacccagggctag

SEQ ID NO: 144812 - DNA, 765 bp, synthetic construct
  misc_feature 1..765: note = Description of Artificial Sequence: Synthetic coding sequence
  source 1..765: mol_type = other DNA
atgcagaggcctggagagcctggagctgcccgcttcggccccccagagggctgtgccgaccaccggccccaccgctaccgctccttcatgattgaggagatcctgacagagcccccaggccccaagggggccgccccagctgctgctgctgctgctgctggggagctgctgaagtttggagtgcaggccctgctggccgcccggcccttccacagccacctggccgtgctgaaggccgagcaggccgctgtgttcaagttccccctggcccccctgggctgcagcggcctgagcagcgccctgctggccgccggccctggcctgcctggagctgctggggccccccacctgcccctggagctgcagctgcggggcaagctggaggccgccggccctggagagcccggcaccaaggccaagaagggcagaagaagcaggacagtgttcacagagctgcagctgatgggcctggagaagagatttgagaagcagaagtacctgagcaccccagacagaattgacctggccgagagcctgggcctgagccagctgcaggtgaagacctggtaccagaacagaaggatgaagtggaagaagatcgtgctgcagggcggcggcctggagagccccaccaagcccaagggccggcccaagaagaacagcatccccaccagcgagcagctgacagagcaggagcgggccaaggatgctgagaagccagctgaggtgcctggagagcccagcgacaggagcagagaagattag

SEQ ID NO: 144813 - DNA, 303 bp, synthetic construct
  misc_feature 1..303: note = Description of Artificial Sequence: Synthetic coding sequence
  source 1..303: mol_type = other DNA
atgggcctggagaagagatttgagaagcagaagtacctgagcaccccagacagaattgacctggccgagagcctgggcctgagccagctgcaggtgaagacctggtaccagaacagaaggatgaagtggaagaagatcgtgctgcagggcggcggcctggagagccccaccaagcccaagggccggcccaagaagaacagcatccccaccagcgagcagctgacagagcaggagcgggccaaggatgctgagaagccagctgaggtgcctggagagcccagcgacaggagcagagaagattag

SEQ ID NO: 144814 - DNA, 840 bp, synthetic construct
  misc_feature 1..840: note = Description of Artificial Sequence: Synthetic coding sequence
  source 1..840: mol_type = other DNA
atgcactgccacgccgagctgcggctgagcagccctggccagctgaaggccgcccggcggcgctacaagaccttcatgattgatgagatcctgagcaaggagacctgtgactactttgagaagctgagcctgtacagcgtgtgccccagcctggtggtgcggcccaagcccctgcacagctgcaccggcagccccagcctgcgggcctaccccctgctgagcgtcatcacccggcagcccaccgtcatcagccacctggtgcctgccaccccaggcatcgcccaggccctgagctgccaccaggtgacagaagctgtgtctgctgaggcccctggaggagaggccctggccagcagcgagagcgagacagagcagcccaccccccggcagaagaagccccggcgcagcaggaccatcttcacagagctgcagctgatgggcctggagaagaagttccagaagcagaagtacctgagcaccccagaccggctggacctggcccagagcctgggcctgacccagctgcaggtgaagacctggtaccagaacagaaggatgaagtggaagaagatggtgctgaagggcggccaggaggcccccaccaagcccaagggccggcccaagaagaacagcatccccaccagcgaggagattgaggccgaggagaagatgaacagccaggcccagggccaggagcagctggagcccagccagggccaggaggagctgtgtgaggcccaggagcccaaggccagagatgtgcccctggagatggccgagcccccagaccccccccaggagctgcccatccccagcagcgagcccccacccctgtcctag

SEQ ID NO: 144815 - DNA, 1887 bp, synthetic construct
  misc_feature 1..1887: note = Description of Artificial Sequence: Synthetic coding sequence
  source 1..1887: mol_type = other DNA
atggagcccccagatgccccagcccaggcccggggggccccccggctgctgctgctggccgtgctgctggccgcccacccagatgcccaggccgaggtgcggctgtctgtgccccccctggtggaggtgatgaggggcaagagcgtcatcctggactgcacccccaccggcacccatgaccactacatgctggagtggttcctgacagacagaagtggggcccggccccggctggccagcgctgagatgcagggcagcgagctgcaggtgaccatgcatgacacccggggccgcagccccccctaccagctggacagccagggccgcctggtgctggccgaggcccaggtgggagatgagcgggactatgtgtgtgtggtgcgggccggggccgccggcacagctgaggccacagcccggctgaatgtgtttgccaagccagaggccacagaggtgagccccaacaagggcaccctgtctgtgatggaggacagcgcccaggagatcgccacctgcaacagcagaaatggaaatcctgcccccaagatcacctggtacagaaatggccagaggctggaggtgcctgtggagatgaaccctgagggctacatgaccagcaggacagtgcgggaggccagcggcctgctgagcctgaccagcaccctgtacctgcggctgaggaaggatgacagagatgccagcttccactgtgccgcccactacagcctgcctgagggccgccacggccgcctggacagccccaccttccacctgaccctgcactaccccacagagcacgtgcagttctgggtgggcagccccagcaccccagctggctgggtgcgggagggggacacagtgcagctgctgtgcagaggagatggcagccccagccctgagtacaccctcttccggctgcaggatgagcaggaggaggtgctgaatgtgaacctggagggcaacctgaccctggagggcgtgacccggggccagagcggcacctacggctgccgggtggaggactatgatgctgctgatgatgtgcagctgagcaagaccctggagctgcgggtggcctacctggaccccctggagctgtctgagggcaaggtgctgagcctgcccctgaacagcagcgctgtggtgaactgcagcgtgcacggcctgcccaccccagccctgcgctggaccaaggacagcacccccctgggagatggccccatgctgagcctgagcagcatcacctttgacagcaatggcacctacgtgtgtgaggccagcctgcccaccgtgcctgtgctgagcaggacccagaacttcaccctgctggtgcagggcagccctgagctgaagacagctgagattgagcccaaggcagatggctcctggagagaaggagatgaggtgaccctcatctgcagcgcccggggccacccagaccccaagctgtcctggagccagctgggcggcagccctgctgagcccatccctggccggcagggctgggtgagcagcagcctgaccctgaaggtgaccagcgccctgagcagagatggcatcagctgtgaggccagcaacccccacggcaacaagagacatgtgttccactttggaacagtgagcccccagaccagccaggccggcgtggccgtgatggctgtggccgtgtctgtgggcctgctgctgctggtggtggccgtgttctactgtgtgcggaggaagggcggcccctgctgccggcagaggcgggagaagggggcccctcctcctggagagcccggcctgagccacagcggcagcgagcagcctgagcagacaggcctgctgatgggcggggccagcggcggggcccggggcggcagcggcggctttggagatgaatgttag

SEQ ID NO: 144816 - DNA, 1767 bp, synthetic construct
  misc_feature 1..1767: note = Description of Artificial Sequence: Synthetic coding sequence
  source 1..1767: mol_type = other DNA
atggagcccccagatgccccagcccaggcccggggggccccccggctgctgctgctggccgtgctgctggccgcccacccagatgcccaggccgaggtgcggctgtctgtgccccccctggtggaggtgatgaggggcaagagcgtcatcctggactgcacccccaccggcacccatgaccactacatgctggagtggttcctgacagacagaagtggggcccggccccggctggccagcgctgagatgcagggcagcgagctgcaggtgaccatgcatgacacccggggccgcagccccccctaccagctggacagccagggccgcctggtgctggccgaggcccaggtgggagatgagcgggactatgtgtgtgtggtgcgggccggggccgccggcacagctgaggccacagcccggctgaatgtgtttgccaagccagaggccacagaggtgagccccaacaagggcaccctgtctgtgatggaggacagcgcccaggagatcgccacctgcaacagcagaaatggaaatcctgcccccaagatcacctggtacagaaatggccagaggctggaggtgcctgtggagatgaaccctgagggctacatgaccagcaggacagtgcgggaggccagcggcctgctgagcctgaccagcaccctgtacctgcggctgaggaaggatgacagagatgccagcttccactgtgccgcccactacagcctgcctgagggccgccacggccgcctggacagccccaccttccacctgaccctgcactaccccacagagcacgtgcagttctgggtgggcagccccagcaccccagctggctgggtgcgggagggggacacagtgcagctgctgtgcagaggagatggcagccccagccctgagtacaccctcttccggctgcaggatgagcaggaggaggtgctgaatgtgaacctggagggcaacctgaccctggagggcgtgacccggggccagagcggcacctacggctgccgggtggaggactatgatgctgctgatgatgtgcagctgagcaagaccctggagctgcgggtggcctacctggaccccctggagctgtctgagggcaaggtgctgagcctgcccctgaacagcagcgctgtggtgaactgcagcgtgcacggcctgcccaccccagccctgcgctggaccaaggacagcacccccctgggagatggccccatgctgagcctgagcagcatcacctttgacagcaatggcacctacgtgtgtgaggccagcctgcccaccgtgcctgtgctgagcaggacccagaacttcaccctgctggtgcagggcagccctgagctgaagacagctgagattgagcccaaggcagatggctcctggagagaaggagatgaggtgaccctcatctgcagcgcccggggccacccagaccccaagctgtcctggagccagctgggcggcagccctgctgagcccatccctggccggcagggctgggtgagcagcagcctgaccctgaaggtgaccagcgccctgagcagagatggcatcagctgtgaggccagcaacccccacggcaacaagagacatgtgttccactttggaacagtgagcccccagaccagccaggccggcgtggccgtgatggctgtggccgtgtctgtgggcctgctgctgctggtggtggccgtgttctactgtgtgcggaggaagggcggcccctgctgccggcagaggcgggagaagggggccccctag

SEQ ID NO: 144817 - DNA, 321 bp, synthetic construct
  misc_feature 1..321: note = Description of Artificial Sequence: Synthetic coding sequence
  source 1..321: mol_type = other DNA
atgatgaccctggtgccccgggcccggacccgggccggccaggaccactacagccacccctgcccccgcttcagccaggtgctgctgacagagggcatcatgacctactgcctgaccaagaacctgagtgatgtgaacatcctgcaccggctgctgaagaatggaaatgtgaggaacaccctgctgcagagcaaggtgggcctgctgacctactacgtgaagctgtacccaggagaggtgaccctgctgacccggcccagcatccagatgaggctgtgctgcatcaccggctctgtgtcccggcccaggagccagaagtag

SEQ ID NO: 144818 - DNA, 321 bp, synthetic construct; identical to SEQ ID NO: 144817
  misc_feature 1..321: note = Description of Artificial Sequence: Synthetic coding sequence
  source 1..321: mol_type = other DNA

SEQ ID NO: 144819 - DNA, 1146 bp, synthetic construct
  misc_feature 1..1146: note = Description of Artificial Sequence: Synthetic coding sequence
  source 1..1146: mol_type = other DNA
atggagcggggcatgcacctgggcgctgctgctgctggggaggatgacctcttcctgcacaagagcctgagcgccagcaccagcaagaggctggaggccgccttccgcagcaccccacctggcatggacctgagcctggcccccccaccccgggagaggcctgccagcagcagcagcagccccctgggctgctttgagcctgctgaccctgagggcgccggcctgctgctgcccccacctgggggcggcggcggcggcagcgctggcagcggcggcggcggcggcggcggcgtgggcgtgcccggcctgctggtgggcagcgctggggtgggcggggaccccagcctgagcagcctgcctgctggagctgccctgtgcctgaagtatggagagagcgccagccggggctctgtggccgagagcagcggcggggagcagagcccagatgatgacagtgatggccgctgtgagctggtgctgcgggccggcgtggccgacccccgggccagccctggagctgggggcggcggggccaaggctgctgagggctgcagcaatgcccacctgcacggcggggcctctgtgcccccaggcggcctgggcggcggcggcggcggcggcagcagcagcggcagcagcggcggcggcggcggcagcggcagcggcagcggcggcagcagcagcagcagcagcagcagcagcaagaagagcaaggagcagaaggccctgcggctgaacatcaatgcccgggagaggaggaggatgcatgacctgaatgatgccctggatgagctgcgggctgtgatcccctatgcccacagccccagcgtgaggaagctgagcaagatcgccaccctgctgctggccaagaactacatcctgatgcaggcccaggccctggaggagatgaggcggctggtggcctacctgaaccagggccaggccatctctgctgccagcctgcccagcagcgctgctgctgctgctgctgctgctgccctgcacccagccctgggcgcctatgagcaggccgccggctaccccttctctgctggcctgcccccagctgccagctgcccagagaagtgtgccctcttcaacagcgtgagcagcagcctgtgcaagcagtgcacagagaagccctag

SEQ ID NO: 144820 - DNA, 678 bp, synthetic construct
  misc_feature 1..678: note = Description of Artificial Sequence: Synthetic coding sequence
  source 1..678: mol_type = other DNA
atggccgagctgaagagcctgtctggagatgcctacctggccctgagccacggctacgccgctgctgctgctggcctggcctacggggccgcccgggagcctgaggccgcccggggctacggcaccccaggccctggaggagacctgcctgctgccccagccccccgggccccagcccaggccgctgagagcagtggagagcagagcggagatgaagatgatgcctttgagcagaggagaagaagaagaggccctggcagcgctgctgatggaagaagaagaccccgggagcagaggagcctgcggctgagcatcaatgcccgggagaggaggaggatgcatgacctgaatgatgccctggatggcctgcgggctgtgatcccctatgcccacagccccagcgtgaggaagctgagcaagatcgccaccctgctgctggccaagaactacatcctgatgcaggcccaggccctggatgagatgaggcggctggtggccttcctgaaccagggccagggcctggccgcccctgtgaatgctgcccccctgacccccttcggccaggccaccgtgtgccccttctctgctggggccgccctgggcccctgcccagacaagtgtgccgccttcagcggcaccccatctgccctgtgcaagcactgccacgagaagccctag

SEQ ID NO: 144821 - DNA, 1239 bp, synthetic construct
  misc_feature 1..1239: note = Description of Artificial Sequence: Synthetic coding sequence
  source 1..1239: mol_type = other DNA
atggagcgcatccccagcgcccagcccccaccagcctgcctgcccaaggcccctggcctggagcacggggacctgcccggcatgtacccagcccacatgtaccaggtgtacaagagccggcggggcatcaagagaagtgaggacagcaaggagacctacaagctgccccacaggctcatcgagaagaagaggcgggaccgcatcaatgaatgcatcgcccagctgaaggacctgctgcctgagcacctgaagctgaccaccctgggccacctggagaaggctgtggtgctggagctgaccctgaagcacgtgaaggccctgaccaacctgattgaccagcagcagcagaagatcatcgccctgcagagcggcctgcaggccggggagctgtctggaagaaatgtggagaccggccaggagatgttctgcagcggcttccagacctgtgcccgggaggtgctgcagtacctggccaagcatgagaacacccgggacctgaagagcagccagctggtgacccacctgcaccgggtggtgtctgagctgctgcagggcggcaccagcaggaagcccagcgaccctgcccccaaggtgatggacttcaaggagaagcccagcagccctgccaagggcagcgagggccctgggaagaactgtgtgcctgtgatccagaggacctttgcccacagcagtggagagcagagcggcagtgacacagacacagattctggctatggaggagagagcgagaagggggacctgcggtctgagcagccctgcttcaagagtgaccatggaagacgcttcaccatgggagagagaattggagccatcaagcaggagagcgaggagccccccaccaagaagaacaggatgcagctgagtgatgatgagggccacttcaccagcagtgacctgatcagcagccccttcctgggcccccacccccaccagccccccttctgcctgcccttctacctgatccccccatctgccacagcctacctgcccatgctggagaagtgctggtaccccacctctgtgcctgtgctgtacccaggcctgaatgccagcgctgctgccctgagcagcttcatgaacccagacaagatcagcgcccccctgctgatgccccagaggctgcccagccccctgcctgcccaccccagcgtggacagctctgtgctgctgcaggccctgaagcccatcccccccctgaacctggagaccaaggactag

SEQ ID NO: 144822 - DNA, 378 bp, synthetic construct
  misc_feature 1..378: note = Description of Artificial Sequence: Synthetic coding sequence
  source 1..378: mol_type = other DNA
atgccccacagcagtgacagcagtgacagcagcttcagccgcagccccccacctgggaagcaggacagcagtgatgatgtgcggcgggtgcagaggcgggagaagaacagaattgctgcccagaagagccggcagaggcagacccagaaggctgacaccctgcacctggagagcgaggacctggagaagcagaatgctgccctgaggaaggagatcaagcagctgacagaggagctgaagtacttcacctctgtgctgaacagccatgagcccctgtgcagcgtgctggccgccagcacccccagccccccagaggtggtgtacagcgcccacgccttccaccagccccacgtgagcagcccccgcttccagccctag

SEQ ID NO: 144823 - DNA, 384 bp, synthetic construct
  misc_feature 1..384: note = Description of Artificial Sequence: Synthetic coding sequence
  source 1..384: mol_type = other DNA
atgagccagggcctgcctgctgctggctctgtgctgcagaggtctgtggccgcccctggcaaccagccccagccccagccccagcagcagagcccagaagatgatgacaggaaggtgagaagaagagagaagaacagagtggccgcccagaggagcaggaagaagcagacccagaaggctgacaagctgcacgaggagtatgagagcctggagcaggagaacaccatgctgcggcgggagatcggcaagctgacagaggagctgaagcacctgacagaggccctgaaggagcacgagaagatgtgccccctgctgctgtgccccatgaactttgtgcctgtgccccccaggccagaccctgtggccggctgcctgcccaggtag

SEQ ID NO: 144824 - DNA, 489 bp, synthetic construct
  misc_feature 1..489: note = Description of Artificial Sequence: Synthetic coding sequence
  source 1..489: mol_type = other DNA
atgaaggagaccatcatgaaccaggagaagctggccaagctgcaggcccaggtgcgcatcggcggcaaaggaacagcccggaggaagaagaaggtggtgcacaggacagccacagcagatgacaagaagctgcagttcagcctgaagaagctgggcgtgaacaacatctctggaattgaggaggtgaacatgttcaccaaccagggcaccgtcatccacttcaacaaccccaaggtgcaggccagcctggccgccaacaccttcaccatcactggacatgctgagaccaagcagctgacagagatgctgcccagcatcctgaaccagctgggcgctgacagcctgaccagcctgcggcggctggccgaggccctgcccaagcagagcgtggatggcaaggcccccctggccaccggggaggatgatgatgatgaggtgcctgacctggtggagaactttgatgaggccagcaagaatgaggccaactag

SEQ ID NO: 144825 - DNA, 621 bp, synthetic construct
  misc_feature 1..621: note = Description of Artificial Sequence: Synthetic coding sequence
  source 1..621: mol_type = other DNA
atgagaagaactggagccccagcccaggccgacagccggggccggggccgggcccggggcggctgccctggaggagaggccaccctgagccagcccccaccccggggcggcacccggggccaggagccccagatgaaggagaccatcatgaaccaggagaagctggccaagctgcaggcccaggtgcgcatcggcggcaaaggaacagcccggaggaagaagaaggtggtgcacaggacagccacagcagatgacaagaagctgcagttcagcctgaagaagctgggcgtgaacaacatctctggaattgaggaggtgaacatgttcaccaaccagggcaccgtcatccacttcaacaaccccaaggtgcaggccagcctggccgccaacaccttcaccatcactggacatgctgagaccaagcagctgacagagatgctgcccagcatcctgaaccagctgggcgctgacagcctgaccagcctgcggcggctggccgaggccctgcccaagcagagcgtggatggcaaggcccccctggccaccggggaggatgatgatgatgaggtgcctgacctggtggagaactttgatgaggccagcaagaatgaggccaactag

SEQ ID NO: 144826 - DNA, 1158 bp, synthetic construct
  misc_feature 1..1158: note = Description of Artificial Sequence: Synthetic coding sequence
  source 1..1158: mol_type = other DNA
atggctgctgccctgtttgtgctgctgggctttgccctgctgggcacccatggagccagcggggctgctggctttgtgcaggcccccctgagccagcagcgctgggtgggcggctctgtggagctgcactgtgaggccgtgggcagccctgtgcctgagatccagtggtggtttgagggccagggccccaatgacacctgcagccagctgtgggatggagcccggctggacagagtgcacatccacgccacctaccaccagcacgccgccagcaccatcagcattgacaccctggtggaggaggacaccggcacctatgaatgtcgggccagcaatgaccctgacaggaaccacctgacccgggccccccgggtgaagtgggtgcgggcccaggccgtggtgctggtgctggagcccggcaccgtcttcaccaccgtggaggacctgggcagcaagatcctgctgacctgcagcctgaatgacagcgccacagaggtgacaggccaccgctggctgaagggcggcgtggtgctgaaggaggatgccctgcccggccagaagacagagttcaaggtggacagtgatgaccagtggggcgagtacagctgtgtgttcctgcctgagcccatgggcacagccaacatccagctgcacggccccccccgggtgaaggctgtgaagagcagcgagcacatcaatgaaggagaaacagccatgctggtgtgcaagtctgagagcgtgccccctgtgacagactgggcctggtacaagatcacagattctgaggacaaggccctgatgaatggcagcgagagccgcttctttgtgagcagcagccagggccgctctgagctgcacatcgagaacctgaacatggaggccgaccccggccagtaccgctgcaatggcaccagcagcaaaggaagtgaccaggccatcatcaccctgcgggtgcgcagccacctggccgccctgtggcccttcctgggcatcgtggccgaggtgctggtgctggtgaccatcatcttcatctatgagaagaggaggaagccagaagatgtgctggatgatgatgatgctggcagcgcccccctgaagagcagcggccagcaccagaatgacaagggcaagaatgtgcggcagaggaacagcagctag

SEQ ID NO: 144827 - DNA, 618 bp, synthetic construct
  misc_feature 1..618: note = Description of Artificial Sequence: Synthetic coding sequence
  source 1..618: mol_type = other DNA
atgaagcagagtgatgccagcccccaggagcgggtggacagtgatgaccagtggggcgagtacagctgtgtgttcctgcctgagcccatgggcacagccaacatccagctgcacggccccccccgggtgaaggctgtgaagagcagcgagcacatcaatgaaggagaaacagccatgctggtgtgcaagtctgagagcgtgccccctgtgacagactgggcctggtacaagatcacagattctgaggacaaggccctgatgaatggcagcgagagccgcttctttgtgagcagcagccagggccgctctgagctgcacatcgagaacctgaacatggaggccgaccccggccagtaccgctgcaatggcaccagcagcaaaggaagtgaccaggccatcatcaccctgcgggtgcgcagccacctggccgccctgtggcccttcctgggcatcgtggccgaggtgctggtgctggtgaccatcatcttcatctatgagaagaggaggaagccagaagatgtgctggatgatgatgatgctggcagcgcccccctgaagagcagcggccagcaccagaatgacaagggcaagaatgtgcggcagaggaacagcagctag

SEQ ID NO: 144828 - DNA, 810 bp, synthetic construct
  misc_feature 1..810: note = Description of Artificial Sequence: Synthetic coding sequence
  source 1..810: mol_type = other DNA
atggctgctgccctgtttgtgctgctgggctttgccctgctgggcacccatggagccagcggggctgctggcaccgtcttcaccaccgtggaggacctgggcagcaagatcctgctgacctgcagcctgaatgacagcgccacagaggtgacaggccaccgctggctgaagggcggcgtggtgctgaaggaggatgccctgcccggccagaagacagagttcaaggtggacagtgatgaccagtggggcgagtacagctgtgtgttcctgcctgagcccatgggcacagccaacatccagctgcacggccccccccgggtgaaggctgtgaagagcagcgagcacatcaatgaaggagaaacagccatgctggtgtgcaagtctgagagcgtgccccctgtgacagactgggcctggtacaagatcacagattctgaggacaaggccctgatgaatggcagcgagagccgcttctttgtgagcagcagccagggccgctctgagctgcacatcgagaacctgaacatggaggccgaccccggccagtaccgctgcaatggcaccagcagcaaaggaagtgaccaggccatcatcaccctgcgggtgcgcagccacctggccgccctgtggcccttcctgggcatcgtggccgaggtgctggtgctggtgaccatcatcttcatctatgagaagaggaggaagccagaagatgtgctggatgatgatgatgctggcagcgcccccctgaagagcagcggccagcaccagaatgacaagggcaagaatgtgcggcagaggaacagcagctag

SEQ ID NO: 144829 - DNA, 531 bp, synthetic construct
  misc_feature 1..531: note = Description of Artificial Sequence: Synthetic coding sequence
  source 1..531: mol_type = other DNA
atgggcacagccaacatccagctgcacggccccccccgggtgaaggctgtgaagagcagcgagcacatcaatgaaggagaaacagccatgctggtgtgcaagtctgagagcgtgccccctgtgacagactgggcctggtacaagatcacagacagcgaggacaaggccctgatgaatggaagtgagagccgcttctttgtgagcagcagccagggccgctctgagctgcacatcgagaacctgaacatggaggccgaccccggccagtaccgctgcaatggcaccagcagcaagggcagtgaccaggccatcatcaccctgcgggtgcgcagccacctggccgccctgtggcccttcctgggcatcgtggccgaggtgctggtgctggtgaccatcatcttcatctatgagaagaggaggaagccagaagatgtgctggatgatgatgatgctggcagcgcccccctgaagagcagcggccagcaccagaatgacaagggcaagaatgtgcggcagaggaacagcagctag

SEQ ID NO: 144830 - DNA, 2985 bp, synthetic construct
  misc_feature 1..2985: note = Description of Artificial Sequence: Synthetic coding sequence
  source 1..2985: mol_type = other DNA
atgagaagaagaccacccagcagaggaggaagaggagctgcccgggcccgggagacccggcggcagcccaggcacaggtctggaagaaggatggccgaggccatcagctgcaccctgaactgcagctgccagagcttcaagccaggcaagatcaaccaccggcagtgtgaccagtgcaagcacggctgggtggcccacgccctgagcaagctgcgcatcccccccatgtaccccaccagccaggtggagatcgtgcagagcaatgtggtgtttgacatcagcagcctgatgctgtatggcacccaggccatccctgtgcggctgaagatcctgctggacaggctcttctctgtgctgaagcaggatgaggtgctgcagatcctgcacgccctggactggaccctgcaggactacatccggggctacgtgctgcaggatgccagcggcaaggtgctggaccactggagcatcatgaccagcgaggaggaggtggccaccctgcagcagttcctgcgctttggagagaccaagagcatcgtggagctgatggccatccaggagaaggaggagcagagcatcatcatcccccccagcacagccaacgtggacatccgggccttcatcgagagctgcagccacaggagcagcagcctgcccacccctgtggacaagggcaaccccagcagcatccacccctttgagaacctgatcagcaacatgaccttcatgctgcccttccagttcttcaaccccctgcccccagccctgattggcagcctgcctgagcagtacatgctggagcagggccatgaccagagccaggaccccaagcaggaggtgcacggccccttcccagacagcagcttcctgaccagcagcagcacccccttccaggtggagaaggaccagtgcctgaactgcccagatgccatcaccaagaaggaggacagcacccacctgagtgacagcagcagctacaacatcgtgaccaagtttgagaggacccagctgagccctgaggccaaggtgaagccagagaggaacagcctgggcaccaagaagggccgggtcttctgcacagcctgtgagaagaccttctatgacaagggcaccctgaagatccactacaatgctgtgcacctgaagatcaagcacaagtgcaccatcgagggctgcaacatggtgttcagcagcctgcggagcaggaacagacacagcgccaaccccaacccccggctgcacatgcccatgaacagaaacaacagagacaaggacctgaggaacagcctgaacctggccagcagcgagaactacaagtgccccggcttcaccgtgaccagcccagactgccggcccccacccagctacccaggcagcggggaggacagcaagggccagcctgccttccccaacatcggccagaatggagtgctcttccccaacctgaagacagtgcagcctgtgctgcccttctaccgcagccctgccaccccagctgaggtggccaacaccccaggcatcctgcccagcctgcccctgctgagcagcagcatccctgagcagctgatcagcaatgagatgccctttgatgccctgcccaagaagaagagcaggaagagctccatgcccatcaagattgagaaggaggccgtggagatcgccaatgagaagaggcacaacctgagcagtgatgaggacatgcccctgcaggtggtgtctgaagatgagcaggaggcctgcagcccccagagccaccgggtgtctgaggagcagcacgtgcagagcggcggcctgggcaagcccttccctgagggggagcggccctgccaccgggagagcgtgattgagagcagcggggccatcagccagaccccagagcaggccacccacaacagcgagcgggagacagagcagaccccagccctgatcatggtgccccgggaggtggaggatggcggccacgagcactacttcaccccaggcatggagccccaggtgcccttcagtgactacatggagctgcagcagaggctgctggccggcggcctcttcagcgccctgagcaacagaggcatggccttcccctgcctggaggacagcaaggagctggagcacgtgggccagcacgccctggcccggcagattgaagaaaatcgcttccagtgtgacatctgcaagaagaccttcaagaatgcctgcagcgtgaagatccaccacaagaacatgcacgtgaaggagatgcacacctgcaccgtggagggctgcaatgccaccttccccagccgccgcagccgggacagacacagcagcaacctgaacctgcaccagaaggccctgagccaggaggccctggagagcagcgaggaccacttccgggccgcctacctgctgaaggatgtggccaaggaggcctaccaggatgtggccttcacccagcaggccagccagaccagcgtcatcttcaagggcaccagcaggatgggcagcctggtgtaccccatcacccaggtgcacagcgccagcctggagagctacaacagcggccccctgtctgagggcaccatcctggacctgagcaccaccagctccatgaagtctgagagcagcagccacagctcctgggacagtgatggagtgtctgaggagggcaccgtgctgatggaggacagtgatggcaactgtgagggcagcagcctggtgcctggagaagatgagtaccccatctgtgtgctgatggagaaggctgaccagagcctggccagcctgcccagcggcctgcccatcacctgccacctgtgccagaagacctacagcaacaagggcaccttccgggcccactacaagacagtgcacctgcggcagctgcacaagtgcaaggtgcccggctgcaacaccatgttcagctctgtgcgcagcaggaacagacacagccagaaccccaacctgcacaagagcctggccagcagccccagccacctgcagtag

SEQ ID NO: 144831 - DNA, 2964 bp, synthetic construct
  misc_feature 1..2964: note = Description of Artificial Sequence: Synthetic coding sequence
  source 1..2964: mol_type = other DNA
atgcgctgcaggaacatgttcttctccttcaaggccagcctgtgtggctgtggggccgccacagcccccagcctgacagccatcagctgcaccctgaactgcagctgccagagcttcaagccaggcaagatcaaccaccggcagtgtgaccagtgcaagcacggctgggtggcccacgccctgagcaagctgcgcatcccccccatgtaccccaccagccaggtggagatcgtgcagagcaatgtggtgtttgacatcagcagcctgatgctgtatggcacccaggccatccctgtgcggctgaagatcctgctggacaggctcttctctgtgctgaagcaggatgaggtgctgcagatcctgcacgccctggactggaccctgcaggactacatccggggctacgtgctgcaggatgccagcggcaaggtgctggaccactggagcatcatgaccagcgaggaggaggtggccaccctgcagcagttcctgcgctttggagagaccaagagcatcgtggagctgatggccatccaggagaaggaggagcagagcatcatcatcccccccagcacagccaacgtggacatccgggccttcatcgagagctgcagccacaggagcagcagcctgcccacccctgtggacaagggcaaccccagcagcatccacccctttgaaaatctcatcagcaacatgaccttcatgctgcccttccagttcttcaaccccctgcccccagccctgattggcagcctgcctgagcagtacatgctggagcagggccatgaccagagccaggaccccaagcaggaggtgcacggccccttcccagacagcagcttcctgaccagcagcagcacccccttccaggtggagaaggaccagtgcctgaactgcccagatgccatcaccaagaaggaggacagcacccacctgagtgacagcagcagctacaacatcgtgaccaagtttgagaggacccagctgagccctgaggccaaggtgaagccagagaggaacagcctgggcaccaagaagggccgggtcttctgcacagcctgtgagaagaccttctatgacaagggcaccctgaagatccactacaatgctgtgcacctgaagatcaagcacaagtgcaccatcgagggctgcaacatggtgttcagcagcctgcggagcaggaacagacattctgccaaccccaacccccggctgcacatgcccatgaacagaaacaacagagacaaggacctgaggaacagcctgaacctggccagcagcgagaactacaagtgccccggcttcaccgtgaccagcccagactgccggcccccacccagctacccaggcagcggggaggacagcaagggccagcctgccttccccaacatcggccagaatggagtgctcttccccaacctgaagacagtgcagcctgtgctgcccttctaccgcagccctgccaccccagctgaggtggccaacaccccaggcatcctgcccagcctgcccctgctgagcagcagcatccctgagcagctgatcagcaatgagatgccctttgatgccctgcccaagaagaagagcaggaagagctccatgcccatcaagattgagaaggaggccgtggagatcgccaatgagaagaggcacaacctgagcagtgatgaggacatgcccctgcaggtggtgtctgaagatgagcaggaggcctgcagcccccagagccaccgggtgtctgaggagcagcacgtgcagagcggcggcctgggcaagcccttccctgagggggagcggccctgccaccgggagagcgtcatcgagagcagcggggccatcagccagaccccagagcaggccacccacaacagcgagcgggagacagagcagaccccagccctgatcatggtgccccgggaggtggaggatggcggccacgagcactacttcaccccaggcatggagccccaggtgcccttcagtgactacatggagctgcagcagaggctgctggccggcggcctcttcagcgccctgagcaacagaggcatggccttcccctgcctggaggacagcaaggagctggagcacgtgggccagcacgccctggcccggcagatcgaggagaaccgcttccagtgtgacatctgcaagaagaccttcaagaatgcctgcagcgtgaagatccaccacaagaacatgcacgtgaaggagatgcacacctgcaccgtggagggctgcaatgccaccttccccagcagaagaagccgggacagacacagcagcaacctgaacctgcaccagaaggccctgagccaggaggccctggagagcagcgaggaccacttccgggccgcctacctgctgaaggatgtggccaaggaggcctaccaggatgtggccttcacccagcaggccagccagaccagcgtcatcttcaagggcaccagcaggatgggcagcctggtgtaccccatcacccaggtgcacagcgccagcctggagagctacaacagcggccccctgtctgagggcaccatcctggacctgagcaccaccagctccatgaagtctgagagcagcagccacagctcctgggacagtgatggagtgtctgaggagggcaccgtgctgatggaggacagtgatggcaactgtgagggcagcagcctggtgcctggagaagatgagtaccccatctgtgtgctgatggagaaggctgaccagagcctggccagcctgcccagcggcctgcccatcacctgccacctgtgccagaagacctacagcaacaagggcaccttccgggcccactacaagacagtgcacctgcggcagctgcacaagtgcaaggtgcccggctgcaacaccatgttcagctctgtgcgcagcaggaacagacacagccagaaccccaacctgcacaagagcctggccagcagccccagccacctgcagtag

SEQ ID NO: 144832 - DNA, 2712 bp, synthetic construct
  misc_feature 1..2712: note = Description of Artificial Sequence: Synthetic coding sequence
  source 1..2712: mol_type = other DNA
atggcccacctgggccccaccccaccaccccacagcctgaactacaagtctgaggaccggctgtctgagcaggactggccagcctacttcaaggtgccctgctgcggcgtggacaccagccagatcgagagcgaggaggccgaggtggatgtgcgggagcgggagacccagagggaccgggagcccaagagggcccgggacctgaccctgcgggacagctgcacagacaacagcatgcagtttggcaccaggaccaccacagctgagcccggcttcatgggcacctggcagaatgctgacaccaacctgctcttcaggatgagccagcaggccatccgctgcaccctggtgaactgcacctgtgagtgcttccagcccgggaagatcaacctgcggacctgtgaccagtgcaagcacggctgggtggcccacgccctggacaagctgagcacccagcacctgtaccaccccacccaggtggagatcgtgcagagcaatgtggtgtttgacatcagcagcctgatgctgtatggcacccaggccgtgcctgtgcggctgaagatcctgctggacaggctcttctctgtgctgaagcaggaggaggtgctgcacatcctgcacggcctgggctggaccctgcgggactatgtgcggggctacatcctgcaggatgctgctgggaaggtgctggaccgctgggccatcatgagccgggaggaggagatcatcaccctgcagcagttcctgcgctttggagagaccaagagcatcgtggagctgatggccatccaggagaaggagggccaggccgtggccgtgcccagcagcaagacagacagcgacatccgcaccttcatcgagagcaacaacagaaccaggagccccagcctgctggcccacctggagaacagcaaccccagcagcatccaccactttgagaacatccccaacagcctggccttcctgctgcccttccagtacatcaaccctgtgtctgcccccctgctgggcctgcccccaaatggcctgctgctggagcagcccggcctgcggctgcgggagcccagcctgagcacccagaatgagtacaatgaatcttctgagagcgaggtgagccccaccccctacaagaatgaccagacccccaacagaaatgccctgaccagcatcaccaacgtggagcccaagacagagcccgcctgtgtgagccccatccagaacagcgcccctgtgtctgacctgaccaagacagagcaccccaagagcagcttccgcatccacaggatgaggaggatgggcagcgccagcaggaagggccgggtcttctgcaatgcctgtgggaagaccttctatgacaagggcaccctgaagatccactacaatgctgtgcacctgaagatcaagcaccgctgcaccatcgagggctgcaacatggtgttcagcagcctgcggagcaggaacagacacagcgccaaccccaacccccggctgcacatgcccatgctgaggaacaacagagacaaggacctgatccgggccaccagcggggccgccacccctgtgattgccagcaccaagagcaacctggccctgaccagccctggccggccccccatgggcttcaccaccccacccctggaccctgtgctgcagaaccccctgcccagccagctggtgttttctggcctgaagacagtgcagcctgtgccccccttctaccgcagcctgctgaccccaggagagatggtgtccccacccaccagcctgcccaccagccccatcatccccaccagcggcaccatcgagcagcaccccccacctccttctgagcctgtggtgcctgctgtgatgatggccacccatgagcccagcgctgacctggcccccaagaagaagcccaggaagagctccatgcctgtgaagattgagaaggagatcatcgacacagcagatgaatttgatgatgaagatgatgaccccaatgatggcggcgctgtggtgaatgacatgagccatgacaaccactgccacagccaggaggagatgagccctggcatgtctgtgaaggacttcagcaagcacaacagaacccgctgcatcagcaggacagagatccggcgggctgacagcatgaccagcgaggaccaggagcctgagcgggactatgaaaatgaaagtgagagcagcgagcccaagctgggggaggagagcatggagggagatgagcacatccacagcgaggtgtctgagaaggtgctgatgaacagcgagaggccagatgagaaccacagcgagcccagccaccaggacgtcatcaaggtgaaggaggagttcacagaccccacctatgacatgttctacatgagccagtatggcctgtacaatggaggaggagcctccatggccgccctgcacgagagcttcaccagcagcctgaactacggcagcccccagaagttcagccctgagggggacctgtgcagcagcccagaccccaagatctgctacgtgtgcaagaagagcttcaagagcagctacagcgtgaagctgcactacagaaatgtgcacctgaaggagatgcacgtgtgcaccgtggccggctgcaatgctgccttccccagcagaagaagccgggaccgctactgggagaagagcaatgagcagaatggcctgctggtgtcctggggcgagaccctgagcagcctgaagtag

SEQ ID NO: 144833 - DNA, 3099 bp, synthetic construct
  misc_feature 1..3099: note = Description of Artificial Sequence: Synthetic coding sequence
  source 1..3099: mol_type = other DNA
atggcccacctgggccccaccccaccaccccacagcctgaactacaagtctgaggaccggctgtctgagcaggactggccagcctacttcaaggtgccctgctgcggcgtggacaccagccagatcgaggccatccgctgcaccctggtgaactgcacctgtgagtgcttccagcccgggaagatcaacctgcggacctgtgaccagtgcaagcacggctgggtggcccacgccctggacaagctgagcacccagcacctgtaccaccccacccaggtggagatcgtgcagagcaatgtggtgtttgacatcagcagcctgatgctgtatggcacccaggccgtgcctgtgcggctgaagatcctgctggacaggctcttctctgtgctgaagcaggaggaggtgctgcacatcctgcacggcctgggctggaccctgcgggactatgtgcggggctacatcctgcaggatgctgctgggaaggtgctggaccgctgggccatcatgagccgggaggaggagatcatcaccctgcagcagttcctgcgctttggagagaccaagagcatcgtggagctgatggccatccaggagaaggagggccaggccgtggccgtgcccagcagcaagacagacagcgacatccgcaccttcatcgagagcaacaacagaaccaggagccccagcctgctggcccacctggagaacagcaaccccagcagcatccaccactttgagaacatccccaacagcctggccttcctgctgcccttccagtacatcaaccctgtgtctgcccccctgctgggcctgccccccaacggcctgctgctggagcagcccggcctgcggctgcgggagcccagcctgagcacccagaatgagtacaatgaaagcagcgagagcgaggtgagccccaccccctacaagaatgaccagacccccaacagaaatgccctgaccagcatcaccaacgtggagcccaagacagagcccgcctgtgtgagccccatccagaacagcgcccctgtgtctgacctgaccaagacagagcaccccaagagcagcttccgcatccacaggatgaggaggatgggcagcgccagcaggaagggccgggtcttctgcaatgcctgtgggaagaccttctatgacaagggcaccctgaagatccactacaatgctgtgcacctgaagatcaagcaccgctgcaccatcgagggctgcaacatggtgttcagcagcctgcggagcaggaacagacattctgccaaccccaacccccggctgcacatgcccatgctgaggaacaacagagacaaggacctgatccgggccaccagcggggccgccacccctgtgattgccagcaccaagagcaacctggccctgaccagccctggccggccccccatgggcttcaccaccccacccctggaccctgtgctgcagaaccccctgcccagccagctggtgttcagcggcctgaagacagtgcagcctgtgccccccttctaccgcagcctgctgaccccaggagagatggtgagcccccccaccagcctgcccaccagccccatcatccccaccagcggcaccatcgagcagcaccccccaccacccagcgagcctgtggtgcctgctgtgatgatggccacccatgagcccagcgctgacctggcccccaagaagaagcccaggaagagctccatgcctgtgaagattgagaaggagatcatcgacacagcagatgaatttgatgatgaagatgatgaccccaatgatggaggagctgtggtgaatgacatgagccatgacaaccactgccacagccaggaggagatgagccctggcatgtctgtgaaggacttcagcaagcacaacagaacccgctgcatcagcaggacagagatcagaagagctgacagcatgaccagcgaggaccaggagcctgagcgggactatgaaaatgaaagtgagagcagcgagcccaagctgggggaggagagcatggagggagatgagcacatccacagcgaggtgtctgagaaggtgctgatgaacagcgagaggccagatgagaaccacagcgagcccagccaccaggatgtgatcaaggtgaaggaggagttcacagaccccacctatgacatgttctacatgagccagtatggcctgtacaacggcggcggggcctccatggccgccctgcacgagagcttcaccagcagcctgaactacggcagcccccagaagttcagccctgagggggacctgtgcagcagcccagaccccaagatctgctacgtgtgcaagaagagcttcaagagcagctacagcgtgaagctgcactacagaaatgtgcacctgaaggagatgcacgtgtgcaccgtggccggctgcaatgctgccttccccagccgccgcagccgggacagacattctgccaacatcaacctgcacaggaagctgctgaccaaggagctggatgacatgggcctggacagcagccagcccagcctgagcaaggacctgagagatgagttcctggtgaagatctacggggcccagcaccccatgggcctggatgtgcgggaggatgccagcagccctgctggaacagaggacagccacctgaatggctacggccggggcatggccgaggactacatggtgctggacctgagcaccaccagcagcctgcagagcagcagcagcatccacagcagccgggagagtgatgctggcagtgatgagggcatcctgctggatgacattgatggagccagtgacagcggggagagcgcccacaaggccgaggccccagccctgcccggcagcctgggcgctgaggtgtctggcagcctgatgttcagcagcctgagcggcagcaatggaggcatcatgtgcaacatctgccacaagatgtacagcaacaagggcaccctgcgggtgcactacaagacagtgcacctgcgggagatgcacaagtgcaaggtgcccggctgcaacatgatgttcagctctgtgcgcagcaggaacagacacagccagaaccccaacctgcacaagaacatccccttcacctctgtggactag

SEQ ID NO: 144834 - DNA, 3300 bp, synthetic construct
  misc_feature 1..3300: note = Description of Artificial Sequence: Synthetic coding sequence
  source 1..3300: mol_type = other DNA
atggcccacctgggccccaccccaccaccccacagcctgaactacaagtctgaggaccggctgtctgagcaggactggccagcctacttcaaggtgccctgctgcggcgtggacaccagccagatcgagagcgaggaggccgaggtggatgtgcgggagcgggagacccagagggaccgggagcccaagagggcccgggacctgaccctgcgggacagctgcacagacaacagcatgcagtttggcaccaggaccaccacagctgagcccggcttcatgggcacctggcagaatgctgacaccaacctgctcttcaggatgagccagcaggccatccgctgcaccctggtgaactgcacctgtgagtgcttccagcccgggaagatcaacctgcggacctgtgaccagtgcaagcacggctgggtggcccacgccctggacaagctgagcacccagcacctgtaccaccccacccaggtggagatcgtgcagagcaatgtggtgtttgacatcagcagcctgatgctgtatggcacccaggccgtgcctgtgcggctgaagatcctgctggacaggctcttctctgtgctgaagcaggaggaggtgctgcacatcctgcacggcctgggctggaccctgcgggactatgtgcggggctacatcctgcaggatgctgctgggaaggtgctggaccgctgggccatcatgagccgggaggaggagatcatcaccctgcagcagttcctgcgctttggagagaccaagagcatcgtggagctgatggccatccaggagaaggagggccaggccgtggccgtgcccagcagcaagacagacagcgacatccgcaccttcatcgagagcaacaacagaaccaggagccccagcctgctggcccacctggagaacagcaaccccagcagcatccaccactttgagaacatccccaacagcctggccttcctgctgcccttccagtacatcaaccctgtgtctgcccccctgctgggcctgcccccaaatggcctgctgctggagcagcccggcctgcggctgcgggagcccagcctgagcacccagaatgagtacaatgaatcttctgagagcgaggtgagccccaccccctacaagaatgaccagacccccaacagaaatgccctgaccagcatcaccaacgtggagcccaagacagagcccgcctgtgtgagccccatccagaacagcgcccctgtgtctgacctgaccaagacagagcaccccaagagcagcttccgcatccacaggatgaggaggatgggcagcgccagcaggaagggccgggtcttctgcaatgcctgtgggaagaccttctatgacaagggcaccctgaagatccactacaatgctgtgcacctgaagatcaagcaccgctgcaccatcgagggctgcaacatggtgttcagcagcctgcggagcaggaacagacacagcgccaaccccaacccccggctgcacatgcccatgctgaggaacaacagagacaaggacctgatccgggccaccagcggggccgccacccctgtgattgccagcaccaagagcaacctggccctgaccagccctggccggccccccatgggcttcaccaccccacccctggaccctgtgctgcagaaccccctgcccagccagctggtgttttctggcctgaagacagtgcagcctgtgccccccttctaccgcagcctgctgaccccaggagagatggtgtccccacccaccagcctgcccaccagccccatcatccccaccagcggcaccatcgagcagcaccccccacctccttctgagcctgtggtgcctgctgtgatgatggccacccatgagcccagcgctgacctggcccccaagaagaagcccaggaagagctccatgcctgtgaagattgagaaggagatcatcgacacagcagatgaatttgatgatgaagatgatgaccccaatgatggcggcgctgtggtgaatgacatgagccatgacaaccactgccacagccaggaggagatgagccctggcatgtctgtgaaggacttcagcaagcacaacagaacccgctgcatcagcaggacagagatccggcgggctgacagcatgaccagcgaggaccaggagcctgagcgggactatgaaaatgaaagtgagagcagcgagcccaagctgggggaggagagcatggagggagatgagcacatccacagcgaggtgtctgagaaggtgctgatgaacagcgagaggccagatgagaaccacagcgagcccagccaccaggacgtcatcaaggtgaaggaggagttcacagaccccacctatgacatgttctacatgagccagtatggcctgtacaatggaggaggagcctccatggccgccctgcacgagagcttcaccagcagcctgaactacggcagcccccagaagttcagccctgagggggacctgtgcagcagcccagaccccaagatctgctacgtgtgcaagaagagcttcaagagcagctacagcgtgaagctgcactacagaaatgtgcacctgaaggagatgcacgtgtgcaccgtggccggctgcaatgctgccttccccagcagaagaagccgggacagacacagcgccaacatcaacctgcacaggaagctgctgaccaaggagctggatgacatgggcctggacagcagccagcccagcctgagcaaggacctgagagatgagttcctggtgaagatctatggagcccagcaccccatgggcctggatgtgagagaagatgccagcagccctgctggaacagaggacagccacctgaatggctacggccggggcatggccgaggactacatggtgctggacctgagcaccaccagcagcctgcagagcagcagcagcatccacagcagccgggagagtgatgctggcagtgatgagggcatcctgctggatgacattgatggagccagtgacagcggggagagcgcccacaaggccgaggccccagccctgcccggcagcctgggcgctgaggtgtctggcagcctgatgttcagcagcctgagcggcagcaatggaggcatcatgtgcaacatctgccacaagatgtacagcaacaagggcaccctgcgggtgcactacaagacagtgcacctgcgggagatgcacaagtgcaaggtgcccggctgcaacatgatgttcagctctgtgcgcagcaggaacagacacagccagaaccccaacctgcacaagaacatccccttcacctctgtggactag

SEQ ID NO: 144835 - DNA, 984 bp, synthetic construct
  misc_feature 1..984: note = Description of Artificial Sequence: Synthetic coding sequence
  source 1..984: mol_type = other DNA
cccagcgagcctgtggtgcctgctgtgatgatggccacccatgagcccagcgctgacctggcccccaagaagaagcccaggaagagctccatgcctgtgaagattgagaaggagatcatcgacacagcagatgaatttgatgatgaagatgatgaccccaatgatggaggagctgtggtgaatgacatgagccatgacaaccactgccacagccaggaggagatgagccctggcatgtctgtgaaggacttcagcaagcacaacagaacccgctgcatcagcaggacagagatcagaagagctgacagcatgaccagcgaggaccaggagcctgagcgggactatgaaaatgaaagtgagagcagcgagcccaagctgggggaggagagcatggagggagatgagcacatccacagcgaggtgtctgagaaggtgctgatgaacagcgagaggccagatgagaaccacagcgagcccagccaccaggatgtgatcaaggtgaaggaggagttcacagaccccacctatgacatgttctacatgagccagtatggcctgtacaacggcggcggggcctccatggccgccctgcacgagagcttcaccagcagcctgaactacggcagcccccagaagttcagccctgagggggacctgtgcagcagcccagaccccaagatctgctacgtgtgcaagaagagcttcaagagcagctacagcgtgaagctgcactacagaaatgtgcacctgaaggagatgcacgtgtgcaccgtggccggctgcaatgctgccttccccagccgccgcagccgggacaggaacagaaacctgaggatggagaggaccatcggccctggccaccgggacagcctgcacctgcggcggggcaacagcaacagacctggcacctgctgcctgcacactggagacagcctggaggagagcgtgattgtgcgcatcagctgcaagaggctggagagctag

SEQ ID NO: 144836 - DNA, 2583 bp, synthetic construct
  misc_feature 1..2583: note = Description of Artificial Sequence: Synthetic coding sequence
  source 1..2583: mol_type = other DNA
tctgaggaggccgaggtggatgtgcgggagcgggagacccagagggaccgggagcccaagagggcccgggacctgaccctgcgggacagctgcacagacaacagcatgcagtttggcaccaggaccaccacagctgagcccggcttcatgggcacctggcagaatgctgacaccaacctgctcttcaggatgagccagcaggccatccgctgcaccctggtgaactgcacctgtgagtgcttccagcccgggaagatcaacctgcggacctgtgaccagtgcaagcacggctgggtggcccacgccctggacaagctgagcacccagcacctgtaccaccccacccaggtggagatcgtgcagagcaatgtggtgtttgacatcagcagcctgatgctgtatggcacccaggccgtgcctgtgcggctgaagatcctgctggacaggctcttctctgtgctgaagcaggaggaggtgctgcacatcctgcacggcctgggctggaccctgcgggactatgtgcggggctacatcctgcaggatgctgctgggaaggtgctggaccgctgggccatcatgagccgggaggaggagatcatcaccctgcagcagttcctgcgctttggagagaccaagagcatcgtggagctgatggccatccaggagaaggagggccaggccgtggccgtgcccagcagcaagacagacagcgacatccgcaccttcatcgagagcaacaacagaaccaggagccccagcctgctggcccacctggagaacagcaaccccagcagcatccaccactttgagaacatccccaacagcctggccttcctgctgcccttccagtacatcaaccctgtgtctgcccccctgctgggcctgccccccaacggcctgctgctggagcagcccggcctgcggctgcgggagcccagcctgagcacccagaatgagtacaatgaaagcagcgagagcgaggtgagccccaccccctacaagaatgaccagacccccaacagaaatgccctgaccagcatcaccaacgtggagcccaagacagagcccgcctgtgtgagccccatccagaacagcgcccctgtgtctgacctgaccaagacagagcaccccaagagcagcttccgcatccacaggatgaggaggatgggcagcgccagcaggaagggccgggtcttctgcaatgcctgtgggaagaccttctatgacaagggcaccctgaagatccactacaatgctgtgcacctgaagatcaagcaccgctgcaccatcgagggctgcaacatggtgttcagcagcctgcggagcaggaacagacattctgccaaccccaacccccggctgcacatgcccatgctgaggaacaacagagacaaggacctgatccgggccaccagcggggccgccacccctgtgattgccagcaccaagagcaacctggccctgaccagccctggccggccccccatgggcttcaccaccccacccctggaccctgtgctgcagaaccccctgcccagccagctggtgttcagcggcctgaagacagtgcagcctgtgccccccttctaccgcagcctgctgaccccaggagagatggtgagcccccccaccagcctgcccaccagccccatcatccccaccagcggcaccatcgagcagcaccccccaccacccagcgagcctgtggtgcctgctgtgatgatggccacccatgagcccagcgctgacctggcccccaagaagaagcccaggaagagctccatgcctgtgaagattgagaaggagatcatcgacacagcagatgaatttgatgatgaagatgatgaccccaatgatggaggagctgtggtgaatgacatgagccatgacaaccactgccacagccaggaggagatgagccctggcatgtctgtgaaggacttcagcaagcacaacagaacccgctgcatcagcaggacagagatcagaagagctgacagcatgaccagcgaggaccaggagcctgagcgggactatgaaaatgaaagtgagagcagcgagcccaagctgggggaggagagcatggagggagatgagcacatccacagcgaggtgtctgagaaggtgctgatgaacagcgagaggccagatgagaaccacagcgagcccagccaccaggatgtgatcaaggtgaaggaggagttcacagaccccacctatgacatgttctacatgagccagtatggcctgtacaacggcggcggggcctccatggccgccctgcacgagagcttcaccagcagcctgaactacggcagcccccagaagttcagccctgagggggacctgtgcagcagcccagaccccaagatctgctacgtgtgcaagaagagcttcaagagcagctacagcgtgaagctgcactacagaaatgtgcacctgaaggagatgcacgtgtgcaccgtggccggctgcaatgctgccttccccagccgccgcagccgggacaggaacagaaacctgaggatggagaggaccatcggccctggccaccgggacagcctgcacctgctgcccacctag

SEQ ID NO: 144837 - DNA, 1206 bp, synthetic construct
  misc_feature 1..1206: note = Description of Artificial Sequence: Synthetic coding sequence
  source 1..1206: mol_type = other DNA
atggcccacctgggccccaccccaccaccccacagcctgaactacaagtctgaggaccggctgtctgagcaggactggccagcctacttcaaggtgccctgctgcggcgtggacaccagccagatcgagagcgaggaggccgaggtggatgtgcgggagcgggagacccagagggaccgggagcccaagagggcccgggacctgaccctgcgggacagctgcacagacaacagcatgcagtttggcaccaggaccaccacagctgagcccggcttcatgggcacctggcagaatgctgacaccaacctgctcttcaggatgagccagcaggtgcccctggcctgcaccggccgggtgctgggcgctgacttctgccccaacctggaggagccctaccaccggctggaggtgcaggccatccgctgcaccctggtgaactgcacctgtgagtgcttccagcccgggaagatcaacctgcggacctgtgaccagtgcaagcacggctgggtggcccacgccctggacaagctgagcacccagcacctgtaccaccccacccaggtggagatcgtgcagagcaatgtggtgtttgacatcagcagcctgatgctgtatggcacccaggccgtgcctgtgcggctgaagatcctgctggacaggctcttctctgtgctgaagcaggaggaggtgctgcacatcctgcacggcctgggctggaccctgcgggactatgtgcggggctacatcctgcaggatgctgctgggaaggtgctggaccgctgggccatcatgagccgggaggaggagatcatcaccctgcagcagttcctgcgctttggagagaccaagagcatcgtggagctgatggccatccaggagaaggagggccaggccgtggccgtgcccagcagcaagacagacagcgacatccgcaccttcatcgagagcaacaacagaaccaggagccccagcctgctggcccacctggagaacagcaaccccagcagcatccaccactttgagaacatccccaacagcctggccttcctgctgcccttccagtacatcaaccctgtgtctgcccccctgctgggcctgcccccaaatggcctgctgctggagcagcccggcctgcggctgcgggagcccagcctgagcacccagaatgagtacaatgaatcttctgagagcgaggtgagcccctag

SEQ ID NO: 144838 - DNA, 306 bp, synthetic construct
  misc_feature 1..306: note = Description of Artificial Sequence: Synthetic coding sequence
  source 1..306: mol_type = other DNA
atgtgccgcctgctggtgcccctggcctgcaccggccgggtgctgggcgctgacttctgccccaacctggaggagccctaccaccggctggaggtgcaggccatccgctgcaccctggtgaactgcacctgtgagtgcttccagcccgggaagatcaacctgcggacctgtgaccagtgcaagcacggctgggtggcccacgccctggacaagctgagcacccagcacctgtaccaccccacccaggtggagatcgtgcagagcaatgtggtgtttgacatcagcagcctgatgctgtatggatag

SEQ ID NO: 144839 - DNA, 1233 bp, synthetic construct
  misc_feature 1..1233: note = Description of Artificial Sequence: Synthetic coding sequence
  source 1..1233: mol_type = other DNA
atggcccacctgggccccaccccaccaccccacagcctgaactacaagtctgaggaccggctgtctgagcaggactggccagcctacttcaaggtgccctgctgcggcgtggacaccagccagatcgagagcgaggaggccgaggtggatgtgcgggagcgggagacccagagggaccgggagcccaagagggcccgggacctgaccctgcgggacagctgcacagacaacagcatgcagtttggcaccaggaccaccacagctgagcccggcttcatgggcacctggcagaatgctgacaccaacctgctcttcaggatgagccagcaggccggcctgaagctgctgaccagcggggacccccctgtgctggacttccagagcgctggcatcaccggggtgagccactgcacccggctgaaggtggccatgatcagcaaggccatccgctgcaccctggtgaactgcacctgtgagtgcttccagcccgggaagatcaacctgcggacctgtgaccagtgcaagcacggctgggtggcccacgccctggacaagctgagcacccagcacctgtaccaccccacccaggtggagatcgtgcagagcaatgtggtgtttgacatcagcagcctgatgctgtatggcacccaggccgtgcctgtgcggctgaagatcctgctggacaggctcttctctgtgctgaagcaggaggaggtgctgcacatcctgcacggcctgggctggaccctgcgggactatgtgcggggctacatcctgcaggatgctgctgggaaggtgctggaccgctgggccatcatgagccgggaggaggagatcatcaccctgcagcagttcctgcgctttggagagaccaagagcatcgtggagctgatggccatccaggagaaggagggccaggccgtggccgtgcccagcagcaagacagacagcgacatccgcaccttcatcgagagcaacaacagaaccaggagccccagcctgctggcccacctggagaacagcaaccccagcagcatccaccactttgagaacatccccaacagcctggccttcctgctgcccttccagtacatcaaccctgtgtctgcccccctgctgggcctgccccccaacggcctgctgctggagcagcccggcctgcggctgcgggagcccagcctgagcacccagaatgagtacaatgaaagcagcgagagcgaggtgagcccctag

SEQ ID NO: 144840 - DNA, 2712 bp, synthetic construct; identical to SEQ ID NO: 144832
  misc_feature 1..2712: note = Description of Artificial Sequence: Synthetic coding sequence
  source 1..2712: mol_type = other DNA

SEQ ID NO: 144841 - DNA, 2712 bp, synthetic construct
  misc_feature 1..2712: note = Description of Artificial Sequence: Synthetic coding sequence
  source 1..2712: mol_type = other DNA
atggcccacctgggccccaccccaccaccccacagcctgaactacaagtctgaggaccggctgtctgagcaggactggccagcctacttcaaggtgccctgctgcggcgtggacaccagccagatcgagagcgaggaggccgaggtggatgtgcgggagcgggagacccagagggaccgggagcccaagagggcccgggacctgaccctgcgggacagctgcacagacaacagcatgcagtttggcaccaggaccaccacagctgagcccggcttcatgggcacctggcagaatgctgacaccaacctgctcttcaggatgagccagcaggccatccgctgcaccctggtgaactgcacctgtgagtgcttccagcccgggaagatcaacctgcggacctgtgaccagtgcaagcacggctgggtggcccacgccctggacaagctgagcacccagcacctgtaccaccccacccaggtggagatcgtgcagagcaatgtggtgtttgacatcagcagcctgatgctgtatggcacccaggccgtgcctgtgcggctgaagatcctgctggacaggctcttctctgtgctgaagcaggaggaggtgctgcacatcctgcacggcctgggctggaccctgcgggactatgtgcggggctacatcctgcaggatgctgctgggaaggtgctggaccgctgggccatcatgagccgggaggaggagatcatcaccctgcagcagttcctgcgctttggagagaccaagagcatcgtggagctgatggccatccaggagaaggagggccaggccgtggccgtgcccagcagcaagacagacagcgacatccgcaccttcatcgagagcaacaacagaaccaggagccccagcctgctggcccacctggagaacagcaaccccagcagcatccaccactttgagaacatccccaacagcctggccttcctgctgcccttccagtacatcaaccctgtgtctgcccccctgctgggcctgcccccaaatggcctgctgctggagcagcccggcctgcggctgcgggagcccagcctgagcacccagaatgagtacaatgaatcttctgagagcgaggtgagccccaccccctacaagaatgaccagacccccaacagaaatgccctgaccagcatcaccaacgtggagcccaagacagagcccgcctgtgtgagccccatccagaacagcgcccctgtgtctgacctgaccaagacagagcaccccaagagcagcttccgcatccacaggatgaggaggatgggcagcgccagcaggaagggccgggtcttctgcaatgcctgtgggaagaccttctatgacaagggcaccctgaagatccactacaatgctgtgcacctgaagatcaagcaccgctgcaccatcgagggctgcaacatggtgttcagcagcctgcggagcaggaacagacacagcgccaaccccaacccccggctgcacatgcccatgctgaggaacaacagagacaaggacctgatccgggccaccagcggggccgccacccctgtgattgccagcaccaagagcaacctggccctgaccagccctggccggccccccatgggcttcaccaccccacccctggaccctgtgctgcagaaccccctgcccagccagctggtgttttctggcctgaagacagtgcagcctgtgccccccttctaccgcagcctgctgaccccaggagagatggtgtccccacccaccagcctgcccaccagccccatcatccccaccagcggcaccatcgagcagcaccccccacctccttctgagcctgtggtgcctgctgtgatgatggccacccatgagcccagcgctgacctggcccccaagaagaagcccaggaagagctccatgcctgtgaagattgagaaggagatcatcgacacagcagatgaatttgatgatgaagatgatgaccccaatgatggcggcgctgtggtgaatgacatgagccatgacaaccactgccacagccaggaggagatgagccctggcatgtctgtgaaggacttcagcaagcacaacagaacccgctgcatcagcaggacagagatccggcgggctgacagcatgaccagcgaggaccaggagcctgagcgggactatgaaaatgaaagtgagagcagcgagcccaagctgggggaggagagcatggagggagatgagcacatccacagcgaggtgtctgagaaggtgctgatgaacagcgagaggccagatgagaaccacagcgagcccagccaccaggacgtcatcaaggtgaaggaggagttcacagaccccacctatgacatgttctacatgagccagtatggcctgtacaatggaggaggagcctccatggccgccctgcacgagagcttcaccagcagcctgaactacggcagcccccagaagttcagccctgagggggacctgtgcagcagcccagaccccaagatctgctacgtgtgcaagaagagcttcaagagcagctacagcgtgaagctgcactacagaaatgtgcacctgaaggagatgcacgtgtgcaccgtggccggctgcaatgctgccttccccagcagaagaagccgggacaggaacagaaacctgaggatggagaggaccatcggccctggccaccgggacagcctgcacctgcggagcacctag

SEQ ID NO: 144842 - DNA, 1950 bp, synthetic construct
  misc_feature 1..1950: note = Description of Artificial Sequence: Synthetic coding sequence
  source 1..1950: mol_type = other DNA
atgctgtatggcacccaggccgtgcctgtgcggctgaagatcctgctggacaggctcttctctgtgctgaagcaggaggaggtgctgcacatcctgcacggcctgggctggaccctgcgggactatgtgcggggctacatcctgcaggatgctgctgggaaggtgctggaccgctgggccatcatgagccgggaggaggagatcatcaccctgcagcagttcctgcgctttggagagaccaagagcatcgtggagctgatggccatccaggagaaggagggccaggccgtggccgtgcccagcagcaagacagacagcgacatccgcaccttcatcgagagcaacaacagaaccaggagccccagcctgctggcccacctggagaacagcaaccccagcagcatccaccactttgagaacatccccaacagcctggccttcctgctgcccttccagtacatcaaccctgtgtctgcccccctgctgggcctgcccccaaatggcctgctgctggagcagcccggcctgcggctgcgggagcccagcctgagcacccagaatgagtacaatgaatcttctgagagcgaggtgagccccaccccctacaagaatgaccagacccccaacagaaatgccctgaccagcatcaccaacgtggagcccaagacagagcccgcctgtgtgagccccatccagaacagcgcccctgtgtctgacctgaccaagacagagcaccccaagagcagcttccgcatccacaggatgaggaggatgggcagcgccagcaggaagggccgggtcttctgcaatgcctgtgggaagaccttctatgacaagggcaccctgaagatccactacaatgctgtgcacctgaagatcaagcaccgctgcaccatcgagggctgcaacatggtgttcagcagcctgcggagcaggaacagacacagcgccaaccccaacccccggctgcacatgcccatgctgaggaacaacagagacaaggacctgatccgggccaccagcggggccgccacccctgtgattgccagcaccaagagcaacctggccctgaccagccctggccggccccccatgggcttcaccaccccacccctggaccctgtgctgcagaaccccctgcccagccagctggtgttttctggcctgaagacagtgcagcctgtgccccccttctaccgcagcctgctgaccccaggagagatggtgtccccacccaccagcctgcccaccagccccatcatccccaccagcggcaccatcgagcagcaccccccacctccttctgagcctgtggtgcctgctgtgatgatggccacccatgagcccagcgctgacctggcccccaagaagaagcccaggaagagctccatgcctgtgaagattgagaaggagatcatcgacacagcagatgaatttgatgatgaagatgatgaccccaatgatggcggcgctgtggtgaatgacatgagccatgacaaccactgccacagccaggaggagatgagccctggcatgtctgtgaaggacttcagcaagcacaacagaacccgctgcatcagcaggacagagatccggcgggctgacagcatgaccagcgaggaccaggagcctgagcgggactatgaaaatgaaagtgagagcagcgagcccaagctgggggaggagagcatggagggagatgagcacatccacagcgaggtgtctgagaaggtgctgatgaacagcgagaggccagatgagaaccacagcgagcccagccaccaggacgtcatcaaggtgaaggaggagttcacagaccccacctatgacatgttctacatgagccagtatggcctgtacaatggaggaggagcctccatggccgccctgcacgagagcttcaccagcagcctgaactacggcagcccccaggtgctgcccaggaggtag

SEQ ID NO: 144843 - DNA, 3015 bp, synthetic construct
  misc_feature 1..3015: note = Description of Artificial Sequence: Synthetic coding sequence
  source 1..3015: mol_type = other DNA
atgacagatgatgtgaaggagcccagccgcttcagcctgctgctggccatccgctgcaccctggtgaactgcacctgtgagtgcttccagcccgggaagatcaacctgcggacctgtgaccagtgcaagcacggctgggtggcccacgccctggacaagctgagcacccagcacctgtaccaccccacccaggtggagatcgtgcagagcaatgtggtgtttgacatcagcagcctgatgctgtatggcacccaggccgtgcctgtgcggctgaagatcctgctggacaggctcttctctgtgctgaagcaggaggaggtgctgcacatcctgcacggcctgggctggaccctgcgggactatgtgcggggctacatcctgcaggatgctgctgggaaggtgctggaccgctgggccatcatgagccgggaggaggagatcatcaccctgcagcagttcctgcgctttggagagaccaagagcatcgtggagctgatggccatccaggagaaggagggccaggccgtggccgtgcccagcagcaagacagacagcgacatccgcaccttcatcgagagcaacaacagaaccaggagccccagcctgctggcccacctggagaacagcaaccccagcagcatccaccactttgagaacatccccaacagcctggccttcctgctgcccttccagtacatcaaccctgtgtctgcccccctgctgggcctgccccccaacggcctgctgctggagcagcccggcctgcggctgcgggagcccagcctgagcacccagaatgagtacaatgaaagcagcgagagcgaggtgagccccaccccctacaagaatgaccagacccccaacagaaatgccctgaccagcatcaccaacgtggagcccaagacagagcccgcctgtgtgagccccatccagaacagcgcccctgtgtctgacctgaccaagacagagcaccccaagagcagcttccgcatccacaggatgaggaggatgggcagcgccagcaggaagggccgggtcttctgcaatgcctgtgggaagaccttctatgacaagggcaccctgaagatccactacaatgctgtgcacctgaagatcaagcaccgctgcaccatcgagggctgcaacatggtgttcagcagcctgcggagcaggaacagacattctgccaaccccaacccccggctgcacatgcccatgctgaggaacaacagagacaaggacctgatccgggccaccagcggggccgccacccctgtgattgccagcaccaagagcaacctggccctgaccagccctggccggccccccatgggcttcaccaccccacccctggaccctgtgctgcagaaccccctgcccagccagctggtgttcagcggcctgaagacagtgcagcctgtgccccccttctaccgcagcctgctgaccccaggagagatggtgagcccccccaccagcctgcccaccagccccatcatccccaccagcggcaccatcgagcagcaccccccaccacccagcgagcctgtggtgcctgctgtgatgatggccacccatgagcccagcgctgacctggcccccaagaagaagcccaggaagagctccatgcctgtgaagattgagaaggagatcatcgacacagcagatgaatttgatgatgaagatgatgaccccaatgatggaggagctgtggtgaatgacatgagccatgacaaccactgccacagccaggaggagatgagccctggcatgtctgtgaaggacttcagcaagcacaacagaacccgctgcatcagcaggacagagatcagaagagctgacagcatgaccagcgaggaccaggagcctgagcgggactatgaaaatgaaagtgagagcagcgagcccaagctgggggaggagagcatggagggagatgagcacatccacagcgaggtgtctgagaaggtgctgatgaacagcgagaggccagatgagaaccacagcgagcccagccaccaggatgtgatcaaggtgaaggaggagttcacagaccccacctatgacatgttctacatgagccagtatggcctgtacaacggcggcggggcctccatggccgccctgcacgagagcttcaccagcagcctgaactacggcagcccccagaagttcagccctgagggggacctgtgcagcagcccagaccccaagatctgctacgtgtgcaagaagagcttcaagagcagctacagcgtgaagctgcactacagaaatgtgcacctgaaggagatgcacgtgtgcaccgtggccggctgcaatgctgccttccccagccgccgcagccgggacagacattctgccaacatcaacctgcacaggaagctgctgaccaaggagctggatgacatgggcctggacagcagccagcccagcctgagcaaggacctgagagatgagttcctggtgaagatctacggggcccagcaccccatgggcctggatgtgcgggaggatgccagcagccctgctggaacagaggacagccacctgaatggctacggccggggcatggccgaggactacatggtgctggacctgagcaccaccagcagcctgcagagcagcagcagcatccacagcagccgggagagtgatgctggcagtgatgagggcatcctgctggatgacattgatggagccagtgacagcggggagagcgcccacaaggccgaggccccagccctgcccggcagcctgggcgctgaggtgtctggcagcctgatgttcagcagcctgagcggcagcaatggaggcatcatgtgcaacatctgccacaagatgtacagcaacaagggcaccctgcgggtgcactacaagacagtgcacctgcgggagatgcacaagtgcaaggtgcccggctgcaacatgatgttcagctctgtgcgcagcaggaacagacacagccagaaccccaacctgcacaagaacatccccttcacctctgtggactag

SEQ ID NO: 144844 - DNA, 11781 bp, synthetic construct
  misc_feature 1..11781: note = Description of Artificial Sequence: Synthetic coding sequence
  source 1..11781: mol_type = other DNA
atgggaaatgaggtgtccctggagggcggcgctggagatggccccctgcccccaggaggagctggccctggccctggccctggccctggccctggagctgggaagccacccagcgccccagctgggggcggccagctgcctgctgctggagctgcccggagcacagctgtgccccctgtgcccggccctggccctggccctggccctggccctggccctggcagcaccagccggcggctggaccccaaggagcccctgggcaaccagagagctgccagccccacccccaagcaggccagcgccaccaccccaggccacgagagcccccgggagacccgggcccagggccctgctggccaggaggctgatggccccaggaggaccctgcaggtggacagcaggacccagaggagcggccgcagccccagcgtgtccccagaccggggcagcacccccaccagcccctacagcgtgccccagatcgcccccctgcccagcagcaccctgtgccccatctgcaagaccagtgacctgaccagcacccccagccagcccaacttcaacacctgcacccagtgccacaacaaggtgtgcaaccagtgtggcttcaaccccaacccccacctgacccaggtgaaggagtggctgtgcctgaactgccagatgcagagggccctgggcatggacatgaccacagcccccaggagcaagagccagcagcagctgcacagccctgccctgagccctgcccacagccctgccaagcagcccctgggcaagccagaccaggagaggagccggggccctgggggcccccagcccggcagccggcaggccgagacagcccgggccacctctgtgcccggccctgcccaggccgccgcccctcctgaggtgggccgggtgagcccccagcccccccagcccaccaagcccagcacagctgagcccaggcctcctgctggggaggccccagccaagagcgccacagctgtgcctgctggcctgggcgccacagagcagacccaggagggcctgaccgggaagctgtttggcctgggcgccagcctgctgacccaggccagcaccctgatgtctgtgcagcctgaggccgacacccagggccagcctgcccccagcaagggcacccccaagatcgtgttcaatgatgccagcaaggaggccggccccaagcccctgggcagcggccctggccctggccctgcccctggggccaagacagagcccggggccaggatgggccctggcagcggccctggggccctgcccaagacaggaggcaccaccagccccaagcacggccgggcagagcaccaggccgccagcaaggccgccgccaagcccaagaccatgcccaaggagcgggccatctgccccctgtgccaggccgagctgaatgtgggcagcaagagccctgccaactacaacacctgcaccacctgccgcctgcaggtgtgcaacctgtgtggcttcaaccccaccccccacctggtggagaagacagagtggctgtgcctgaactgccagaccaagaggctgctggagggcagcctgggggagcccacccccctgcccccacccaccagccagcagccccctgtgggcgccccccaccgggccagcggcaccagccccctgaagcagaagggcccccagggcctgggccagcccagcggccccctgcctgccaaggccagccccctgagcaccaaggccagccccctgcccagcaaggccagcccccaggccaagcccctgcgggccagcgagcccagcaagacccccagctctgtgcaggagaagaagaccagggtgcccaccaaggccgagcccatgcccaagcccccacctgagaccacccccaccccagccacccccaaggtgaagtctggagtgcggcgggcagagcccgccacccctgtggtgaaggctgtgcctgaggcccccaagggcggggaggccgaggacctggtgggcaagccctacagccaggatgccagccgcagcccccagagcctgagtgacaccggctacagcagtgatggcatcagcagcagccagagcgagatcaccggggtggtgcagcaggaggtggagcagctggacagcgctggggtgacaggcccccacccccccagccccagcgagatccacaaggtgggcagctccatgaggcccctgctgcaggcccagggcctggcccccagcgagaggagcaagcccctgagcagcggcactggagaggagcagaagcagaggccccacagcctgagcatcaccccagaggcctttgacagtgatgaggagctggaggacatcctggaggaggatgaagattctgctgagtggaggagaagaagagagcagcaggacacagctgagagcagtgatgactttggcagccagctgcggcatgactatgtggaggacagcagcgagggcggcctgagccccctgcccccccagcccccagcccgggctgctgagctgacagatgaggacttcatgaggcggcagatcctggagatgtctgctgaggaggacaacctggaggaggatgacacagccaccagcggccggggcctggccaagcacggcacccagaagggcggcccccggcccaggcctgagcccagccaggagcctgctgccctgcccaagaggcggctgccccacaatgccaccaccggctatgaggagctgctgcctgagggcggcagcgctgaggccacagatggcagcggcaccctgcagggcggcctgcggcgcttcaagaccatcgagctgaacagcacaggcagctatggccacgagctggacctgggccagggccctgaccccagcctggaccgggagcctgagctggagatggagagcctgaccggcagccctgaggacaggagcagaggagagcacagcagcaccctgcctgccagcacccccagctacaccagcggcaccagccccaccagcctgagcagcctggaggaggacagcgacagcagccccagccggcggcagaggctggaggaggccaagcagcagaggaaggcccggcacaggagccacggccccctgctgcccaccatcgaggacagcagcgaggaggaggagctgcgggaggaggaggagctgctgcgggagcaggagaagatgagggaggtggagcagcagaggatccgcagcacagccaggaagacccggcgggacaaggaggagctgcgggcccagaggcggcgggagaggagcaagaccccacccagcaacctgagccccattgaagatgccagccccacagaggagctgcggcaggccgctgagatggaggagctgcacaggagcagctgcagcgagtacagccccagccccagcctggacagcgaggccgaggccctggatggcggccccagccggctgtacaagagcggcagcgagtacaacctgcccaccttcatgagcctgtacagccccacagagaccccatctggcagcagcaccacccccagcagcggccggcccctgaagtctgctgaggaggcctatgaggagatgatgaggaaggccgagctgctgcagaggcagcagggccaggccgccggggcccggggcccccacggcggccccagccagcccaccggcccccggggcctgggcagctttgagtaccaggacaccacagaccgggagtatggccaggccgcccagcctgctgctgagggcaccccagccagcctgggcgctgctgtgtatgaggagatcctgcagaccagccagagcatcgtgaggatgaggcaggccagcagccgggacctggcctttgctgaggacaagaagaaggagaagcagttcctgaatgctgagagcgcctacatggaccccatgaagcagaatggaggccccctgaccccaggcaccagccccacccagctggccgcccctgtgtccttcagcacccccaccagcagtgacagcagcggcggccgggtcatcccagatgtgcgggtgacccagcactttgccaaggagacccaggaccccctgaagctgcacagcagccctgccagccccagcagcgccagcaaggagatcggcatgcccttcagccagggccctggcaccccagccaccacagctgtggccccctgcccagctggcctgccccggggctacatgaccccagccagccctgctggcagcgagaggagccccagccccagcagcacagcccacagctatggccacagccccaccacagccaactacggcagccagacagaggacctgccccaggcccccagcggcctggccgctgctggccgggccgcccgggagaagcccctgagcgccagtgatggagagggcggcaccccccagcccagccgggcctacagctactttgccagcagcagcccccccctgagccccagcagccccagcgagagccccaccttcagccctgggaagatgggcccccgggccacagctgagttcagcacccagacccccagccctgccccagccagtgacatgcccaggagccctggggcccccacccccagccccatggtggcccagggcacccagaccccccaccggcccagcaccccccggctggtgtggcaggagagcagccaggaggcccccttcatggtgatcaccctggccagtgatgccagcagccagaccaggatggtgcacgccagcgccagcaccagccccctgtgcagccccacagagacccagcccaccacccacggctacagccagaccaccccaccttctgtgtcccagctgcccccagagcccccaggccccccaggcttcccccgggtgcccagcgctggagcagatggccccctggccctgtatggctggggcgccctgcctgctgagaacatcagcctgtgccgcatcagctctgtgcccggcaccagccgggtggagcccggccccaggaccccaggcacagctgtggtggacctgaggacagctgtgaagcccacccccatcatcctgacagaccagggcatggacctgaccagcctggccgtggaggccaggaaatatggcctggccctggaccccatccctggccggcagagcacagctgtgcagcccctggtgatcaacctgaatgcccaggagcacaccttcctggccacagccaccaccgtgtccatcaccatggccagctctgtgttcatggcccagcagaagcagcctgtggtgtatggagacccctaccagagccggctggactttggccagggcggcggcagccctgtgtgcctggcccaggtgaagcaggtggagcaggccgtgcagacagccccctaccgcagcggcccccggggccggccccgggaggccaagtttgcccgctacaacctgcccaaccaggtggcccccctggccaggagagatgtgctgatcacccagatgggcacagcccagagcatcggcctgaagccaggccctgtgcctgagcctggagctgagccccaccgggccaccccagctgagctgcggagccacgccctgcccggggccaggaagccccacacagtggtggtgcagatgggagagggcacagctggcaccgtgaccaccctgctgcctgaggagcctgctggggccctggacctgaccggcatgaggcctgagagccagctggcctgctgtgacatggtgtacaagctgcccttcggcagcagctgcaccggcaccttccacccagcccccagcgtgcctgagaagtccatggctgatgctgcccctcctggccagagcagcagccccttctacggcccccgggaccctgagcccccagagccccccacctaccgggcccagggcgtggtgggccctggcccccatgaggagcagaggccctacccccagggcctgcccggccgcctgtacagctccatgtctgacaccaacctggccgaggccggcctgaactaccacgcccagagaattggccagctgttccagggccctggccgggacagcgccatggacctgagcagcctgaagcacagctacagcctgggctttgctgatggccgctacctgggccagggcctgcagtatggctctgtgacagacctgcggcaccccacagacctgctggcccaccccctgcccatgaggcgctacagctctgtgagcaacatctacagcgaccacagatatggccccagaggagatgctgtgggcttccaggaggccagcctggcccagtacagcgccaccacagcccgggagatcagcaggatgtgtgccgccctgaacagcatggaccagtatggaggaagacatggcagcggcggcggcggccctgacctggtgcagtaccagccccagcacggccctggcctgagcgccccccagagcctggtgcccctgcggcccggcctgctgggcaaccccaccttccctgagggccaccccagccctggcaacctggcccagtatggccctgctgctggccagggcacagctgtgcggcagctgctgcccagcacagccaccgtgcgggcagcagatggcatgatctacagcaccatcaacacccccatcgccgccaccctgcccatcaccacccagcctgcctctgtgctgcggcccatggtgcggggcggcatgtaccggccctatgccagcggcggcatcacagctgtgcccctgaccagcctgaccagggtgcccatgattgccccccgggtgcccctgggccccaccggcctgtaccgctacccagcccccagccgcttccccatcgccagctctgtgcccccagctgagggccctgtgtacctgggcaagccagctgctgccaaggcccctggagctgggggccccagcaggcctgagatgcctgtgggcgccgcccgggaggagcccctgcccaccaccaccccagctgccatcaaggaggccgccggggccccagccccagcccccctggccggccagaagcccccagcagatgctgcccctgggggcggcagcggggccctgagccggcccggctttgagaaggaggaggccagccaggaggagcggcagaggaagcagcaggagcagctgctgcagctggagcgggagcgggtggagctggagaagctgcggcagctgcggctgcaggaggagctggagcgggagcgggtggagctgcagaggcaccgggaggaggagcagctgctggtgcagcgggagctgcaggagctgcagaccatcaagcaccacgtgctgcagcagcagcaggaggagcggcaggcccagtttgccctgcagcgggagcagctggcccagcagaggctgcagctggagcagatccagcagctgcagcagcagctgcagcagcagctggaggagcagaagcagaggcagaaggcccccttccctgctgcctgtgaggcccctggccggggcccccccctggccgctgctgagctggcccagaatggccagtactggccacccctgacccacgccgccttcatcgccatggccggccctgagggcctgggccagccccgggagcctgtgctgcaccggggcctgcccagcagcgccagtgacatgagcctgcagacagaggagcagtgggaggccagccgcagcggcatcaagaagaggcacagcatgccccggctgagagatgcctgtgagctggagagcggcacagagccctgtgtggtgagaagaattgctgacagctctgtgcagacagatgatgaagatggagagagccgctacctgctgagcagaagaagaagagccaggagatctgctgactgcagcgtgcagacagatgatgaagattctgctgagtgggagcagcctgtgagaagaagaagaagccggctgcccaggcacagcgacagcggcagtgacagcaagcatgatgccacagccagcagcagcagcgctgctgccaccgtgcgggccatgagctctgtgggcatccagaccatcagtgactgcagcgtgcagacagagccagaccagctgccccgggtgtccccagccatccacatcacagctgccacagaccccaaggtggagatcgtgcgctacatcagcgcccctgagaagacaggccgcggggagagcctggcctgccagacagagccagatggccaggcccagggcgtggccggcccccagctggtgggccccacagccatcagcccctacctgcccggcatccagatcgtgaccccaggccccctgggccgctttgagaagaagaagccagaccccctggagatcggctaccaggcccacctgcccccagagagcctgagccagctggtgtcccggcagccccccaagagcccccaggtgctgtacagccctgtgagccccctgagcccccaccggctgctggacaccagctttgccagcagcgagcggctgaacaaggcccacgtgagcccccagaagcacttcaccgctgacagcgccctgcggcagcagaccctgccccggcccatgaagaccctgcagaggagcctgagtgaccccaagcccctgagccccacagctgaggagagcgccaaggagcgcttcagcctgtaccagcaccagggcggcctgggcagccaggtgtctgccctgccccccaacagcctggtgaggaaggtgaagaggaccctgcccagccccccacctgaggaggcccacctgcccctggccggccaggccagcccccagctgtatgctgccagcctgctgcagaggggcctgaccggccccaccaccgtgcctgccaccaaggccagcctgctgcgggagctggaccgggacctgcggctggtggagcacgagagcaccaagctgaggaagaagcaggccgagctggatgaggaggagaaggagattgatgccaagctgaagtacctggagctgggcatcacccagaggaaggagagcctggccaaggacagaggaggccgggactacccacccctgcggggcctgggggagcaccgggactacctgagtgacagcgagctgaaccagctgcggctgcagggctgcaccaccccagctggccagtttgtggacttccctgccacagctgctgccccagccacccccagcggccccacagccttccagcagccccgcttccagcccccagccccccagtacagcgctggcagcggcggccccacccagaatggcttccctgcccaccaggcccccacctacccaggccccagcacctacccagccccagccttccccccaggggccagctacccagctgagcccggcctgcccaaccagcaggccttccggcccaccggccactacgccggccagacccccatgcccaccacccagagcaccctcttccctgtgcctgctgacagccgggcccccctgcagaagccccggcagaccagcctggccgacctggagcagaaggtgcccaccaactatgaagtcatcgccagccctgtggtgcccatgagcagcgcccccagcgagaccagctacagcggccctgctgtgagcagcggctatgagcagggcaaggtgcctgaggtgccccgggccggggaccggggctctgtgtcccagagccctgcccccacctaccccagcgacagccactacaccagcctggagcagaatgtgcccagaaattatgtgatgattgatgacatcagcgagctgaccaaggacagcaccagcacagccccagacagccagaggctggagcccctgggccctggcagcagcggccggcctgggaaggagcctggagagcccggggtgctggatggccccaccctgccctgctgctacgcccggggggaggaggagagtgaagaagattcctatgacccccggggcaaaggaggccacctgcgctccatggagagcaatggccggcctgccagcacccactactacggggacagcgactacagacatggagcccgggtggagaagtatggccctggccccatgggccccaagcaccccagcaagagcctggccccagctgccatcagcagcaagaggagcaagcacaggaagcagggcatggagcagaagatcagcaagttcagccccatcgaggaggccaaggatgtggagagtgacctggccagctacccacctcctgctgtgagcagcagcctggtgtcccggggcaggaagttccaggatgagatcacctacggcctgaagaagaatgtgtatgagcagcagaagtactacggcatgagcagcagagatgctgtggaggatgaccgcatctatggaggcagcagccgcagccgggcccccagcgcctacagcggggagaagctgagcagccatgacttcagcggctggggcaagggctatgaaagagagcgggaggccgtggagcggctgcagaaggccggccccaagcccagcagcctgtccatggcccacagccgggtgcggccccccatgaggagccaggccagcgaggaggagagccctgtgagccccctgggccggcccaggcctgctgggggccccctgcccccaggaggagacacctgcccccagttctgcagcagccacagcatgccagatgtgcaggagcacgtgaaggatggcccccgggcccacgcctacaagcgggaggagggctacatcctggatgacagccactgtgtggtgtctgattctgaggcctaccacctgggccaggaggagacagactggtttgacaagcccagagatgcccggagtgaccgcttccgccaccacggcggccatgctgtgagcagcagcagccagaagaggggccctgcccggcacagctaccatgactatgatgagcccccagaggagggcctgtggccccatgatgagggcggccctggaagacatgccagcgccaaggagcacagacatggagaccacggccgccacagcggccgccacactggagaggagcccggccggcgggccgccaagccccacgcccgggacctgggcagacatgaggcccggccccacagccagcccagcagcgccccagccatgcccaagaagggccagcccggctaccccagcagcgctgagtacagccagcccagccgggccagcagcgcctaccaccacgccagtgacagcaagaagggcagccggcaggcccacagcggccctgctgccctgcagagcaaggccgagccccaggcccagccccagctgcagggccggcaggccgcccctggcccccagcagagccagagccccagcagccggcagatccccagcggggccgccagccggcagccccagacccagcagcagcagcagggcctgggcctgcagcccccccagcaggccctgacccaggcccggctgcagcagcagagccagcccaccacccggggcagcgccccagctgccagccagcctgctgggaagccccagcccggccccagcacagccaccggcccccagcctgctggcccccccagggctgagcagaccaacggcagcaagggcacagccaaggccccccagcagggccgggccccccaggcccagcctgcccctggccctggccctgctggggtgaaggccggggcccggcctgggggcacccctggggccccagctggccagcccggggctgatggagagagcgtcttcagcaagatcctgcctggaggagctgctgagcaggccggcaagctgacagaggccgtgtctgccttcggcaagaagttcagcagcttctggtag

SEQ ID NO: 144845 - DNA, 702 bp, synthetic construct
  misc_feature 1..702: note = Description of Artificial Sequence: Synthetic coding sequence
  source 1..702: mol_type = other DNA
atggagcccacagcccccagcctgacagaggaggacctgacagaggtgaagaaggatgccctggagaacctgcgggtgtacctgtgtgagaagatcatcgccgagcggcactttgaccacctgcgggccaagaagatcctgagccgggaggacacagaggagatcagctgcaggaccagcagcaggaagagagctgggaagctgctggactacctgcaggagaaccccaagggcctggacaccctggtggagagcatcagaagagagaagacccagaacttcctgatccagaagatcacagatgaggtgctgaagctgaggaacatcaagctggagcacctgaagggcctgaagtgcagcagctgtgagcccttcccagatggagccaccaacaacctgagccgcagcaacagtgatgagagcaacttcagcgagaagctgcgggccagcacagtgatgtaccaccctgagggggagagcagcaccacccccttcttcagcaccaacagcagcctgaacctgcctgtgctggaggtgggccgcacagagaacaccatcttcagcagcaccaccctgcccaggcctggggaccccggggccccacccctgcccccagacctgcagctggaggaggagggcacctgtgccaacagcagcgagatgttcctgcccctgcggagcaggacagtgtcccggcagtag

SEQ ID NO: 144846 - DNA, 702 bp, synthetic construct; identical to SEQ ID NO: 144845
  misc_feature 1..702: note = Description of Artificial Sequence: Synthetic coding sequence
  source 1..702: mol_type = other DNA

SEQ ID NO: 144847 - DNA, 471 bp, synthetic construct
  misc_feature 1..471: note = Description of Artificial Sequence: Synthetic coding sequence
  source 1..471: mol_type = other DNA
atggagcccacagcccccagcctgacagaggaggacctgacagaggtgaagaaggatgccctggagaacctgcgggtgtacctgtgtgagaagatcatcgccgagcggcactttgaccacctgcgggccaagaagatcctgagccgggaggacacagaggagatcagctgcaggaccagcagcaggaagagagctgggaagctgctggactacctgcaggagaaccccaagggcctggacaccctggtggagagcatcagaagagagaagacccagaacttcctgatccagaagatcacagatgaggtgctgaagctgaggaacatcaagctggagcacctgaaggatggagccaccaacaacctgagccgcagcaacagtgatgagagcaacttcagcgagaagctgcgggccagcacagtgatgtaccaccctgagggggagagcagcaccacccccttcttctactag

SEQ ID NO: 144848 - DNA, 2508 bp, synthetic construct
  misc_feature 1..2508: note = Description of Artificial Sequence: Synthetic coding sequence
  source 1..2508: mol_type = other DNA
atgagcaggaggaagcagggcaagccccagcacctgagcaagcgggagttcagccctgagcccctggaggccatcctgacagatgatgagccagaccacggccccctgggcgcccctgagggggaccatgacctgctgacctgtggccagtgccagatgaacttccccctgggggacatcctgatcttcatcgagcacaagaggaagcagtgcaatggcagcctgtgcctggagaaggctgtggacaagccacccagccccagccccatcgagatgaagaaggccagcaaccctgtggaggtgggcatccaggtgaccccagaagatgatgactgcctgagcaccagcagccggggcatctgccccaagcaggagcacatcgctgacaagctgctgcactggaggggcctgagcagccccaggtctgcccacggggccctgatccccaccccaggcatgtctgcagaatatgccccccagggcatctgcaaggatgagcccagcagctacacctgcaccacctgcaagcagcccttcaccagcgcctggttcctgctgcagcacgcccagaacacccacggcctgcgcatctacctggagagcgagcacggcagccccctgaccccccgggtgggcatccccagcggcctgggcgctgagtgccccagccagccccccctgcacggcatccacatcgctgacaacaaccccttcaacctgctgcgcatccctggctctgtgtcccgggaggccagcggcctggccgagggccgcttcccccccaccccacccctcttcagccccccacccaggcaccacctggacccccacagaattgagcggctgggcgctgaggagatggccctggccacccaccaccccagcgcctttgacagagtgctgcggctgaaccccatggccatggagcccccagccatggacttcagccggcggctgcgggagctggccggcaacaccagcagcccccccctgagccctggccggcccagccccatgcagaggctgctgcagcccttccagcccggcagcaagccacccttcctggccaccccacccctgccccccctgcagagcgcccccccacccagccagccccctgtgaagagcaagagctgtgagttctgtgggaagaccttcaagttccagagcaacctggtggtgcaccggcgcagccacactggagagaagccctacaagtgcaacctgtgtgaccacgcctgcacccaggccagcaagctgaagaggcacatgaagacccacatgcacaagagcagccccatgacagtgaagagtgatgatggcctgagcacagccagcagccctgagcccggcaccagtgacctggtgggcagcgccagcagcgccctgaagtctgtggtggccaagttcaagtcagaaaatgaccccaacctgatcccagaaaatggagatgaggaggaggaggaggatgatgaggaggaggaggaggaggaggaggaggaggaggaggagctgacagagagcgagcgggtggactatggcttcggcctgagcctggaggccgcccggcaccacgagaacagcagcagaggagctgtggtgggcgtgggagatgagagccgggccctgcctgatgtgatgcagggcatggtgctgagctccatgcagcacttcagcgaggccttccaccaggtgctgggggagaagcacaagaggggccacctggccgaggccgagggccaccgggacacctgtgatgaagattctgtggccggggagagtgacagaattgatgatggcaccgtgaatggccggggctgcagccctggagagagcgccagcggcggcctgagcaagaagctgctgctgggcagccccagcagcctgagccccttcagcaagaggatcaagctggagaaggagtttgacctgcccccagctgccatgcccaacacagaaaatgtgtacagccagtggctggccggctacgccgccagccggcagctgaaggaccccttcctgagctttggagacagccggcagagcccctttgccagcagcagcgagcacagcagtgaaaatggcagcctgcgcttcagcaccccacctggagagctggatggcggcatcagcggccgcagcggcaccggcagcggcggcagcaccccccacatcagcggccctggccctggccggcccagcagcaaggagggcagaagaagtgacacctgtgagtactgcggcaaggtgttcaagaactgcagcaacctgactgtgcacagaagaagccacactggagagcggccctacaagtgtgagctgtgcaactatgcctgtgcccagagcagcaagctgaccaggcacatgaagacccacggccaggtgggcaaggatgtgtacaagtgtgagatctgcaagatgcccttctctgtgtacagcaccctggagaagcacatgaagaagtggcacagcgacagagtgctgaacaatgacatcaagacagaatag

SEQ ID NO: 144849 - DNA, 2322 bp, synthetic construct
  misc_feature 1..2322: note = Description of Artificial Sequence: Synthetic coding sequence
  source 1..2322: mol_type = other DNA
atgagcaggaggaagcagggcaagccccagcacctgagcaagcgggagttcagccctgagcccctggaggccatcctgacagatgatgagccagaccacggccccctgggcgcccctgagggggaccatgacctgctgacctgtggccagtgccagatgaacttccccctgggggacatcctgatcttcatcgagcacaagaggaagcagtgcaatggcagcctgtgcctggagaaggctgtggacaagccacccagccccagccccatcgagatgaagaaggccagcaaccctgtggaggtgggcatccaggtgaccccagaagatgatgactgcctgagcaccagcagccggggcatctgccccaagcaggagcacatcgctgacaagctgctgcactggaggggcctgagcagccccaggtctgcccacggggccctgatccccaccccaggcatgtctgcagaatatgccccccagggcatctgcaaggatgagcccagcagctacacctgcaccacctgcaagcagcccttcaccagcgcctggttcctgctgcagcacgcccagaacacccacggcctgcgcatctacctggagagcgagcacggcagccccctgaccccccgggtgggcatccccagcggcctgggcgctgagtgccccagccagccccccctgcacggcatccacatcgctgacaacaaccccttcaacctgctgcgcatccctggctctgtgtcccgggaggccagcggcctggccgagggccgcttcccccccaccccacccctcttcagccccccacccaggcaccacctggacccccacagaattgagcggctgggcgctgaggagatggccctggccacccaccaccccagcgcctttgacagagtgctgcggctgaaccccatggccatggagcccccagccatggacttcagccggcggctgcgggagctggccggcaacaccagcagcccccccctgagccctggccggcccagccccatgcagaggctgctgcagcccttccagcccggcagcaagccacccttcctggccaccccacccctgccccccctgcagagcgcccccccacccagccagccccctgtgaagagcaagagctgtgagttctgtgggaagaccttcaagttccagagcaacctggtggtgcaccggcgcagccacactggagagaagccctacaagtgcaacctgtgtgaccacgcctgcacccaggccagcaagctgaagaggcacatgaagacccacatgcacaagagcagccccatgacagtgaagagtgatgatggcctgagcacagccagcagccctgagcccggcaccagtgacctggtgggcagcgccagcagcgccctgaagtctgtggtggccaagttcaagtcagaaaatgaccccaacctgatcccagaaaatggagatgaggaggaggaggaggatgatgaggaggaggaggaggaggaggaggaggaggaggaggagctgacagagagcgagcgggtggactatggcttcggcctgagcctggaggccgcccggcaccacgagaacagcagcagaggagctgtggtgggcgtgggagatgagagccgggccctgcctgatgtgatgcagggcatggtgctgagctccatgcagcacttcagcgaggccttccaccaggtgctgggggagaagcacaagaggggccacctggccgaggccgagggccaccgggacacctgtgatgaagattctgtggccggggagagtgacagaattgatgatggcaccgtgaatggccggggctgcagccctggagagagcgccagcggcggcctgagcaagaagctgctgctgggcagccccagcagcctgagccccttcagcaagaggatcaagctggagaaggagtttgacctgcccccagctgccatgcccaacacagaaaatgtgtacagccagtggctggccggctacgccgccagccggcagctgaaggaccccttcctgagctttggagacagccggcagagcccctttgccagcagcagcgagcacagcagtgaaaatggcagcctgcgcttcagcaccccacctggagagctggatggcggcatcagcggccgcagcggcaccggcagcggcggcagcaccccccacatcagcggccctggccctggccggcccagcagcaaggagggcagaagaagtgacacctgcagcagccacacccccatcagaagaagcacccagagggcccaggatgtgtggcagttcagtgatggcagcagccgggccctgaagttctag

SEQ ID NO: 144850 - DNA, 2406 bp, synthetic construct
  misc_feature 1..2406: note = Description of Artificial Sequence: Synthetic coding sequence
  source 1..2406: mol_type = other DNA
atgagcaggaggaagcagggcaagccccagcacctgagcaagcgggagttcagccctgagcccctggaggccatcctgacagatgatgagccagaccacggccccctgggcgcccctgagggggaccatgacctgctgacctgtggccagtgccagatgaacttccccctgggggacatcctgatcttcatcgagcacaagaggaagcagtgcaatggcagcctgtgcctggagaaggctgtggacaagccacccagccccagccccatcgagatgaagaaggccagcaaccctgtggaggtgggcatccaggtgaccccagaagatgatgactgcctgagcaccagcagccggggcatctgccccaagcaggagcacatcgccggcaaggatgagcccagcagctacacctgcaccacctgcaagcagcccttcaccagcgcctggttcctgctgcagcacgcccagaacacccacggcctgcgcatctacctggagagcgagcacggcagccccctgaccccccgggtgggcatccccagcggcctgggcgctgagtgccccagccagccccccctgcacggcatccacatcgctgacaacaaccccttcaacctgctgcgcatccctggctctgtgtcccgggaggccagcggcctggccgagggccgcttcccccccaccccacccctcttcagccccccacccaggcaccacctggacccccacagaattgagcggctgggcgctgaggagatggccctggccacccaccaccccagcgcctttgacagagtgctgcggctgaaccccatggccatggagcccccagccatggacttcagccggcggctgcgggagctggccggcaacaccagcagcccccccctgagccctggccggcccagccccatgcagaggctgctgcagcccttccagcccggcagcaagccacccttcctggccaccccacccctgccccccctgcagagcgcccccccacccagccagccccctgtgaagagcaagagctgtgagttctgtgggaagaccttcaagttccagagcaacctggtggtgcaccggcgcagccacactggagagaagccctacaagtgcaacctgtgtgaccacgcctgcacccaggccagcaagctgaagaggcacatgaagacccacatgcacaagagcagccccatgacagtgaagagtgatgatggcctgagcacagccagcagccctgagcccggcaccagtgacctggtgggcagcgccagcagcgccctgaagtctgtggtggccaagttcaagtcagaaaatgaccccaacctgatcccagaaaatggagatgaggaggaggaggaggatgatgaggaggaggaggaggaggaggaggaggaggaggaggagctgacagagagcgagcgggtggactatggcttcggcctgagcctggaggccgcccggcaccacgagaacagcagcagaggagctgtggtgggcgtgggagatgagagccgggccctgcctgatgtgatgcagggcatggtgctgagctccatgcagcacttcagcgaggccttccaccaggtgctgggggagaagcacaagaggggccacctggccgaggccgagggccaccgggacacctgtgatgaagattctgtggccggggagagtgacagaattgatgatggcaccgtgaatggccggggctgcagccctggagagagcgccagcggcggcctgagcaagaagctgctgctgggcagccccagcagcctgagccccttcagcaagaggatcaagctggagaaggagtttgacctgcccccagctgccatgcccaacacagaaaatgtgtacagccagtggctggccggctacgccgccagccggcagctgaaggaccccttcctgagctttggagacagccggcagagcccctttgccagcagcagcgagcacagcagtgaaaatggcagcctgcgcttcagcaccccacctggagagctggatggcggcatcagcggccgcagcggcaccggcagcggcggcagcaccccccacatcagcggccctggccctggccggcccagcagcaaggagggcagaagaagtgacacctgtgagtactgcggcaaggtgttcaagaactgcagcaacctgactgtgcacagaagaagccacactggagagcggccctacaagtgtgagctgtgcaactatgcctgtgcccagagcagcaagctgaccaggcacatgaagacccacggccaggtgggcaaggatgtgtacaagtgtgagatctgcaagatgcccttctctgtgtacagcaccctggagaagcacatgaagaagtggcacagcgacagagtgctgaacaatgacatcaagacagaatag

SEQ ID NO: 144851 - DNA, 732 bp, synthetic construct
  misc_feature 1..732: note = Description of Artificial Sequence: Synthetic coding sequence
  source 1..732: mol_type = other DNA
atgagcaggaggaagcagggcaagccccagcacctgagcaagcgggagttcagccctgagcccctggaggccatcctgacagatgatgagccagaccacggccccctgggcgcccctgagggggaccatgacctgctgacctgtggccagtgccagatgaacttccccctgggggacatcctgatcttcatcgagcacaagaggaagcagtgcaatggcagcctgtgcctggagaaggctgtggacaagccacccagccccagccccatcgagatgaagaaggccagcaaccctgtggaggtgggcatccaggtgaccccagaagatgatgactgcctgagcaccagcagccggggcatctgccccaagcaggagcacatcgctgacaagctgctgcactggaggggcctgagcagccccaggtctgcccacggggccctgatccccaccccaggcatgtctgcagaatatgccccccagggcatctgcaaggatgagcccagcagctacacctgcaccacctgcaagcagcccttcaccagcgcctggttcctgctgcagcacgcccagaacacccacggcctgcgcatctacctggagagcgagcacggcagccccctgaccccccgggtgctgcacaccccaccatttggagtggtgccccgggagctgaagatgtgtggcagcttcaggatggaggcccgggagcccctgagcagcgagaagatctag

SEQ ID NO: 144852 - DNA, 2397 bp, synthetic construct
  misc_feature 1..2397: note = Description of Artificial Sequence: Synthetic coding sequence
  source 1..2397: mol_type = other DNA
atgagcaaaggaacagatgaggacatcttctctggagtgtccttcttcctgacccggctgagccgctgtgagcccagcagaagacctcctccagccccccagcccaccatgagcaggaggaagcagggcaagccccagcacctgagcaagcgggagttcagccctgagcccctggaggccatcctgacagatgatgagccagaccacggccccctgggcgcccctgagggggaccatgacctgctgacctgtggccagtgccagatgaacttccccctgggggacatcctgatcttcatcgagcacaagaggaagcagtgcaatggcagcctgtgcctggagaaggctgtggacaagccacccagccccagccccatcgagatgaagaaggccagcaaccctgtggaggtgggcatccaggtgaccccagaagatgatgactgcctgagcaccagcagccggggcatctgccccaagcaggagcacatcgctgacaagctgctgcactggaggggcctgagcagccccaggtctgcccacggggccctgatccccaccccaggcatgtctgcagaatatgccccccagggcatctgcaaggatgagcccagcagctacacctgcaccacctgcaagcagcccttcaccagcgcctggttcctgctgcagcacgcccagaacacccacggcctgcgcatctacctggagagcgagcacggcagccccctgaccccccgggtgggcatccccagcggcctgggcgctgagtgccccagccagccccccctgcacggcatccacatcgctgacaacaaccccttcaacctgctgcgcatccctggctctgtgtcccgggaggccagcggcctggccgagggccgcttcccccccaccccacccctcttcagccccccacccaggcaccacctggacccccacagaattgagcggctgggcgctgaggagatggccctggccacccaccaccccagcgcctttgacagagtgctgcggctgaaccccatggccatggagcccccagccatggacttcagccggcggctgcgggagctggccggcaacaccagcagcccccccctgagccctggccggcccagccccatgcagaggctgctgcagcccttccagcccggcagcaagccacccttcctggccaccccacccctgccccccctgcagagcgcccccccacccagccagccccctgtgaagagcaagagctgtgagttctgtgggaagaccttcaagttccagagcaacctggtggtgcaccggcgcagccacactggagagaagccctacaagtgcaacctgtgtgaccacgcctgcacccaggccagcaagctgaagaggcacatgaagacccacatgcacaagagcagccccatgacagtgaagagtgatgatggcctgagcacagccagcagccctgagcccggcaccagtgacctggtgggcagcgccagcagcgccctgaagtctgtggtggccaagttcaagtcagaaaatgaccccaacctgatcccagaaaatggagatgaggaggaggaggaggatgatgaggaggaggaggaggaggaggaggaggaggaggaggagctgacagagagcgagcgggtggactatggcttcggcctgagcctggaggccgtggtgggcgtgggagatgagagccgggccctgcctgatgtgatgcagggcatggtgctgagctccatgcagcacttcagcgaggccttccaccaggtgctgggggagaagcacaagaggggccacctggccgaggccgagggccaccgggacacctgtgatgaggacagcgtggccggggagagtgacagaattgatgatggcaccgtgaatggccggggctgcagccctggagagagcgccagcggcggcctgagcaagaagctgctgctgggcagccccagcagcctgagccccttcagcaagaggatcaagctggagaaggagtttgacctgcccccagctgccatgcccaacacagaaaatgtgtacagccagtggctggccggctatgctgccagccggcagctgaaggaccccttcctgagctttggagacagccggcagagcccctttgccagcagcagcgagcacagcagtgaaaatggcagcctgcgcttcagcaccccacctggagagctggatggcggcatcagcggccgctctggaactggaagtggcggcagcaccccccacatcagcggccctggccctggccggcccagcagcaaggagggccgccgcagtgacacctgcagcagccacacccccatccgccgcagcacccagagggcccaggatgtgtggcagttcagtgatggcagcagccgggccctgaagttctag

SEQ ID NO: 144853 - DNA, 1329 bp, synthetic construct
  misc_feature 1..1329: note = Description of Artificial Sequence: Synthetic coding sequence
  source 1..1329: mol_type = other DNA
atgtctgcagaatatgccccccagggcatctgcaaggatgagcccagcagctacacctgcaccacctgcaagcagcccttcaccagcgcctggttcctgctgcagcacgcccagaacacccacggcctgcgcatctacctggagagcgagcacggcagccccctgacccccaggagcaacctggtggtgcacagaagaagccacactggagagaagccctacaagtgcaacctgtgtgaccacgcctgcacccaggccagcaagctgaagaggcacatgaagacccacatgcacaagagcagccccatgacagtgaagagtgatgatggcctgagcacagccagcagccctgagcccggcaccagtgacctggtgggcagcgccagcagcgccctgaagtctgtggtggccaagttcaagtcagaaaatgaccccaacctgatcccagaaaatggagatgaggaggaggaggaggatgatgaggaggaggaggaggaggaggaggaggaggaggaggagctgacagaaagtgagcgggtggactatggcttcggcctgagcctggaggccgcccggcaccacgagaacagcagcagaggagctgtggtgggcgtgggagatgagagccgggccctgcctgatgtgatgcagggcatggtgctgagctccatgcagcacttcagcgaggccttccaccaggtgctgggggagaagcacaagaggggccacctggccgaggccgagggccaccgggacacctgtgatgaggacagcgtggccggggagagtgacagaattgatgatggcaccgtgaatggccggggctgcagccctggagagagcgccagcggcggcctgagcaagaagctgctgctgggcagccccagcagcctgagccccttcagcaagaggatcaagctggagaaggagtttgacctgcccccagctgccatgcccaacacagaaaatgtgtacagccagtggctggccggctatgctgccagccggcagctgaaggaccccttcctgagctttggagacagccggcagagcccctttgccagcagcagcgagcacagcagtgaaaatggcagcctgcgcttcagcaccccacctggagagctggatggcggcatcagcggccgctctggaactggaagtggcggcagcaccccccacatcagcggccctggccctggccggcccagcagcaaggagggccgccgcagtgacacctgcagcagccacacccccatccgccgcagcacccagagggcccaggatgtgtggcagttcagtgatggcagcagccgggccctgaagttctag

SEQ ID NO: 144854 - DNA, 2382 bp, synthetic construct
  misc_feature 1..2382: note = Description of Artificial Sequence: Synthetic coding sequence
  source 1..2382: mol_type = other DNA
atgagcaggaggaagcagggcaagccccagcacctgagcaagcgggagttcagccctgagcccctggaggccatcctgacagatgatgagccagaccacggccccctgggcgcccctgagggggaccatgacctgctgacctgtggccagtgccagatgaacttccccctgggggacatcctgatcttcatcgagcacaagaggaagcagtgcaatggcagcctgtgcctggagaaggctgtggacaagccacccagccccagccccatcgagatgaagaaggccagcaaccctgtggaggtgggcatccaggtgaccccagaagatgatgactgcctgagcaccagcagccggggcatctgccccaagcaggagcacatcgccggcaaggatgagcccagcagctacacctgcaccacctgcaagcagcccttcaccagcgcctggttcctgctgcagcacgcccagaacacccacggcctgcgcatctacctggagagcgagcacggcagccccctgaccccccgggtgggcatccccagcggcctgggcgctgagtgccccagccagccccccctgcacggcatccacatcgctgacaacaaccccttcaacctgctgcgcatccctggctctgtgtcccgggaggccagcggcctggccgagggccgcttcccccccaccccacccctcttcagccccccacccaggcaccacctggacccccacagaattgagcggctgggcgctgaggagatggccctggccacccaccaccccagcgcctttgacagagtgctgcggctgaaccccatggccatggagcccccagccatggacttcagccggcggctgcgggagctggccggcaacaccagcagcccccccctgagccctggccggcccagccccatgcagaggctgctgcagcccttccagcccggcagcaagccacccttcctggccaccccacccctgccccccctgcagagcgcccccccacccagccagccccctgtgaagagcaagagctgtgagttctgtgggaagaccttcaagttccagagcaacctggtggtgcaccggcgcagccacactggagagaagccctacaagtgcaacctgtgtgaccacgcctgcacccaggccagcaagctgaagaggcacatgaagacccacatgcacaagagcagccccatgacagtgaagagtgatgatggcctgagcacagccagcagccctgagcccggcaccagtgacctggtgggcagcgccagcagcgccctgaagtctgtggtggccaagttcaagtcagaaaatgaccccaacctgatcccagaaaatggagatgaggaggaggaggaggatgatgaggaggaggaggaggaggaggaggaggaggaggaggagctgacagagagcgagcgggtggactatggcttcggcctgagcctggaggccgcccggcaccacgagaacagcagcagaggagctgtggtgggcgtgggagatgagagccgggccctgcctgatgtgatgcagggcatggtgctgagctccatgcagcacttcagcgaggccttccaccaggtgctgggggagaagcacaagaggggccacctggccgaggccgagggccaccgggacacctgtgatgaagattctgtggccggggagagtgacagaattgatgatggcaccgtgaatggccggggctgcagccctggagagagcgccagcggcggcctgagcaagaagctgctgctgggcagccccagcagcctgagccccttcagcaagaggatcaagctggagaaggagtttgacctgcccccagctgccatgcccaacacagaaaatgtgtacagccagtggctggccggctacgccgccagccggcagctgaaggaccccttcctgagctttggagacagccggcagagcccctttgccagcagcagcgagcacagcagtgaaaatggcagcctgcgcttcagcaccccacctggagagctggatggcggcatcagcggccgcagcggcaccggcagcggcggcagcaccccccacatcagcggccctggccctggccggcccagcagcaaggagggcagaagaagtgacacctgtgagtactgcggcaaggtgttcaagaactgcagcaacctgactgtgcacagaagaagccacactggagagcggccctacaagtgtgagctgtgcaactatgcctgtgcccagagcagcaagctgaccaggcacatgaagacccacggccaggtgctgcacaccccaccatttggagtggtgccccgggagctgaagatgtgtggcagcttcaggatggaggcccgggagcccctgagcagcgagaagatctag

SEQ ID NO: 144855 - DNA, 2472 bp, synthetic construct
  misc_feature 1..2472: note = Description of Artificial Sequence: Synthetic coding sequence
  source 1..2472: mol_type = other DNA
atgagcaggaggaagcagggcaacccccagcacctgagccagcgggagctgatcaccccagaggccgaccacgtggaggccgccatcctggaggaggatgagggcctggagattgaggagcccagcggcctgggcctgatggtgggcggccctgaccctgacctgctgacctgtggccagtgccagatgaacttccccctgggggacatcctggtgttcatcgagcacaagaggaagcagtgtggcggcagcctgggcgcctgctatgacaaggccctggacaaggacagccccccacccagcagccgctctgagctgaggaaggtgtctgagcctgtggagatcggcatccaggtgaccccagatgaagatgaccacctgctgagccccaccaagggcatctgccccaagcaggagaacattgctgggaaggatgagcccagcagctacatctgcaccacctgcaagcagcccttcaacagcgcctggttcctgctgcagcacgcccagaacacccacggcttccgcatctacctggagcccggccctgccagcagcagcctgaccccccggctgaccatccccccacccctgggccctgaggccgtggcccagagccccctgatgaacttcctgggggacagcaaccccttcaacctgctgaggatgacaggccccatcctgcgggaccaccctggctttggagagggccgcctgcccggcaccccacccctcttcagccccccacccaggcaccacctggacccccaccggctgtctgctgaggagatgggcctggtggcccagcaccccagcgcctttgacagagtgatgaggctgaaccccatggccatcgacagccctgccatggacttcagccggcggctgcgggagctggccggcaacagcagcaccccacctcctgtgtccccaggccggggcaaccccatgcaccggctgctgaaccccttccagcccagccccaagagccccttcctgagcaccccacccctgccccccatgcctcctgggggcaccccaccaccccagcccccagccaagagcaagagctgtgagttctgtgggaagaccttcaagttccagagcaacctgattgtgcacagaagaagccacactggagagaagccctacaagtgccagctgtgtgaccacgcctgcagccaggccagcaagctgaagaggcacatgaagacccacatgcacaaggccggcagcctggccggccgcagtgatgatggcctgtctgctgccagcagccctgagcccggcaccagcgagctggccggggagggcctgaaggccgcagatggagacttccgccaccatgaaagtgaccccagcctgggccacgagcctgaggaggaggatgaggaggaggaggaggaggaggaggagctgctgctggagaatgaaagcaggcctgagagcagcttctccatggattctgagctgagcaggaaccgggagaatggaggcggcggcgtgcctggggtgcctggggccggcggcggggccgccaaggccctggctgatgagaaggccctggtgctgggcaaggtgatggagaatgtgggcctgggcgccctgccccagtatggagagctgctggccgacaagcagaagagaggagccttcctgaagagagctgctggaggaggagatgctggagatgatgatgatgctgggggctgtggagatgctggggccggcggcgctgtgaatggccggggcggcggctttgcccctggaacagagcccttccctggcctcttccccaggaagccagcccccctgcccagccctggcctgaacagcgctgccaagaggatcaaggtggagaaggacctggagctgcccccagctgccctgatccccagtgaaaatgtgtacagccagtggctggtgggctatgctgccagccgccacttcatgaaggaccccttcctgggcttcacagatgcccggcagagcccctttgccaccagcagcgagcacagcagtgaaaatggcagcctgcgcttcagcaccccacctggggacctgctggatggcggcctgagcggccgctctggaacagccagcggcggcagcaccccccacctgggcggccctggccctggccggcccagcagcaaggagggccgccgcagtgacacctgtgagtactgtgggaaggtgttcaagaactgcagcaacctgactgtgcaccggcgcagccacactggagagcggccctacaagtgtgagctgtgcaactatgcctgtgcccagagcagcaagctgaccaggcacatgaagacccacggccagatcggcaaggaggtgtaccgctgtgacatctgccagatgcccttctctgtgtacagcaccctggagaagcacatgaagaagtggcacggggagcacctgctgaccaatgatgtgaagattgagcaggccgagaggagctag

SEQ ID NO: 144856 - DNA, 2685 bp, synthetic construct
  misc_feature 1..2685: note = Description of Artificial Sequence: Synthetic coding sequence
  source 1..2685: mol_type = other DNA
atgagcaggaggaagcagggcaacccccagcacctgagccagcgggagctgatcaccccagaggccgaccacgtggaggccgccatcctggaggaggatgagggcctggagattgaggagcccagcggcctgggcctgatggtgggcggccctgaccctgacctgctgacctgtggccagtgccagatgaacttccccctgggggacatcctggtgttcatcgagcacaagaggaagcagtgtggcggcagcctgggcgcctgctatgacaaggccctggacaaggacagccccccacccagcagccgctctgagctgaggaaggtgtctgagcctgtggagatcggcatccaggtgaccccagatgaagatgaccacctgctgagccccaccaagggcatctgccccaagcaggagaacattgctggcccctgcaggcctgcccagctgcctgctgtggcccccatcgccgccagcagccacccccacagcagcgtcatcaccagccccctgcgggccctgggcgccctgcccccctgcctgcccctgccctgctgcagcgcccggcctgtgtctggagatggcacccagggcgagggccagacagaggcccccttcggctgccagtgccagctgagcggcaaggatgagcccagcagctacatctgcaccacctgcaagcagcccttcaacagcgcctggttcctgctgcagcacgcccagaacacccacggcttccgcatctacctggagcccggccctgccagcagcagcctgaccccccggctgaccatccccccacccctgggccctgaggccgtggcccagagccccctgatgaacttcctgggggacagcaaccccttcaacctgctgaggatgacaggccccatcctgcgggaccaccctggctttggagagggccgcctgcccggcaccccacccctcttcagccccccacccaggcaccacctggacccccaccggctgtctgctgaggagatgggcctggtggcccagcaccccagcgcctttgacagagtgatgaggctgaaccccatggccatcgacagccctgccatggacttcagccggcggctgcgggagctggccggcaacagcagcaccccacctcctgtgtccccaggccggggcaaccccatgcaccggctgctgaaccccttccagcccagccccaagagccccttcctgagcaccccacccctgccccccatgcctcctgggggcaccccaccaccccagcccccagccaagagcaagagctgtgagttctgtgggaagaccttcaagttccagagcaacctgattgtgcaccggcgcagccacactggagagaagccctacaagtgccagctgtgtgaccacgcctgcagccaggccagcaagctgaagaggcacatgaagacccacatgcacaaggccggcagcctggccggccgcagtgatgatggcctgtctgctgccagcagccctgagcccggcaccagcgagctggccggggagggcctgaaggctgctgatggagacttccgccaccacgagagtgaccccagcctgggccacgagcctgaggaggaggatgaggaggaggaggaggaggaggaggagctgctgctggagaatgaaagcaggcctgagagcagcttctccatggacagcgagctgagcaggaacagagaaaatggaggcggcggcgtgcctggggtgcctggagctgggggcggggccgccaaggccctggctgatgagaaggccctggtgctgggcaaggtgatggagaatgtgggcctgggcgccctgccccagtacggggagctgctggccgacaagcagaagagaggagccttcctgaagagagctgctggaggaggagatgctggagatgatgatgatgctgggggctgtggagatgctggagctggaggagctgtgaatggccggggcggcggctttgcccctggaacagagcccttccctggcctcttccccaggaagccagcccccctgcccagccctggcctgaacagcgctgccaagaggatcaaggtggagaaggacctggagctgcccccagctgccctgatccccagtgaaaatgtgtacagccagtggctggtgggctacgccgccagccgccacttcatgaaggaccccttcctgggcttcacagatgcccggcagagcccctttgccaccagcagcgagcacagcagtgaaaatggcagcctgcgcttcagcaccccacctggggacctgctggatggcggcctgagcggccgcagcggcacagccagcggcggcagcaccccccacctgggcggccctggccctggccggcccagcagcaaggagggcagaagaagtgacacctgtgagtactgcggcaaggtgttcaagaactgcagcaacctgactgtgcacagaagaagccacactggagagcggccctacaagtgtgagctgtgcaactatgcctgtgcccagagcagcaagctgaccaggcacatgaagacccacggccagatcggcaaggaggtgtaccgctgtgacatctgccagatgcccttctctgtgtacagcaccctggagaagcacatgaagaagtggcatggagagcacctgctgaccaatgatgtgaagattgagcaggccgagaggagctag

SEQ ID NO: 144857 - DNA, 1365 bp, synthetic construct
  misc_feature 1..1365: note = Description of Artificial Sequence: Synthetic coding sequence
  source 1..1365: mol_type = other DNA
atgccccgctgcccagctggggccatggatgagggccctgtggacctgcggacccggcccaaggctgctggcctgcccggggccgccctgcccctgaggaagaggcccctgcgggcccccagccctgagcctgctgcccccagaggagctgctggcctggtggtgcccctggaccccctgcggggcggctgtgacctgcctgctgtgcccggccccccccacggcctggcccggcctgaggccctgtactacccaggggccctgctgcccctgtaccccacccgggccatgggcagccccttccccctggtgaacctgcccacccccctgtaccccatgatgtgccccatggagcaccccctgtctgctgacatcgccatggccaccagggcagatgaagatggagacacccccctgcacatcgctgtggtgcagggcaacctgcctgctgtgcaccggctggtgaacctcttccagcagggcggccgggagctggacatctacaacaacctgcggcagacccccctgcacctggccgtcatcaccaccctgcccagcgtggtgcggctgctggtgacagctggggccagccccatggccctggacagacatggccagacagctgcccacctggcctgtgagcacaggagccccacctgcctgcgggccctgctggacagcgctgcccctggcaccctggacctggaggccaggaactatgatggcctgacagccctgcacgtggccgtgaacacagagtgccaggagaccgtgcagctgctgctggagagaggagctgacattgatgctgtggacatcaagagcggccgcagccccctcatccatgctgtggagaacaacagcctgtccatggtgcagctgctgctgcagcacggggccaacgtgaatgcccagatgtacagcggcagcagcgccctgcacagcgccagcggccggggcctgctgcccctggtgaggaccctggtgcgctctggagctgacagcagcctgaagaactgccacaatgacacccccctgatggtggcccggagccggcgggtgattgacatcctgcggggcaaggccaccaggcctgccagcaccagccagcctgaccccagcccagacagaagtgccaacaccagccctgagagcagcagccggctgagcagcaatggcctgctgagcgccagccccagcagcagccccagccagagccccccccgggaccccccaggcttccccatggccccacccaacttcttcctgcccagccccagccccccagccttcctgccctttgctggggtgctgcggggccctggccggcctgtgccccccagccctgcccctgggggcagctag

SEQ ID NO: 144858 - DNA, 1071 bp, synthetic construct
  misc_feature 1..1071: note = Description of Artificial Sequence: Synthetic coding sequence
  source 1..1071: mol_type = other DNA
atggaggagggccgggagaggaacagatcctggcccccagctgagtgccagagcctgccccgggtgcggctcttcacccccaccaaggaggagacagcccagagaggagaggtgtttggccagggccacccagcccgggccctgctgcccctgtaccccacccgggccatgggcagccccttccccctggtgaacctgcccacccccctgtaccccatgatgtgccccatggagcaccccctgtctgctgacatcgccatggccaccagggcagatgaagatggagacacccccctgcacatcgctgtggtgcagggcaacctgcctgctgtgcaccggctggtgaacctcttccagcagggcggccgggagctggacatctacaacaacctgcggcagacccccctgcacctggccgtcatcaccaccctgcccagcgtggtgcggctgctggtgacagctggggccagccccatggccctggacagacatggccagacagctgcccacctggcctgtgagcacaggagccccacctgcctgcgggccctgctggacagcgctgcccctggcaccctggacctggaggccaggaactatgatggcctgacagccctgcacgtggccgtgaacacagagtgccaggagaccgtgcagctgctgctggagagaggagctgacattgatgctgtggacatcaagagcggccgcagccccctcatccatgctgtggagaacaacagcctgtccatggtgcagctgctgctgcagcacggggccaacgtgaatgcccagatgtacagcggcagcagcgccctgcacagcgccagcggccggggcctgctgcccctggtgaggaccctggtgcgctctggagctgacagcagcctgaagaactgccacaatgacacccccctgatggtggcccggagccggcgggtgtcccggggcagctgtggccacgccccctgcaccagggtgtctgctggctggctgcaggcctctgtgcctgagaggagaggagtgcgggtgtctgtgcccctgcggggcggggagtgggtgtccctgtag

SEQ ID NO: 144859 - DNA, 1440 bp, synthetic construct
  misc_feature 1..1440: note = Description of Artificial Sequence: Synthetic coding sequence
  source 1..1440: mol_type = other DNA
atgggcagccctgctgcccctgagggcgccctgggctacgtgcgggagttcaccaggcacagcagtgatgtgctgggcaacctgaatgagctgcggctgcggggcatcctgacagatgtgaccctgctggtgggcggccagcccctgcgggcccacaaggctgtgctgattgcctgcagcggcttcttctacagcatcttccggggccgggccggcgtgggcgtggatgtgctgagcctgcccggcggccctgaggcccggggctttgcccccctgctggacttcatgtacaccagccggctgcggctgagccctgccacagccccagctgtgctggccgccgccacctacctgcagatggagcacgtggtgcaggcctgccaccgcttcatccaggccagctatgagcccctgggcatcagcctgcggcccctggaggccgagccccccaccccacccacagcccctcctcctggcagcccccggcgctctgagggccacccagaccccccaacagagagccgcagctgcagccagggcccccccagccctgccagcccagaccccaaggcctgcaactggaagaagtacaagtacatcgtgctgaacagccaggccagccaggccggcagcctggtgggggagaggagcagcggccagccctgcccccaggcccggctgcccagcggagatgaggccagcagcagcagcagcagcagcagcagcagcagcgaggagggccccatccctggcccccagagccggctgagccccacagctgccaccgtgcagttcaagtgtggggccccagccagcaccccctacctgctgaccagccaggcccaggacaccagcggcagccccagcgagcgggcccggcccctgcccggcagcgagttcttcagctgccagaactgtgaggccgtggccggctgcagcagcggcctggacagcctggtgcctggagatgaggacaagccctacaagtgccagctgtgccgcagcagcttccgctacaagggcaacctggccagccacaggacagtgcacactggagagaagccctaccactgcagcatctgtggggcccgcttcaacagacctgccaacctgaagacccacagccgcatccacagcggggagaagccctacaagtgtgagacctgtggcagcagatttgtgcaggtggcccacctgcgggcccacgtgctgatccacactggagagaagccctacccctgccccacctgtggcacccgcttccgccacctgcagaccctgaagagccacgtgcgcatccacactggagagaagccctaccactgtgacccctgtggcctgcacttccgccacaagagccagctgcggctgcacctgcggcagaagcatggagctgccaccaacaccaaggtgcactaccacatcctgggcggcccctag

SEQ ID NO: 144860 - DNA, 129 bp, synthetic construct
  misc_feature 1..129: note = Description of Artificial Sequence: Synthetic coding sequence
  source 1..129: mol_type = other DNA
atccacactggagagaagccctacccctgccccacctgtggcacccgcttccgccacctgcagaccctgaagagccacgtgcgcatccacactggagagaagccctaccacgagcctgtgaccagctag

SEQ ID NO: 144861 - DNA, 633 bp, synthetic construct
  misc_feature 1..633: note = Description of Artificial Sequence: Synthetic coding sequence
  source 1..633: mol_type = other DNA
atgagcggccgctctgtgcgggcagagaccaggagccgggccaaggatgacatcaagagggtgatggccgccatcgagaaggtgaggaagtgggagaagaagtgggtgacagtgggggacaccagcctgcgcatctacaagtgggtgcctgtgacagagcccaaggtggatgacaagaacaagaacaagaagaagggcaaggatgagaagtgtggcagcgaggtgaccaccccagagaacagcagcagccctggcatgatggacatgcatgatgacaacagcaaccagagcagcattgctgatgccagccccatcaagcaggagaacagcagcaacagcagccctgcccctgagcccaacagcgctgtgcccagtgatggaacagaggccaaggtggatgaggcccaggctgatggcaaggagcaccctggagcagaagatgccagtgatgagcagaacagccagagctccatggagcacagcatgaacagcagcgagaaggtggaccggcagcccagcggggacagcggcctggccgctgagaccagcgccatcagccaggacctggagggcgtgccccccagcaagaagatgaagctggaggccagccagcagaacagcgaggagatgtag

SEQ ID NO: 144862 - DNA, 696 bp, synthetic construct
  misc_feature 1..696: note = Description of Artificial Sequence: Synthetic coding sequence
  source 1..696: mol_type = other DNA
atgagcggccgctctgtgcgggcagagaccaggagccgggccaaggatgacatcaagagggtgatggccgccatcgagaaggtgaggaagtgggagaagaagtgggtgacagtgggggacaccagcctgcgcatctacaagtgggtgcctgtgacagagcccaaggtggatgacaagaacaagaacaagaagaagggcaaggatgagaagtgtggcagcgaggtgaccaccccagagaacagcagcagccctggcatgatggacatgcatgatgacaacagcaaccagagcagcattgctgatgccagccccatcaagcaggagaacagcagcaacagcagccctgcccctgagcccaacagcgctgtgcccagtgatggaacagaggccaaggtggatgaggcccaggctgatggcaaggagcaccctggagcagaagatgccagtgatgagcagaacagccagagctccatggagcacagcatgaacagcagcgagaaggtggaccggcagcccagcggggacagcggcctggccgctgagaccagcgccatcagccaggtgcccaggagccgcagccagaggggcagccagatcggccgggagcccatcggcctgagcggggacctggagggcgtgccccccagcaagaagatgaagctggaggccagccagcagaacagcgaggagatgtag

SEQ ID NO: 144863 - DNA, 528 bp, synthetic construct
  misc_feature 1..528: note = Description of Artificial Sequence: Synthetic coding sequence
  source 1..528: mol_type = other DNA
atggccagcaggaaggccggcacccggggcaaggtggccgccaccaagcaggcccagaggggcagcagcaatgtgttctccatgtttgagcaggcccagatccaggagttcaaggaggccttcagctgcatcgaccagaacagagatggcatcatctgcaaggctgacctgcgggagacctacagccagctgggcaaggtgtctgtgcctgaggaggagctggatgccatgctgcaggagggcaagggccccatcaacttcaccgtcttcctgaccctgtttggagagaagctgaatggaacagatcctgaggaggccatcctgagcgccttcaggatgtttgaccccagcgggaaaggagtggtgaacaaggatgagttcaagcagctgctgctgacccaggccgacaagttcagccctgctgaggtggagcagatgtttgccctgacccccatggacctggccggcaacatcgactacaagagcctgtgctacatcatcacccatggagatgagaaggaggagtag

SEQ ID NO: 144864 - DNA, 438 bp, synthetic construct
  misc_feature 1..438: note = Description of Artificial Sequence: Synthetic coding sequence
  source 1..438: mol_type = other DNA
atgagcggccgctctgtgcgggcagagaccaggagccgggccaaggatgacatcaagaaggtgatggccgccatcgagaaggtgaggaagtgggagaagaagtgggtgacagtgggggacaccagcctgcgcatcttcaagtgggtgcctgtgacagacagcaaggagaaggagaagagcaagagcaacagcagcgctgcccgggagcccaacggcttccccagtgatgccagcgccaacagcagcctgctgctggagttccaggagcccagcctgcccagcagcgaggtggctgatgagccccccaccctgaccaaggaggagcctgtgcccctggagacccaggtggtggaggaggaggaggacagcggggccccacccctgaagcgcttctgtgtggaccagcccaccgtgccccagacagccagcgagagctag

SEQ ID NO: 144865 - DNA, 867 bp, synthetic construct
  misc_feature 1..867: note = Description of Artificial Sequence: Synthetic coding sequence
  source 1..867: mol_type = other DNA
atgaaggacaggacccaggagctgcggagcgccaaggacagtgatgatgaggaggaggtggtgcacgtggaccgggaccacttcatggatgagttctttgagcaggtggaggagatccggggctgcatcgagaagctgtctgaagatgtggagcaggtgaagaagcagcacagcgccatcctggccgcccccaacccagatgagaagaccaagcaggagctggaggacctgacagctgacatcaagaagacagccaacaaggtgcgcagcaagctgaaggccatcgagcagagcattgagcaggaggagggcctgaacagaagcagcgctgacctgcgcatcaggaagacccagcacagcaccctgagcaggaagtttgtggaggtgatgacagagtacaatgccacccagagcaagtacagagaccgctgcaaggaccgcatccagaggcagctggagatcactggaagaaccaccaccaatgaggagctggaggacatgctggagagcggcaagctggccatcttcacagatgacatcaagatggacagccagatgaccaagcaggccctgaatgaaattgagaccaggcacaatgagatcatcaagctggagaccagcatccgggagctgcatgacatgtttgtggacatggccatgctggtggagagccagggcgagatgattgaccgcatcgagtacaacgtggagcacagcgtggactatgtggagagagctgtgtctgacaccaagaaggctgtgaagtaccagagcaaggcccggaggaagaagatcatgatcatcatctgctgcgtggtgctgggcgtggtgctggccagcagcatcggcggcaccctgggcctgtag

SEQ ID NO: 144866 - DNA, 729 bp, synthetic construct
  misc_feature 1..729: note = Description of Artificial Sequence: Synthetic coding sequence
  source 1..729: mol_type = other DNA
atggccggccgcacagtgcgggcagagaccaggagccgggccaaggatgacatcaagaaggtgatggccaccatcgagaaggtgcggcgctgggagaagcgctgggtgacagtgggggacaccagcctgcgcatcttcaagtgggtgcctgtggtggacccccaggaggaggagcggcggcgggccggcggcggcgctgagaggagccggggccgggagcggcggggccgcggggccagcccccggggcggcggccccctcatcctgctggacctgaatgatgagaacagcaaccagagcttccacagcgagggcagcctgcagaagggcacagagcccagccctgggggcaccccccagcccagcaggcctgtgtccccagctggccccccagagggcgtgcctgaggaggcccagcccccccggctgggccaggagcgggaccccggcggcatcacagctggcagcacagatgagccccccatgctgaccaaggaggagcctgtgcctgagctgctggaggccgaggacagcggcgtgaggatgacccggcgggccctgcacgagaagggcctgaagacagagcccctgcggcggctgctgccccggcggggcctgcggaccaacgtgcggcccagctccatggctgtgcctgacacccgggcccctgggggcggcagcaaggccccccgggcccccaggaccatcccccagggcaagggccgctag

SEQ ID NO: 144867 - DNA, 1680 bp, synthetic construct
  misc_feature 1..1680: note = Description of Artificial Sequence: Synthetic coding sequence
  source 1..1680: mol_type = other DNA
atgcacagcttcatccatgctgccatgggcatggtgatggcctggtgtgccgccgtcatcacccagggccagtacagcttcctggtggtgccctgcaccggcaccaacagctttggcagccctgctgcccagacctgcctgaatgagtaccacctgttcttcctgctgactggagccttcatgggctacagctacagcctgctgtactttgtgaacaacatgaactacctgcccttccccatcatccagcagtacaagttcctgcgcttcagaagaagcctgctgctgctggtgaagcacagctgtgtggagagcctcttcctggtgaggaacttctgcatcctgtactacttcctgggctacatccccaaggcctggatcagcacagccatgaacctgcacattgatgagcaggtgcaccggcccctggacacagtgtctggcctgctgaacctgagcctgctgtaccacgtgtggctgtgtggggtcttcctgctgaccacctggtacgtgtcctggatcctcttcaagatctatgccacagaggcccacgtgtttcctgtgcagcccccatttgctgagggcagtgatgagtgcctgcccaaggtgctgaacagcaaccccccacccatcatcaagtacctggccctgcaggacctgatgctgctgagccagtacagccccagccggcggcaggaggtgttcagcctgagccagcccggcggccacccccacaactggacagccatcagcagagaatgtctgaacctgctgaatggcatgacccagaagctgatcctgtaccaggaggccgccgccaccaacggccgggtgagcagcagctaccctgtggagcccaagaagctgaacagccctgaggagacagccttccagacccccaagagcagccagatgccccggcccagcgtgccccccctggtgaagaccagcctcttcagcagcaagctgagcaccccagatgtggtgagccccttcggcacccccttcggcagctctgtgatgaacaggatggccggcatctttgatgtgaacacctgctacggcagcccccagagcccccagctgatccggcggggcccccggctgtggaccagcgccagtgaccagcagatgacagagttcagcaaccccagccccagcaccagcatctctgctgagggcaagaccatgaggcagcccagcgtcatctacagctggatccagaacaagcgggagcagatcaagaacttcctgagcaagagggtgctgatcatgtacttcttcagcaagcaccctgaggccagcatccaggccgtgttcagtgatgcccagatgcacatctgggccctggagggcctgagccacctggtggccgccagcttcacagaagatcgcttcggcgtggtgcagaccaccctgcctgccatcctgaacaccctgctgaccctgcaggaggccgtggacaagtacttcaagctgccccacgccagcagcaagccaccccgcatcagcggcagcctggtggacaccagctacaagaccctgcgctttgccttccgggccagcctgaagacagccatctaccgcatcaccaccaccttcggggagcacctgaatgctgtgcaggccagcgctgagcaccagaagaggctgcagcagttcctggagttcaaggagtag

SEQ ID NO: 144868 - DNA, 4500 bp, synthetic construct
  misc_feature 1..4500: note = Description of Artificial Sequence: Synthetic coding sequence
  source 1..4500: mol_type = other DNA
atgaggatcctggccaacaagacccggctgccccaccccaggagaagagaggcccctggcagcccccccctgagcccccggggccactgccccccagccccagccaagcccatgcaccctgagaacaagctgaccaaccacggcaagacaggaaatggaggagcccagagccagcaccagaatgtgaaccagggccccacctgcaatgtgggcagcaaaggagtgggcgccggcaaccacggggccaaggccaaccagatcagccccagcaacagcagcctgaagaacccccaggccggcgtgccccccttcagcagcctgaagggcaaggtgaagagggacagatctgtgtctgtggacagcggggagcagcgggaggccggcacccccagcctggacagcgaggccaaggaggtggcccccaggagcaagagaagatgtgtgctggagaggaagcagccctacagcggagatgagtggtgcagcggccctgacagcgaggaggatgacaagcccatcggggccacccacaactgcaatgtggccgaccctgccatggccgccccccagctgggccctggccagaccacccagctgcccctgtctgagagctctgtgcctggggcccctcatggccccccacctggcctgcggccagatgcccctgggggcggcggcggcggcggcggcgtgcctgggaagccacccagccagtttgtgtatgtgttcaccacccacctggccaacacagctgctgaggccgtgctgcagggccgggctgacagcatcctggcctaccaccagcagaatgtgccccgggccaagctggaccaggcccccaaggtgccccccaccccagagcccctgcccctgagcaccccatctgctggcaccccccagagccagcccccacccctgcccccacctcctcctccagcccctggcagcgcccccccagccctgcccccagagggccccccagaggacagcagccaggacctggcccccaacagcgtgggcgccgccagcactggaggcggcaccggcggcacccaccccaacacccccacagccaccacagccaacaaccccctgcccccaggaggagaccccagcagcgcccctggccctgccctgctgggggaggccgccgcccctggaaatggccagaggagcctggtgggcagcgagggcctgagcaaggagcagctggagcaccgggagaggagcctgcagaccctgcgggacatcgagcggctgctgctgcggagcggggagacagagcccttcctgaagggccccccaggaggagctggggagggcggccccccagcccaggcccctcctccaccccagcagcccccaacagccccacccagcggcctgaagaagtatgaggagcccctgcagagcatgatcagccagacccagagcctgggcggcccccccctggagcacgaggtgcccggccaccccccaggaggagacatgggccagcagatgaacatgatgatccagaggctgggccaggacagcctgaccccagagcaggtggcctggaggaagctgcaggaggagtactatgaggagaagaggaggaaggaggagcagatcggcctgcacggcagccggcccctgcaggacatgatgggcatgggcggcatgatggtgcggggccccccaccaccctaccacagcaagccaggggaccagtggcccccaggcatgggcgcccagctgcggggccccatggatgtgcaggaccccatgcagctgcggggcggcccccccttccctggcccccgcttccctggcaaccagatccagagggtgcccggctttggaggcatgcagagcatgcccatggaggtgcccatgaatgccatgcagaggcctgtgcggcccggcatgggctggacagaggacctgccccccatgggcggccccagcaactttgcccagaacaccatgccctacccaggcggccagggcgaggccgagcgcttcatgaccccccgggtgcgggaggagctgctgcggcaccagctgctggagaagaggtccatgggcatgcagaggcccctgggcatggccggcagcggcatgggccagagcatggagatggagaggatgatgcaggcccaccggcagatggaccctgccatgtttcctggccagatggccggcggggagggcctggccggcacccccatgggcatggagtttggaggcggccggggcctgctgagcccccccatgggccagagcggcctgcgggaggtggacccccccatgggccctggcaacctgaacatgaacatgaatgtgaacatgaacatgaacatgaacctgaatgtgcagatgaccccccagcagcagatgctgatgagccagaagatgaggggccctggggacctgatgggcccccagggcctgagccctgaggagatggcccgggtgcgggcccagaacagcagcggcgtgatgggcggcccccagaagatgctgatgcccagccagttccccaaccagggccagcagggcttcagcggcggccagggcccctaccaggccatgagccaggacatgggcaacacccaggacatgttctccccagaccagagctccatgcccatgagcaatgtgggcaccacccggctgagccacatgcccctgcccccagccagcaaccccccaggcaccgtgcacagcgcccccaacagaggcctgggccggcggcccagcgacctgaccatcagcatcaaccagatgggcagccctggcatgggccacctgaagagccccaccctgagccaggtgcacagccccctggtgaccagccccagcgccaacctgaagagcccccagacccccagccagatggtgcccctgcccagcgccaaccccccaggccccctgaagagcccccaggtgctgggcagcagcctgtctgtgcgcagccccaccggcagccccagccggctgaagagccccagcatggctgtgcccagccctggctgggtggccagccccaagacagccatgcccagccctggggtgtcccagaacaagcagccccccctgaacatgaacagcagcaccaccctgagcaacatggagcagggcaccctgcccccatctggccccaggagcagcagcagcgcccccccagccaacccccccagcggcctgatgaaccccagcctgcccttcaccagcagcccagaccccacccccagccagaaccccctgagcctgatgatgacccagatgagcaaatatgccatgcccagcagcacccccctgtaccacaatgccatcaagaccatcgccaccagtgatgatgagctgctgcctgaccggcccctgctgcccccacctcctccaccccagggcagcggccctggcatcagcaacagccagcccagccagatgcacctgaacagcgctgctgcccagagccccatgggcatgaacctgcccggccagcagcccctgagccatgagcccccaccagccatgctgcccagccccacccccctgggcagcaacatccccctgcaccccaatgcccagggcaccggcggccccccccagaacagcatgatgatggcccctgggggccctgacagcctgaatgccccctgtggccctgtgcccagcagcagccagatgatgcccttccccccccggctgcagcagccccacggggccatggcccccaccggcggcggcggcggcggccctggcctgcagcagcactaccccagcggcatggccctgcccccagaggacctgcccaaccagcccccaggccccatgccaccccagcagcacctgatgggcaaggccatggccggccgcatgggagatgcctacccacctggggtgctgcccggggtggcctctgtgctgaatgaccctgagctgtctgaggtgatccggcccacccccaccggcatccctgagtttgacctgagccgcatcatccccagcgagaagcccagcagcaccctgcagtacttccccaagtctgagaaccagccccccaaggcccagccccccaacctgcacctgatgaacctgcagaacatgatggccgagcagacccccagccggccccccaacctgcccggccagcagggcgtgcagaggggcctgaacatgtccatgtgccaccctggccagatgagcctgctgggccgcactggagtgcccccccagcagggcatggtgccccacggcctgcaccagggcgtgatgagccccccccagggcctgatgacccagcagaacttcatgctgatgaagcagaggggcgtgggcggggaggtgtacagccagcccccccacatgctgagcccccagggcagcctgatgggccccccaccccagcagaacctgatggtgagccaccccctgcggcagaggtctgtgtccctggacagccagatgggctacctgcctgcccctgggggcatggccaacctgcccttctag

SEQ ID NO: 144869 - DNA, 4188 bp, synthetic construct
  misc_feature 1..4188: note = Description of Artificial Sequence: Synthetic coding sequence
  source 1..4188: mol_type = other DNA
atgaggatcctggccaacaagacccggctgccccaccccaggagaagagaggcccctggcagcccccccctgagcccccggggccactgccccccagccccagccaagcccatgcaccctgagaacaagctgaccaaccacggcaagacaggaaatggaggagcccagagccagcaccagaatgtgaaccagggccccacctgcaatgtgggcagcaaaggagtgggcgccggcaaccacggggccaaggccaaccagatcagccccagcaacagcagcctgaagaacccccaggccggcgtgccccccttcagcagcctgaagggcaaggtgaagagggacagatctgtgtctgtggacagcggggagcagcgggaggccggcacccccagcctggacagcgaggccaaggaggtggcccccaggagcaagagaagatgtgtgctggagaggaagcagccctacagcggagatgagtggtgcagcggccctgacagcgaggaggatgacaagcccatcggggccacccacaactgcaatgtggccgaccctgccatggccgccccccagctgggccctggccagaccacccagctgcccctgtctgagagctctgtgcctggggcccctcatggccccccacctggcctgcggccagatgcccctgggggcggcggcggcggcggcggcgtgcctgggaagccacccagccagtttgtgtatgtgttcaccacccacctggccaacacagctgctgaggccgtgctgcagggccgggctgacagcatcctggcctaccaccagcagaatgtgccccgggccaagctggaccaggcccccaaggtgccccccaccccagagcccctgcccctgagcaccccatctgctggcaccccccagagccagcccccacccctgcccccacctcctcctccagcccctggcagcgcccccccagccctgcccccagagggccccccagaggacagcagccaggacctggcccccaacagcgtgggcgccgccagcactggaggcggcaccggcggcacccaccccaacacccccacagccaccacagccaacaaccccctgcccccaggaggagaccccagcagcgcccctggccctgccctgctgggggaggccgccgcccctggaaatggccagaggagcctggtgggcagcgagggcctgagcaaggagcagctggagcaccgggagaggagcctgcagaccctgcgggacatcgagcggctgctgctgcggagcggggagacagagcccttcctgaagggccccccaggaggagctggggagggcggccccccagcccaggcccctcctccaccccagcagcccccaacagccccacccagcggcctgaagaagtatgaggagcccctgcagagcatgatcagccagacccagagcctgggcggcccccccctggagcacgaggtgcccggccaccccccaggaggagacatgggccagcagatgaacatgatgatccagaggctgggccaggacagcctgaccccagagcaggtggcctggaggaagctgcaggaggagtactatgaggagaagaggaggaaggaggagcagatcggcctgcacggcagccggcccctgcaggacatgatgggcatgggcggcatgatggtgcggggccccccaccaccctaccacagcaagccaggggaccagtggcccccaggcatgggcgcccagctgcggggccccatggatgtgcaggaccccatgcagctgcggggcggcccccccttccctggcccccgcttccctggcaaccagatccagagggtgcccggctttggaggcatgcagagcatgcccatggaggtgcccatgaatgccatgcagaggcctgtgcggcccggcatgggctggacagaggacctgccccccatgggcggccccagcaactttgcccagaacaccatgccctacccaggcggccagggcgaggccgagcgcttcatgaccccccgggtgcgggaggagctgctgcggcaccagctgctggagaagaggtccatgggcatgcagaggcccctgggcatggccggcagcggcatgggccagagcatggagatggagaggatgatgcaggcccaccggcagatggaccctgccatgtttcctggccagatggccggcggggagggcctggccggcacccccatgggcatggagtttggaggcggccggggcctgctgagcccccccatgggccagagcggcctgcgggaggtggacccccccatgggccctggcaacctgaacatgaacatgaatgtgaacatgaacatgaacatgaacctgaatgtgcagatgaccccccagcagcagatgctgatgagccagaagatgaggggccctggggacctgatgggcccccagggcctgagccctgaggagatggcccgggtgcgggcccagaacagcagcggcgtgatgggcggcccccagaagatgctgatgcccagccagttccccaaccagggccagcagggcttcagcggcggccagggcccctaccaggccatgagccaggacatgggcaacacccaggacatgttctccccagaccagagctccatgcccatgagcaatgtgggcaccacccggctgagccacatgcccctgcccccagccagcaaccccccaggcaccgtgcacagcgcccccaacagaggcctgggccggcggcccagcgacctgaccatcagcatcaaccagatgggcagccctggcatgggccacctgaagagccccaccctgagccaggtgcacagccccctggtgaccagccccagcgccaacctgaagagcccccagacccccagccagatggtgcccctgcccagcgccaaccccccaggccccctgaagagcccccaggtgctgggcagcagcctgtctgtgcgcagccccaccggcagccccagccggctgaagagccccagcatggctgtgcccagccctggctgggtggccagccccaagacagccatgcccagccctggggtgtcccagaacaagcagccccccctgaacatgaacagcagcaccaccctgagcaacatggagcagggcaccctgcccccatctggccccaggagcagcagcagcgcccccccagccaacccccccagcggcctgatgaaccccagcctgcccttcaccagcagcccagaccccacccccagccagaaccccctgagcctgatgatgacccagatgagcaaatatgccatgcccagcagcacccccctgtaccacaatgccatcaagaccatcgccaccagtgatgatgagctgctgcctgaccggcccctgctgcccccacctcctccaccccagggcagcggccctggcatcagcaacagccagcccagccagatgcacctgaacagcgctgctgcccagagccccatgggcatgaacctgcccggccagcagcccctgagccatgagcccccaccagccatgctgcccagccccacccccctgggcagcaacatccccctgcaccccaatgcccagggcaccggcggccccccccagaacagcatgatgatggcccctgggggccctgacagcctgaatgccccctgtggccctgtgcccagcagcagccagatgatgcccttccccccccggctgcagcagccccacggggccatggcccccaccggcggcggcggcggcggccctggcctgcagcagcactaccccagcggcatggccctgcccccagaggacctgcccaaccagcccccaggccccatgccaccccagcagcacctgatgggcaaggccatggccggccgcatgggagatgcctacccacctggggtgctgcccggggtggcctctgtgctgaatgaccctgagctgtctgaggtgatccggcccacccccaccggcatccctgagtttgacctgagccgcatcatccccagcgagttcctgcggacccggcccttctccttctgcctgtacctgctgcgcatcctgagcctgctgatgtggctgacccccctgccccccctgcctgctgggggctggccaggcggccaggtgcctgctggagctgtgaacagagccctgcgcttctgtgccggcctgtgtgtgtgctgcatctctgtgttctag

SEQ ID NO: 144870 - DNA, 4365 bp, synthetic construct
  misc_feature 1..4365: note = Description of Artificial Sequence: Synthetic coding sequence
  source 1..4365: mol_type = other DNA
atgaggatcctggccaacaagacccggctgccccaccccaggagaagagaggcccctggcagcccccccctgagcccccggggccactgccccccagccccagccaagcccatgcaccctgagaacaagctgaccaaccacggcaagacaggaaatggaggagcccagagccagcaccagaatgtgaaccagggccccacctgcaatgtgggcagcaaaggagtgggcgccggcaaccacggggccaaggccaaccagatcagccccagcaacagcagcctgaagaacccccaggccggcgtgccccccttcagcagcctgaagggcaaggtgaagagggacagatctgtgtctgtggacagcggggagcagcgggaggccggcacccccagcctggacagcgaggccaaggaggtggcccccaggagcaagagaagatgtgtgctggagaggaagcagccctacagcggagatgagtggtgcagcggccctgacagcgaggaggatgacaagcccatcggggccacccacaactgcaatgtggccgaccctgccatggccgccccccagctgggccctggccagaccacccagctgcccctgtctgagagctctgtgcctggggcccctcatggccccccacctggcctgcggccagatgcccctgggggcggcggcggcggcggcggcgtgcctgggaagccacccagccagtttgtgtatgtgttcaccacccacctggccaacacagctgctgaggccgtgctgcagggccgggctgacagcatcctggcctaccaccagcagaatgtgccccgggccaagctggaccaggcccccaaggtgccccccaccccagagcccctgcccctgagcaccccatctgctggcaccccccagagccagcccccacccctgcccccacctcctcctccagcccctggcagcgcccccccagccctgcccccagagggccccccagaggacagcagccaggacctggcccccaacagcgtgggcgccgccagcactggaggcggcaccggcggcacccaccccaacacccccacagccaccacagccaacaaccccctgcccccaggaggagaccccagcagcgcccctggccctgccctgctgggggaggccgccgcccctggaaatggccagaggagcctggtgggcagcgagggcctgagcaaggagcagctggagcaccgggagaggagcctgcagaccctgcgggacatcgagcggctgctgctgcggagcggggagacagagcccttcctgaagggccccccaggaggagctggggagggcggccccccagcccaggcccctcctccaccccagcagcccccaacagccccacccagcggcctgaagaagtatgaggagcccctgcagagcatgatcagccagacccagagcctgggcggcccccccctggagcacgaggtgcccggccaccccccaggaggagacatgggccagcagatgaacatgatgatccagaggctgggccaggacagcctgaccccagagcaggtggcctggaggaagctgcaggaggagtactatgaggagaagaggaggaaggaggagcagatcggcctgcacggcagccggcccctgcaggacatgatgggcatgggcggcatgatggtgcggggccccccaccaccctaccacagcaagccaggggaccagtggcccccaggcatgggcgcccagctgcggggccccatggatgtgcaggaccccatgcagctgcggggcggcccccccttccctggcccccgcttccctggcaaccagatccagagggtgcccggctttggaggcatgcagagcatgcccatggaggtgcccatgaatgccatgcagaggcctgtgcggcccggcatgggctggacagaggacctgccccccatgggcggccccagcaactttgcccagaacaccatgccctacccaggcggccagggcgaggccgagcgcttcatgaccccccgggtgcgggaggagctgctgcggcaccagctgctggagaagaggtccatgggcatgcagaggcccctgggcatggccggcagcggcatgggccagagcatggagatggagaggatgatgcaggcccaccggcagatggaccctgccatgtttcctggccagatggccggcggggagggcctggccggcacccccatgggcatggagtttggaggcggccggggcctgctgagcccccccatgggccagagcggcctgcgggaggtggacccccccatgggccctggcaacctgaacatgaacatgaatgtgaacatgaacatgaacatgaacctgaatgtgcagatgaccccccagcagcagatgctgatgagccagaagatgaggggccctggggacctgatgggcccccagggcctgagccctgaggagatggcccgggtgcgggcccagaacagcagcggcgtgatgggcggcccccagaagatgctgatgcccagccagttccccaaccagggccagcagggcttcagcggcggccagggcccctaccaggccatgagccaggacatgggcaacacccaggacatgttctccccagaccagagctccatgcccatgagcaatgtgggcaccacccggctgagccacatgcccctgcccccagccagcaaccccccaggcaccgtgcacagcgcccccaacagaggcctgggccggcggcccagcgacctgaccatcagcatcaaccagatgggcagccctggcatgggccacctgaagagccccaccctgagccaggtgcacagccccctggtgaccagccccagcgccaacctgaagagcccccagacccccagccagatggtgcccctgcccagcgccaaccccccaggccccctgaagagcccccaggtgctgggcagcagcctgtctgtgcgcagccccaccggcagccccagccggctgaagagccccagcatggctgtgcccagccctggctgggtggccagccccaagacagccatgcccagccctggggtgtcccagaacaagcagccccccctgaacatgaacagcagcaccaccctgagcaacatggagcagggcaccctgcccccatctggccccaggagcagcagcagcgcccccccagccaacccccccagcggcctgatgaaccccagcctgcccttcaccagcagcccagaccccacccccagccagaaccccctgagcctgatgatgacccagatgagcaaatatgccatgcccagcagcacccccctgtaccacaatgccatcaagaccatcgccaccagtgatgatgagctgctgcctgaccggcccctgctgcccccacctcctccaccccagggcagcggccctggcatcagcaacagccagcccagccagatgcacctgaacagcgctgctgcccagagccccatgggcatgaacctgcccggccagcagcccctgagccatgagcccccaccagccatgctgcccagccccacccccctgggcagcaacatccccctgcaccccaatgcccagggcaccggcggccccccccagaacagcatgatgatggcccctgggggccctgacagcctgaatgccccctgtggccctgtgcccagcagcagccagatgatgcccttccccccccggctgcagcagccccacggggccatgatggccggccgcatgggagatgcctacccacctggggtgctgcccggggtggcctctgtgctgaatgaccctgagctgtctgaggtgatccggcccacccccaccggcatccctgagtttgacctgagccgcatcatccccagcgagaagcccagcagcaccctgcagtacttccccaagtctgagaaccagccccccaaggcccagccccccaacctgcacctgatgaacctgcagaacatgatggccgagcagacccccagcaggcctcccaacctgcccggccagcagggcgtgcagaggggcctgaacatgtccatgtgccaccctggccagatgagcctgctgggccgcactggagtgcccccccagcagggcatggtgccccacggcctgcaccagggcgtgatgagccccccccagggcctgatgacccagcagaacttcatgctgatgaagcagaggggcgtgggcggggaggtgtacagccagcccccccacatgctgagcccccagggcagcctgatgggccccccaccccagcagaacctgatggtgagccaccccctgcggcagaggtctgtgtccctggacagccagatgggctacctgcctgcccctgggggcatggccaacctgcccttctag

SEQ ID NO: 144871 - DNA, 1401 bp, synthetic construct
  misc_feature 1..1401: note = Description of Artificial Sequence: Synthetic coding sequence
  source 1..1401: mol_type = other DNA
atgagcaccaggtctgtgagcagcagcagctacagaaggatgtttggaggccctggaacagccagccggcccagcagcagccgctcctatgtgaccaccagcaccaggacctacagcctgggcagcgccctgcggcccagcaccagccgcagcctgtatgccagcagccctggaggagtgtatgccaccaggagcagcgctgtgcggctgcggagctctgtgcctggggtgcggctgctgcaggacagcgtggacttcagcctggctgatgccatcaacacagagttcaagaacaccaggaccaatgagaaggtggagctgcaggagctgaatgacagatttgccaactacatcgacaaggtgcgcttcctggagcagcagaacaagatcctgctggccgagctggagcagctgaagggccagggcaagagccggctgggggacctgtatgaggaggagatgagggagctgcggcggcaggtggaccagctgaccaatgacaaggcccgggtggaggtggagcgggacaacctggccgaggacatcatgaggctgcgggagaagctgcaggaggagatgctgcagcgggaggaggccgagaacaccctgcagagcttccggcaggatgtggacaatgccagcctggcccggctggacctggagaggaaggtggagagcctgcaggaggagatcgccttcctgaagaagctgcacgaggaggagatccaggagctgcaggcccagatccaggagcagcacgtgcagattgatgtggatgtgtccaagccagacctgacagctgccctgagagatgtgcggcagcagtatgagagcgtggccgccaagaacctgcaggaggccgaggagtggtacaagagcaagtttgctgacctgtctgaggccgccaacagaaataatgatgccctgcggcaggccaagcaggagagcacagagtaccgccggcaggtgcagagcctgacctgtgaggtggatgccctgaagggcaccaatgaaagcctggagcggcagatgagggagatggaggagaactttgctgtggaggccgccaactaccaggacaccatcggccgcctgcaggatgagatccagaacatgaaggaggagatggcccggcacctgcgggagtaccaggacctgctgaatgtgaagatggccctggacattgaaattgccacctacaggaagctgctggagggggaggagagccgcatcagcctgcccctgcccaacttcagcagcctgaacctgcgggagaccaacctggacagcctgcccctggtggacacccacagcaagaggaccctgctgatcaagacagtggagaccagagatggccaggtgatcaatgagaccagccagcaccatgatgacctggagtag

SEQ ID NO: 144872 - DNA, 1302 bp, synthetic construct
  misc_feature 1..1302: note = Description of Artificial Sequence: Synthetic coding sequence
  source 1..1302: mol_type = other DNA
atggacaagctgaacaagatcaccgtgcctgccagccagaagctgcggcagctgcagaagatggtgcatgacatcaagaacaatgaaggaggcatcatgaacaagatcaagaagctgaaggtgaaggccccacccagcgtgccccggcgggactatgccagcgagagccctgcagatgaggaggagcagtggagcgatgactttgacagcgactatgaaaatccagatgagcacagcgacagcgagatgtatgtgatgcctgctgaggagaatgctgatgacagctatgagcccccacctgtggagcaggagaccaggcctgtgcacccagccctgccctttgcccggggggagtacatcgacaacagaagcagccagaggcacagcccccccttcagcaagaccctgcccagcaagcccagctggcccagcgagaaggcccggctgaccagcaccctgcctgccctgacagccctgcagaagccccaggtgccccccaagcccaagggcctgctggaggatgaggccgactatgtggtgcctgtggaggacaatgatgagaactacatccaccccacagagagcagcagccccccacctgagaagggcaggaacagcggggcctgggagaccaagagccccccacctgctgcccccagccccctgcccagggctgggaagaagcccaccacccccctgaagaccacccctgtggccagccagcagaatgccagctctgtgtgtgaggagaagcccatcccagctgagcggcaccggggcagcagccaccggcaggaggccgtgcagagccctgtgttccccccagcccagaagcagatccaccagaagcccatccccctgccccgcttcacagaaggaggcaaccccaccgtggatggccccctgcccagcttcagcagcaacagcaccatcagcgagcaggaggccggcgtgctgtgcaagccctggtacgccggggcctgtgacaggaagtctgctgaggaggccctgcacaggagcaacaaggatggcagcttcctgatcaggaagagcagcggccatgacagcaagcagccctacaccctggtggtgttcttcaacaagagggtgtacaacatccctgtgcgcttcatcgaggccaccaagcagtatgccctgggcaggaagaagaatggagaggagtacttcggctctgtggccgagatcatccggaaccaccagcacagccccctggtgctgattgacagccagaacaacaccaaggacagcacccggctgaagtatgctgtgaaggtgtcctag

SEQ ID NO: 144873 - DNA, 525 bp, synthetic construct
  misc_feature 1..525: note = Description of Artificial Sequence: Synthetic coding sequence
  source 1..525: mol_type = other DNA
atggacaagctgaacaagatcaccgtgcctgccagccagaagctgcggcagctgcagaagatggtgcatgacatcaagaacaatgaaggaggcatcatgaacaagatcaagaagctgaaggtgaaggccccacccagcgtgccccggcgggactatgccagcgagagccctgcagatgaggaggagcagtggagcgatgactttgacagcgactatgaaaatccagatgagcacagcgacagcgagatgtatgtgatgcctgctgaggagaatgctgatgacagctatgagcccccacctgtggagcaggagaccaggcctgtgcacccagccctgccctttgcccggggggagtacatcatcttcctgtgtgacctgctgaagcagcagaacaacatgccctgggccgagaggaagatggtgaagagcaccctggaggtgctgctgaagagcagcggcatcatcaacatcgtgctgtggttcctgctgactgtgcgcatcacccagaagatccccccagactag

SEQ ID NO: 144874 - DNA, 558 bp, synthetic construct
  misc_feature 1..558: note = Description of Artificial Sequence: Synthetic coding sequence
  source 1..558: mol_type = other DNA
atggacaagctgaacaagatcaccgtgcctgccagccagaagctgcggcagctgcagaagatggtgcatgacatcaagaacaatgaaggaggcatcatgaacaagatcaagaagctgaaggtgaaggccccacccagcgtgccccggcgggactatgccagcgagagccctgcagatgaggaggagcagtggagcgatgactttgacagcgactatgaaaatccagatgagcacagcgacagcgagatgtatgtgatgcctgctgaggagaatgctgatgacagctatgagcccccacctgtggagcaggagaccaggcctgtgcacccagccctgccctttgcccggggggagtacatcgacaacagaagcagccagaggcacagcccccccttcagcaagaccctgcccagcaagcccagctggcccagcgagaagtacttcggctctgtggccgagatcatccggaaccaccagcacagccccctggtgctgattgacagccagaacaacaccaaggacagcacccggctgaagtatgctgtgaaggtgtcctag

SEQ ID NO: 144875 - DNA, 204 bp, synthetic construct
  misc_feature 1..204: note = Description of Artificial Sequence: Synthetic coding sequence
  source 1..204: mol_type = other DNA
ctggacagctacagctgcctgctgcagctgcccaacaggatggacaagctgaacaagatcaccgtgcctgccagccagaagctgcggcagctgcagaagatggtgcatgacatcaagaacaatgaaggaggcatcatgaacaagatcaagaagacagccaccatgaagatccagatgagcaccaggacccagcgctgcacctag

SEQ ID NO: 144876 - DNA, 1215 bp, synthetic construct
  misc_feature 1..1215: note = Description of Artificial Sequence: Synthetic coding sequence
  source 1..1215: mol_type = other DNA
atggacaagctgaacaagatcaccgtgcctgccagccagaagctgcggcagctgcagaagatggtgcatgacatcaagaacaatgaaggaggcatcatgaacaagatcaagaagctgaaggtgaaggccccacccagcgtgccccggcgggactatgccagcgagagccctgcagatgaggaggagcagtggagcgatgactttgacagcgactatgaaaatccagatgagcacagcgacagcgagatgtatgtgatgcctgctgaggagaatgctgatgacagctatgagcccccacctgtggagcaggagaccaggcctgtgcacccagccctgccctttgcccggggggagtacatcgacaacagaagcagccagaggcacagcccccccttcagcaagaccctgcccagcaagcccagctggcccagcgagaaggcccggctgaccagcaccctgcctgccctgacagccctgcagaagccccaggtgccccccaagcccaagggcctgctggaggatgaggccgactatgtggtgcctgtggaggacaatgatgagaactacatccaccccacagagagcagcagccccccacctgagaaggcccccatggtgaacagaagcaccaagcccaacagcagcaccccagccagccccccaggcacagccagcggcagaaattctggggcctgggagaccaagagccccccacctgctgcccccagccccctgccccgggccggcaagaagcccaccacccccctgaagaccacccctgtggccagccagcagaatgccagctctgtgtgtgaggagaagcccatcccagctgagcggcaccggggcagcagccaccggcaggaggccgtgcagagccctgtgtttcctccagcccagaagcagatccaccagaagcccatccccctgccccgcttcacagagggcggcaaccccaccgtggatggccccctgcccagcttcagcagcaacagcaccatcagcgagcaggaggccggcgtgctgtgcaagccctggtacgccggggcctgtgacaggaagtctgctgaggaggccctgcacaggagcaacaagtactttggatctgtggccgagatcatccggaaccaccagcacagccccctggtgctgattgacagccagaacaacaccaaggacagcacccggctgaagtatgctgtgaaggtgtcctag

SEQ ID NO: 144877 - DNA, 1266 bp, synthetic construct
  misc_feature 1..1266: note = Description of Artificial Sequence: Synthetic coding sequence
  source 1..1266: mol_type = other DNA
atggacaagctgaacaagatcaccgtgcctgccagccagaagctgcggcagctgcagaagatggtgcatgacatcaagaacaatgaaggaggcatcatgaacaagatcaagaagctgaaggtgaaggccccacccagcgtgccccggcgggactatgccagcgagagccctgcagatgaggaggagcagtggagcgatgactttgacagcgactatgaaaatccagatgagcacagcgacagcgagatgtatgtgatgcctgctgaggagaatgctgatgacagctatgagcccccacctgtggagcaggagaccaggcctgtgcacccagccctgccctttgcccggggggagtacatcgacaacagaagcagccagaggcacagcccccccttcagcaagaccctgcccagcaagcccagctggcccagcgagaaggcccggctgaccagcaccctgcctgccctgacagccctgcagaagccccaggtgccccccaagcccaagggcctgctggaggatgaggccgactatgtggtgcctgtggaggacaatgatgagaactacatccaccccacagagagcagcagccccccacctgagaaggcccccatggtgaacagaagcaccaagcccaacagcagcaccccagccagccccccaggcacagccagcggcagaaattctggggcctgggagaccaagagccccccacctgctgcccccagccccctgccccgggccggcaagaagcccaccacccccctgaagaccacccctgtggccagccagcagaatgccagctctgtgtgtgaggagaagcccatcccagctgagcggcaccggggcagcagccaccggcaggaggccgtgcagagccctgtgtttcctccagcccagaagcagatccaccagaagcccatccccctgccccgcttcacagagggcggcaaccccaccgtggatggccccctgcccagcttcagcagcaacagcaccatcagcgagcaggaggccggcgtgctgtgcaagccctggtacgccggggcctgtgacaggaagtctgctgaggaggccctgcacaggagcaacaaggacccccagccccccctgcccagcaagcagtgggagaccaggaagctgcagtacttcggctctgtggccgagatcatccggaaccaccagcacagccccctggtgctgattgacagccagaacaacaccaaggacagcacccggctgaagtatgctgtgaaggtgtcctag

SEQ ID NO: 144878 - DNA, 630 bp, synthetic construct
  misc_feature 1..630: note = Description of Artificial Sequence: Synthetic coding sequence
  source 1..630: mol_type = other DNA
atggacaagctgaacaagatcaccgtgcctgccagccagaagctgcggcagctgcagaagatggtgcatgacatcaagaacaatgaaggaggcatcatgaacaagatcaagaagctgaaggtgaaggccccacccagcgtgccccggcgggactatgccagcgagagccctgcagatgaggaggagcagtggagcgatgactttgacagcgactatgaaaatccagatgagcacagcgacagcgagatgtatgtgatgcctgctgaggagaatgctgatgacagctatgagcccccacctgtggagcaggagaccaggcctgtgcacccagccctgccctttgcccggggggagtacatcgacaacagaagcagccagaggcacagcccccccttcagcaagaccctgcccagcaagcccagctggcccagcgagaaggcccggctgaccagcaccctgcctgccctgacagccctgcagaagccccaggtgccccccaagcccaagggcctgctggaggatgaggccgactatgtggtgcctgtggaggacaatgatgagaactacatccaccccacagagagcagcagccccccacctgagaagggcaagaaccagaggcaccactag

SEQ ID NO: 144879 - DNA, 900 bp, synthetic construct
  misc_feature 1..900: note = Description of Artificial Sequence: Synthetic coding sequence
  source 1..900: mol_type = other DNA
atggacaagctgaacaagatcaccgtgcctgccagccagaagctgcggcagctgcagaagatggtgcatgacatcaagaacaatgaaggaggcatcatgaacaagatcaagaagctgaaggtgaaggccccacccagcgtgccccggcgggactatgccagcgagagccctgcagatgaggaggagcagtggagcgatgactttgacagcgactatgaaaatccagatgagcacagcgacagcgagatgtatgtgatgcctgctgaggagaatgctgatgacagctatgagcccccacctgtggagcaggagaccaggcctgtgcacccagccctgccctttgcccggggggagtacatcggcaggaacagcggggcctgggagaccaagagccccccacctgctgcccccagccccctgcccagggctgggaagaagcccaccacccccctgaagaccacccctgtggccagccagcagaatgccagctctgtgtgtgaggagaagcccatcccagctgagcggcaccggggcagcagccaccggcaggaggccgtgcagagccctgtgttccccccagcccagaagcagatccaccagaagcccatccccctgccccgcttcacagaaggaggcaaccccaccgtggatggccccctgcccagcttcagcagcaacagcaccatcagcgagcaggaggccggcgtgctgtgcaagccctggtacgccggggcctgtgacaggaagtctgctgaggaggccctgcacaggagcaacaagtacttcggctctgtggccgagatcatccggaaccaccagcacagccccctggtgctgattgacagccagaacaacaccaaggacagcacccggctgaagtatgctgtgaaggtgtcctag

SEQ ID NO: 144880 - DNA, 2358 bp, synthetic construct
  misc_feature 1..2358: note = Description of Artificial Sequence: Synthetic coding sequence
  source 1..2358: mol_type = other DNA
atgctgcctgctgcccctgggaagggcctgggcagcccagaccctgccccctgtggccctgcccctcctggcaacaccaaggacatcatcatgatctatgaagaagatgctgaggagtgggccctgtacctgacagaggtgttcctgcacgtggtgaagcgggaggccatcctgctgtaccgcctggagaacttctccttccgccacctggagctgctgaacctgaccagctacaagtgcaagctgctgatcctgagcaacagcctgctgcgggacctgacccccaagaagtgccagttcctggagaagatcctgcacagccccaagtctgtggtgaccctgctgtgtggggtgaagagcagtgaccagctgtatgagctgctgaacatcagccagagccgctgggagatcagcacagagcaggagcctgaggactacatcagcgtcatccagagcatcatcttcaaggacagcgaggactactttgaggtgaacatccccacagacctgcgggccaagcacagcggggagatcagcgagaggaaggagattgaggagctgtctgaggccagcaggaacaccatccccctggccgtggtgctgcccacagagatcccctgtgagaaccctggagagatcttcatcatcctgagagatgaagtcatcggggacacagtggaggtggagttcaccagcagcaacaagaggatccgcaccaggcctgccctgtggaacaagaaggtgtggtgcatgaaggccctggagttccctgctggctctgtgcacgtgaatgtgtactgtgatggcatcgtgaaggccaccaccaagatcaagtactaccccacagccaaggccaaggaatgtctcttcaggatggctgacagcggggagagcctgtgccagaacagcattgaggagctggatggagtgctgaccagcatcttcaagcatgagatcccctactatgagttccagagcctgcagacagagatctgcagccagaacaagtacacccacttcaaggagctgcccaccctgctgcactgtgccgccaagtttggcctgaagaacctggccatccacctgctgcagtgcagcggggccacctgggccagcaagatgaagaacatggagggcagtgaccctgcccacatcgccgagagacatggccacaaggagctgaagaagatctttgaggacttcagcatccaggagattgacatcaacaatgagcaggagaatgactatgaggaggacatcgccagcttcagcacctacatccccagcacccagaacccagccttccaccacgagagcaggaagacctacggccagagcgcagatggagctgaggccaatgagatggagggggagggcaagcagaatggcagcggcatggagaccaagcacagccccctggaggtgggcagcgagagcagcgaggaccagtatgatgacctgtatgtgttcatccctggagctgaccctgagaacaacagccaggagcccctgatgagcagcaggcctcccctgcccccacccaggcctgtggccaatgccttccagctggagcggccccacttcaccctgcccggcaccatggtggagggccagatggagaggagccagaactggggccaccctggggtgcggcaggagactggagatgagcccaagggggagaaggagaagaaggaggaggagaaggagcaggaggaggaggaggacccctacacctttgctgagattgatgacagtgaatatgacatgatcctggccaacctgagcatcaagaagaagacaggcagccgctccttcatcatcaacagacctccagcccccaccccccggcccaccagcatcccccccaaggaggagaccaccccctacatcgcccaggtgttccagcagaagacagcccggcggcagagtgatgatgacaagttctgtggcctgcccaagaagcaggaccgggccagaattgagagccctgccttcagcaccctgcggggctgcctgacagatggccaggaggagctgatcctgctgcaggagaaggtgaagaatggcaagatgtccatggatgaggccctggagaagttcaagcactggcagatgggcaagagcggcctggagatgatccagcaggagaagctgcggcagctgcgggactgcatcatcggcaagaggcctgaggaggagaatgtgtacaacaagctgaccatcgtgcaccaccctgggggcaaggagacagcccacaatgaaaacaagttctacaacgtgcacttcagcaacaagctgcctgcccggccccaggtggagaaggagtttggcttctgctgcaagaaggaccactag

SEQ ID NO: 144881 - DNA, 1959 bp, synthetic construct
  misc_feature 1..1959: note = Description of Artificial Sequence: Synthetic coding sequence
  source 1..1959: mol_type = other DNA
atgctgcctgctgcccctgggaagggcctgggcagcccagaccctgccccctgtggccctgcccccccagattctgaggactactttgaggtgaacatccccacagacctgcgggccaagcacagcggggagatcagcgagaggaaggagattgaggagctgtctgaggccagcaggaacaccatccccctggccgtggtgctgcccacagagatcccctgtgaaaatcctggagagatcttcatcatcctgagagatgaggtgattggagacacagtggaggtggagttcaccagcagcaacaagaggatccgcaccaggcctgccctgtggaacaagaaggtgtggtgcatgaaggccctggagttccctgctggctctgtgcacgtgaatgtgtactgtgatggcatcgtgaaggccaccaccaagatcaagtactaccccacagccaaggccaaggagtgcctcttcaggatggctgacagcggggagagcctgtgccagaacagcattgaggagctggatggagtgctgaccagcatcttcaagcatgagatcccctactatgagttccagagcctgcagacagagatctgcagccagaacaagtacacccacttcaaggagctgcccaccctgctgcactgtgccgccaagtttggcctgaagaacctggccatccacctgctgcagtgcagcggggccacctgggccagcaagatgaagaacatggagggcagtgaccctgcccacatcgccgagcggcacggccacaaggagctgaagaagatctttgaggacttcagcatccaggagattgacatcaacaatgagcaggagaatgactatgaagaagatattgccagcttcagcacctacatccccagcacccagaacccagccttccaccacgagagcaggaagacctacggccagagcgcagatggagctgaggccaatgagatggagggggagggcaagcagaatggaagtggcatggagaccaagcacagccccctggaggtgggcagcgagagcagcgaggaccagtatgatgacctgtatgtgttcatccctggagctgaccctgagaacaacagccaggagcccctgatgagcagccggccccccctgcccccacccaggcctgtggccaatgccttccagctggagcggccccacttcaccctgcccggcaccatggtggagggccagatggagaggagccagaactggggccaccctggggtgcggcaggagactggagatgagcccaagggggagaaggagaagaaggaggaggagaaggagcaggaggaggaggaggacccctacacctttgctgagattgatgattctgaatatgacatgatcctggccaacctgagcatcaagaagaagacaggcagccgctccttcatcatcaaccggcccccagcccccaccccccggcccaccagcatcccccccaaggaggagaccaccccctacatcgcccaggtgttccagcagaagacagcccggcggcagagtgatgatgacaagttctgtggcctgcccaagaagcaggaccgggcccgcatcgagagccctgccttcagcaccctgcggggctgcctgacagatggccaggaggagctgatcctgctgcaggagaaggtgaagaatggcaagatgtccatggatgaggccctggagaagttcaagcactggcagatgggcaagagcggcctggagatgatccagcaggagaagctgcggcagctgcgggactgcatcatcggcaagaggcctgaggaggagaatgtgtacaacaagctgaccatcgtgcaccaccctgggggcaaggagacagcccacaatgaaaacaagttctacaacgtgcacttcagcaacaagctgcctgcccggccccaggtggagaaggagtttggcttctgctgcaagaaggaccactag

SEQ ID NO: 144882 - DNA, 2268 bp, synthetic construct
  misc_feature 1..2268: note = Description of Artificial Sequence: Synthetic coding sequence
  source 1..2268: mol_type = other DNA
atgatctatgaagaagatgctgaggagtgggccctgtacctgacagaggtgttcctgcacgtggtgaagcgggaggccatcctgctgtaccgcctggagaacttctccttccgccacctggagctgctgaacctgaccagctacaagtgcaagctgctgatcctgagcaacagcctgctgcgggacctgacccccaagaagtgccagttcctggagaagatcctgcacagccccaagtctgtggtgaccctgctgtgtggggtgaagagcagtgaccagctgtatgagctgctgaacatcagccagagccgctgggagatcagcacagagcaggagcctgaggactacatcagcgtcatccagagcatcatcttcaaggacagcgaggactactttgaggtgaacatccccacagacctgcgggccaagcacagcggggagatcagcgagaggaaggagattgaggagctgtctgaggccagcaggaacaccatccccctggccgtggtgctgcccacagagatcccctgtgagaaccctggagagatcttcatcatcctgagagatgaagtcatcggggacacagtggaggtggagttcaccagcagcaacaagaggatccgcaccaggcctgccctgtggaacaagaaggtgtggtgcatgaaggccctggagttccctgctggctctgtgcacgtgaatgtgtactgtgatggcatcgtgaaggccaccaccaagatcaagtactaccccacagccaaggccaaggaatgtctcttcaggatggctgacagcggggagagcctgtgccagaacagcattgaggagctggatggagtgctgaccagcatcttcaagcatgagatcccctactatgagttccagagcctgcagacagagatctgcagccagaacaagtacacccacttcaaggagctgcccaccctgctgcactgtgccgccaagtttggcctgaagaacctggccatccacctgctgcagtgcagcggggccacctgggccagcaagatgaagaacatggagggcagtgaccctgcccacatcgccgagagacatggccacaaggagctgaagaagatctttgaggacttcagcatccaggagattgacatcaacaatgagcaggagaatgactatgaggaggacatcgccagcttcagcacctacatccccagcacccagaacccagccttccaccacgagagcaggaagacctacggccagagcgcagatggagctgaggccaatgagatggagggggagggcaagcagaatggcagcggcatggagaccaagcacagccccctggaggtgggcagcgagagcagcgaggaccagtatgatgacctgtatgtgttcatccctggagctgaccctgagaacaacagccaggagcccctgatgagcagcaggcctcccctgcccccacccaggcctgtggccaatgccttccagctggagcggccccacttcaccctgcccggcaccatggtggagggccagatggagaggagccagaactggggccaccctggggtgcggcaggagactggagatgagcccaagggggagaaggagaagaaggaggaggagaaggagcaggaggaggaggaggacccctacacctttgctgagattgatgacagtgaatatgacatgatcctggccaacctgagcatcaagaagaagacaggcagccgctccttcatcatcaacagacctccagcccccaccccccggcccaccagcatcccccccaaggaggagaccaccccctacatcgcccaggtgttccagcagaagacagcccggcggcagagtgatgatgacaagttctgtggcctgcccaagaagcaggaccgggccagaattgagagccctgccttcagcaccctgcggggctgcctgacagatggccaggaggagctgatcctgctgcaggagaaggtgaagaatggcaagatgtccatggatgaggccctggagaagttcaagcactggcagatgggcaagagcggcctggagatgatccagcaggagaagctgcggcagctgcgggactgcatcatcggcaagaggcctgaggaggagaatgtgtacaacaagctgaccatcgtgcaccaccctgggggcaaggagacagcccacaatgaaaacaagttctacaacgtgcacttcagcaacaagctgcctgcccggccccaggtggagaaggagtttggcttctgctgcaagaaggaccactag

SEQ ID NO: 144883 - DNA, 2313 bp, synthetic construct
  misc_feature 1..2313: note = Description of Artificial Sequence: Synthetic coding sequence
  source 1..2313: mol_type = other DNA
atggtgaactgccacctgaagattggcaacaccaaggacatcatcatgatctatgaggaggatgctgaggagtgggccctgtacctgacagaggtgttcctgcacgtggtgaagcgggaggccatcctgctgtaccgcctggagaacttctccttccgccacctggagctgctgaacctgaccagctacaagtgcaagctgctgatcctgagcaacagcctgctgcgggacctgacccccaagaagtgccagttcctggagaagatcctgcacagccccaagtctgtggtgaccctgctgtgtggggtgaagagcagtgaccagctgtatgagctgctgaacatcagccagagccgctgggagatcagcacagagcaggagcctgaggactacatcagcgtcatccagagcatcatcttcaaggacagcgaggactactttgaggtgaacatccccacagacctgcgggccaagcacagcggggagatcagcgagaggaaggagattgaggagctgtctgaggccagcaggaacaccatccccctggccgtggtgctgcccacagagatcccctgtgaaaatcctggagagatcttcatcatcctgagagatgaggtgattggagacacagtggaggtggagttcaccagcagcaacaagaggatccgcaccaggcctgccctgtggaacaagaaggtgtggtgcatgaaggccctggagttccctgctggctctgtgcacgtgaatgtgtactgtgatggcatcgtgaaggccaccaccaagatcaagtactaccccacagccaaggccaaggagtgcctcttcaggatggctgacagcggggagagcctgtgccagaacagcattgaggagctggatggagtgctgaccagcatcttcaagcatgagatcccctactatgagttccagagcctgcagacagagatctgcagccagaacaagtacacccacttcaaggagctgcccaccctgctgcactgtgccgccaagtttggcctgaagaacctggccatccacctgctgcagtgcagcggggccacctgggccagcaagatgaagaacatggagggcagtgaccctgcccacatcgccgagcggcacggccacaaggagctgaagaagatctttgaggacttcagcatccaggagattgacatcaacaatgagcaggagaatgactatgaagaagatattgccagcttcagcacctacatccccagcacccagaacccagccttccaccacgagagcaggaagacctacggccagagcgcagatggagctgaggccaatgagatggagggggagggcaagcagaatggaagtggcatggagaccaagcacagccccctggaggtgggcagcgagagcagcgaggaccagtatgatgacctgtatgtgttcatccctggagctgaccctgagaacaacagccaggagcccctgatgagcagccggccccccctgcccccacccaggcctgtggccaatgccttccagctggagcggccccacttcaccctgcccggcaccatggtggagggccagatggagaggagccagaactggggccaccctggggtgcggcaggagactggagatgagcccaagggggagaaggagaagaaggaggaggagaaggagcaggaggaggaggaggacccctacacctttgctgagattgatgattctgaatatgacatgatcctggccaacctgagcatcaagaagaagacaggcagccgctccttcatcatcaaccggcccccagcccccaccccccggcccaccagcatcccccccaaggaggagaccaccccctacatcgcccaggtgttccagcagaagacagcccggcggcagagtgatgatgacaagttctgtggcctgcccaagaagcaggaccgggcccgcatcgagagccctgccttcagcaccctgcggggctgcctgacagatggccaggaggagctgatcctgctgcaggagaaggtgaagaatggcaagatgtccatggatgaggccctggagaagttcaagcactggcagatgggcaagagcggcctggagatgatccagcaggagaagctgcggcagctgcgggactgcatcatcggcaagaggcctgaggaggagaatgtgtacaacaagctgaccatcgtgcaccaccctgggggcaaggagacagcccacaatgaaaacaagttctacaacgtgcacttcagcaacaagctgcctgcccggccccaggtggagaaggagtttggcttctgctgcaagaaggaccactag

SEQ ID NO: 144884 - DNA, 1959 bp, synthetic construct; identical to SEQ ID NO: 144881
  misc_feature 1..1959: note = Description of Artificial Sequence: Synthetic coding sequence
  source 1..1959: mol_type = other DNA

SEQ ID NO: 144885 - DNA, 516 bp, synthetic construct
  misc_feature 1..516: note = Description of Artificial Sequence: Synthetic coding sequence
  source 1..516: mol_type = other DNA
atgcaccccttctacacccgggccgccaccatgattggagaaattgctgctgctgtgtccttcatcagcaagttcctgcggaccaagggcctgaccagcgagcggcagctgcagaccttcagccagagcctgcaggagctgctggccgagcactacaagcaccactggttccctgagaagccctgcaagggcagcggctaccgctgcatccgcatcaaccacaagatggaccccctcatcggccaggccgcccagagaattggcctgagcagccaggagctgttccggctgctgcccagcgagctgaccctgtgggtggacccctatgaggtgtcctacagaattggagaagatggcagcatctgtgtgctgtatgaggccagccctgctgggggcagcacccagaacagcaccaacgtgcagatggtggacagccgcatcagctgcaaggaggagctgctgctgggccgcaccagccccagcaagaactacaacatgatgacagtgtctggatag

SEQ ID NO: 144886 - DNA, 672 bp, synthetic construct
  misc_feature 1..672: note = Description of Artificial Sequence: Synthetic coding sequence
  source 1..672: mol_type = other DNA
atgagagatgaaattgccaccaccgtcttctttgtgacccggctggtgaagaagcatgacaagctgagcaagcagcagatcgaggactttgctgagaagctgatgaccatcctgtttgagacctaccgcagccactggcacagcgactgccccagcaagggccaggccttccgctgcatccgcatcaacaacaaccagaacaaggaccccatcctggagcgggcctgtgtggagagcaatgtggacttcagccacctgggcctgcccaaggagatgaccatctgggtggacccctttgaggtgtgctgccgctatggagagaagaaccaccccttcaccgtggccagcttcaagggccgctgggaggagtgggagctgtaccagcagatctcctatgctgtgtcccgggccagcagtgatgtgagcagcggcaccagctgtgatgaggagagctgcagcaaggagcccagggtcatccccaaggtgagcaaccccaagagcatctaccaggtggagaacctgaagcagcccttccagagctggctgcagatccccaggaagaagaatgtggtggatggccgggtgggcctgctgggcaacacctaccacggcagccagaagcaccccaagtgctacagacctgccatgcaccggctggaccgcatcctgtag

SEQ ID NO: 144887 - DNA, 483 bp, synthetic construct
  misc_feature 1..483: note = Description of Artificial Sequence: Synthetic coding sequence
  source 1..483: mol_type = other DNA
atgagagatgaaattgccaccaccgtcttctttgtgacccggctggtgaagaagcatgacaagctgagcaagcagcagatcgaggactttgctgagaagctgatgaccatcctgtttgagacctaccgcagccactggcacagcgactgccccagcaagggccaggccttccgctgcatccgcatcaacaacaaccagaacaaggaccccatcctggagcgggcctgtgtggagagcaatgtggacttcagccacctgggcctgcccaaggagatgaccatctgggtggacccctttgaggtgtgctgccgctatggagagaagaaccaccccttcaccgtggccagcttcaagggccgctgggaggagtgggagctgtaccagcagatctcctatgctgtgtcccgggccagcagtgatgtgagcagcggcaccagctgtgatgaggagagctgcagcaaggagcccagggtcatcccctag

SEQ ID NO: 144888 - DNA, 1188 bp, synthetic construct
  misc_feature 1..1188: note = Description of Artificial Sequence: Synthetic coding sequence
  source 1..1188: mol_type = other DNA
atgagcctggtggacctgggcaagaagctgctggaggccgcccgggccggccaggatgatgaggtgcgcatcctgatggccaacggggcccccttcaccacagactggctgggcaccagccccctgcacctggccgcccagtatggccactacagcaccacagaggtgctgctgcgggccggcgtgtccagagatgcccggaccaaggtggacaggacccccctgcacatggccgccagcgagggccacgccagcatcgtggaggtgctgctgaagcatggagcagatgtgaatgccaaggacatgctgaagatgacagccctgcactgggccacagagcacaaccaccaggaggtggtggagctgctgatcaagtacggggctgatgtgcacacccagagcaagttctgcaagacagcctttgacatcagcattgacaatggaaatgaagacctggccgagatcctgcagatcgccatgcagaaccagatcaacaccaaccctgagagcccagacacagtgaccatccacgccgccaccccccagttcatcatcggccctggaggagtggtgaacctgaccggcctggtgtcctctgagaacagcagcaaggccacagatgaaacaggagtgtctgctgtgcagtttggaaacagcagcacctctgtgctggccaccctggccgccctggccgaggccagcgcccccctgagcaacagcagcgagacccctgtggtggccacagaggaggtggtgacagctgagagcgtggatggagccatccagcaggtggtgtcctctgggggccagcaggtgatcaccatcgtgacagatggcatccagctgggcaacctgcacagcatccccaccagcggcatcggccagcccatcatcgtgaccatgccagatggccagcaggtgctgactgtgcctgccacagacattgctgaggagaccgtcatcagcgaggagcccccagccaagaggcagtgcatcgagatcatcgagaacagagtggagagcgctgagattgaggagcgggaggccctgcagaagcagctggatgaggccaaccgggaggcccagaagtaccggcagcagctgctgaagaaggagcaggaggccgaggcctaccggcagaagctggaggccatgacccggctgcagaccaacaaggaggccgtgtag

SEQ ID NO: 144889 - DNA, 555 bp, synthetic construct
  misc_feature 1..555: note = Description of Artificial Sequence: Synthetic coding sequence
  source 1..555: mol_type = other DNA
atggagcccagccagtgtgtggaggagctggaggatgatgtgttccagccagaagatggagagcctgtgacccagcccggcagcctgctgtctgctgacctgtttgcccagagcctgctggactgccccctgagccggctgcagctgttccccctgacccactgctgcggccctggcctgcggcccaccagccaggaggacaaggccacccagaccctgagccctgccagccccagccagggcgtgatgctgccctgtggggtgacagaggagccccagaggctcttctatggaaatgccggctaccgcctgcccctgcctgccagcttccctgctgtgctgcccatcggggagcagcccccagagggccagtggcagcaccaggccgaggtgcagatcgccaggaagctgcagtgcatcgctgaccagttccaccggctgcacgtgcagcagcaccagcagaaccagaacagagtgtggtggcagatcctgctcttcctgcacaacctggccctgaatggagaggagaacagaaatggagctggccccaggtag

SEQ ID NO: 144890 - DNA, 555 bp, synthetic construct; identical to SEQ ID NO: 144889
  misc_feature 1..555: note = Description of Artificial Sequence: Synthetic coding sequence
  source 1..555: mol_type = other DNA

SEQ ID NO: 144891 - DNA, 492 bp, synthetic construct
  misc_feature 1..492: note = Description of Artificial Sequence: Synthetic coding sequence
  source 1..492: mol_type = other DNA
atggagcccagccagtgtgtggaggagctggaggatgatgtgttccagccagaagatggagagcctgtgacccagcccggcagcctgctgtctgctgacctgtttgcccagagcctgctggactgccccctgagccggctgcagctgttccccctgacccactgctgcggccctggcctgcggcccaccagccaggaggacaaggccacccagaccctgagccctgccagccccagccagggcgtgatgctgccctgtggggtgacagaggagccccagaggctcttctatggaaatgccggctaccgcctgcccctgcctgccagcttccctgctgtgctgcccatcggggagcagcccccagagggccagtggcagcaccaggccgagcaccagcagaaccagaacagagtgtggtggcagatcctgctcttcctgcacaacctggccctgaatggagaagaaaatagaaatggagctggccccaggtag

SEQ ID NO: 144892 - DNA, 186 bp, synthetic construct
  misc_feature 1..186: note = Description of Artificial Sequence: Synthetic coding sequence
  source 1..186: mol_type = other DNA
atggagcccagccagtgtgtggaggagctggaggatgatgtgttccagccagaagatggagagcctgtgacccagcccggcagcctgctgtctgctgacctgtttgcccagagcctgctggactgccccctgagccggctgcagctgttccccctgacccactgctgcggccctggcctgaggtag

SEQ ID NO: 144893 - DNA, 390 bp, synthetic construct
  misc_feature 1..390: note = Description of Artificial Sequence: Synthetic coding sequence
  source 1..390: mol_type = other DNA
atggagcccagccagtgtgtggaggagctggaggatgatgtgttccagccagaagatggagagcctgtgacccagcccggcagcctgctgtctgctgacctgtttgcccagagcctgctggactgccccctgagccggctgcagctgttccccctgacccactgctgcggccctggcctgcggcccaccagccaggaggacaaggccacccagaccctgagccctgccagccccagccagggcgtgatgctgccctgtggggtgacagaggagccccagaggctcttctacgccccagctgagcccaagagctgtgtggtggccgacccccccctgcctgcccagccctgctttgagtggaggcgggagcaggagcggggccggccctag

SEQ ID NO: 144894 - DNA, 42 bp, synthetic construct
  misc_feature 1..42: note = Description of Artificial Sequence: Synthetic coding sequence
  source 1..42: mol_type = other DNA
atggagcccagccagtgtgtggaggagctggaggatgactag

SEQ ID NO: 144895 - DNA, 555 bp, synthetic construct; identical to SEQ ID NO: 144889
  misc_feature 1..555: note = Description of Artificial Sequence: Synthetic coding sequence
  source 1..555: mol_type = other DNA

SEQ ID NO: 144896 - DNA, 555 bp, synthetic construct; identical to SEQ ID NO: 144889
  misc_feature 1..555: note = Description of Artificial Sequence: Synthetic coding sequence
  source 1..555: mol_type = other DNA

SEQ ID NO: 144897 - DNA, 585 bp, synthetic construct
  misc_feature 1..585: note = Description of Artificial Sequence: Synthetic coding sequence
  source 1..585: mol_type = other DNA
atgagccagaatggagcccctggcatgcaggaggagagcctgcagggctcctgggtggagctgcacttcagcaacaatggaaatggaggctctgtgcctgcctctgtgtccatctacaacggggacatggagaagatcctgctggatgcccagcacgagagcggccgcagcagcagcaagagcagccactgtgacagccccccaagaagccagaccccccaggacaccaacagagccagcgagacagacacccacagcattggagagaagaacagcagccagagtgaagaagatgacatcgagaggaggaaggaggtggagagcatcctgaagaagaacagcgactggatctgggactggagcagcaggcctgagaacatcccccccaaggagttcctgttcaagcaccccaagaggacagccaccctgtccatgaggaacacctctgtgatgaagaagggcggcatcttctctgctgagttcctgaaggtgttcctgcccagcctgctgctgagccacctgctggccatcggcctgggcatctacatcggccgccgcctgaccaccagcaccagcaccttctag

SEQ ID NO: 144898 - DNA, 543 bp, synthetic construct
  misc_feature 1..543: note = Description of Artificial Sequence: Synthetic coding sequence
  source 1..543: mol_type = other DNA
atgagccagaatggagcccctggcatgcaggaggagagcctgcagggctcctgggtggagctgcacttcagcaacaatggaaatggaggctctgtgcctgcctctgtgtccatctacaacggggacatggagaagatcctgctggatgcccagcacgagagcggccgcagcagcagcaagagcagccactgtgacagccccccaagaagccagaccccccaggacaccaacagagccagcgagacagacacccacagcattggagagaagaacagcagccagagtgaagaagatgacatcgagaggaggaaggaggtggagagcatcctgaagaagaacagcgactggatctgggactggagcagcaggcctgagaacatcccccccaaggagttcctgttcaagcaccccaagaggacagccaccctgtccatgaggaacacctctgtgatgaagaagggcggcatcttctctgctgagttcctgaaggtgttcctgcccagcctgctgctgagccacctgctggccatcggcctgggctag

SEQ ID NO: 144899 - DNA, 1071 bp, synthetic construct
  misc_feature 1..1071: note = Description of Artificial Sequence: Synthetic coding sequence
  source 1..1071: mol_type = other DNA
atgagccggcccctgctgatcaccttcaccccagccacagaccccagcgacctgtggaaggatggccagcagcagccccagcctgagaagccagagagcaccctggatggagctgctgccctggccttctatgaggccctgattggagatgagagcagcgccccagacagccagaggagccagacagagcccgcccgggagaggaagaggaagaagaggcgcatcatgaaggccccagctgctgaggccgtggccgagggcgccagcggccgccacggccagggccgcagcctggaggccgaggacaagatgacccaccgcatcctgcgggccgcccaggagggggacctgcctgagctgcggcggctgctggagccccatgaagctggaggagctgggggcaacatcaatgccagagatgccttctggtggacccccctgatgtgtgccgcccgggccggccagggcgctgctgtgtcctacctgctgggcagaggagctgcctgggtgggcgtgtgtgagctgagcggcagagatgctgcccagctggccgaggaggccggcttccctgaggtggccaggatggtgcgggagagccacggggagaccaggagcccagaaaatagaagccccacccccagcctgcagtactgtgagaactgtgacacccacttccaggacagcaaccacaggaccagcacagcccacctgctgagcctgagccagggcccccagccccccaacctgcccctgggcgtgcccatcagcagccctggcttcaagctgctgctgcggggcggctgggagcccggcatgggcctgggccccagaggagagggccgggccaaccccatccccaccgtgctgaagagggaccaggagggcctgggctaccgcagcgccccccagccccgggtgacccacttccctgcctgggacaccagggctgtggccggccgggagaggcctccccgggtggccaccctgtcctggagggaggagcggcggcgggaggagaaggaccgggcctgggagcgggacctgcggacctacatgaacctggagttctag

SEQ ID NO: 144900 - DNA, 3399 bp, synthetic construct
  misc_feature 1..3399: note = Description of Artificial Sequence: Synthetic coding sequence
  source 1..3399: mol_type = other DNA
atggagcccaatgacagcaccagcacagctgtggaggagccagacagcctggaggtgctggtgaagaccctggacagccagaccaggaccttcatcgtgggcgcccagatgaatgtgaaggagttcaaggagcacatcgccgcctctgtgtccatccccagcgagaagcagaggctcatctaccagggccgggtgctgcaggatgacaagaagctgcaggagtacaacgtgggcggcaaggtgatccacctggtggagcgggccccaccccagacccacctgcccagcggggccagcagcggcaccggcagcgccagcgccacccatggaggcggcagccccccaggcacccggggccctggggcctctgtgcatgacagaaatgccaacagctatgtgatggtgggcaccttcaacctgcccagtgatggcagcgctgtggatgtgcacatcaacatggagcaggcccccatccagagcgagccccgggtgcggctggtgatggcccagcacatgatccgggacatccagaccctgctgagcaggatggagaccctgccctacctgcagtgccggggcggcccccagccccagcacagccagcccccaccccagcccccagctgtgaccccagagcctgtggccctgagcagccagaccagcgagcctgtggagagcgaggccccaccccgggagcccatggaggccgaggaggtggaggagcgggccccagcccagaaccctgagctgaccccaggccctgccccagctggccccaccccagcccctgagaccaatgcccccaaccaccccagccctgcagaatatgtggaggtgctgcaggagctgcagaggctggagagccggctgcagcccttcctgcagcgctactatgaggtgctgggcgccgccgccaccacagactacaacaacaaccacgagggccgggaggaggaccagaggctcatcaacctggtgggggagagcctgcggctgctgggcaacacctttgtggccctgagtgacctgcgctgcaacctggcctgcaccccacccaggcacctgcacgtggtgcggcccatgagccactacaccacccccatggtgctgcagcaggccgccatccccatccagatcaacgtgggcaccaccgtgaccatgactggaaatggcacccggcccccacccaccccaaatgctgaggcccctcctcctggccctggccaggccagctctgtggcccccagcagcaccaacgtggagagcagcgctgagggcgcccctcctcctggccctgcccctcctccagccaccagccaccccagggtcatccgcatcagccaccagagcgtggagcctgtggtgatgatgcacatgaacatccaggacagcggcacccagcccggcggcgtgcccagcgcccccaccggccccctgggccccccaggccacggccagaccctgggccagcaggtgcccggcttccccacagcccccaccagggtggtgattgcccggcccaccccaccccaggcccggcccagccaccctgggggcccccctgtgtctggcaccctgcagggcgccggcctgggcaccaatgccagcctggcccagatggtgtctggcctggtgggccagctgctgatgcagcctgtgctggtggcccagggcaccccaggcatggcccctcctccagccccagccacagccagcgccagcgctggcaccaccaacacagccaccacagctggccctgcccctgggggccctgcccagcccccacccaccccccagcccagcatggctgacctgcagttcagccagctgctgggcaacctgctgggccctgctggccctggggccggcggcagcggcgtggccagccccaccatcaccgtggccatgcctggggtgcctgccttcctgcagggcatgacagacttcctgcaggccacccagacagcccctcctcctcctcctcctcctcctcctcctcctccagcccctgagcagcagaccatgcctcctcctggcagccccagcggcggggccggcagccctgggggcctgggcctggagagcctgagccctgagttcttcacctctgtggtgcagggcgtgctgagcagcctgctgggcagcctgggcgcccgggccggcagcagcgagagcattgctgccttcatccagaggctgagcggcagcagcaacatctttgagcccggggctgatggagccctgggcttctttggagccctgctgagcctgctgtgccagaacttctccatggtggatgtggtgatgctgctgcacggccacttccagcccctgcagaggctgcagccccagctgcgctccttcttccaccagcactacctgggcggccaggagcccacccccagcaacatccgcatggccacccacaccctcatcaccggcctggaggagtatgtgcgggagagcttcagcctggtgcaggtgcagcccggggtggacatcatccgcaccaacctggagttcctgcaggagcagttcaacagcattgctgcccacgtgctgcactgcacagattctggctttggagcccggctgctggagctgtgcaaccagggcctgtttgaatgtctggccctgaacctgcactgcctgggcggccagcagatggagctggccgctgtgatcaatggccgcatccggaggatgagcagaggagtgaaccccagcctggtgtcctggctgaccaccatgatgggcctgcggctgcaggtggtgctggagcacatgcctgtgggcccagatgccatcctgcgctacgtgagaagagtgggggaccccccccagcccctgcctgaggagcccatggaggtgcagggcgctgagcgggccagccctgagccccagcgggagaatgccagccctgcccctggcaccacagctgaggaggccatgagccggggccccccaccagcccctgagggcggcagcagagatgagcaggatggagccagcgctgagacagagccctgggccgctgctgtgcccccagagtgggtgcccatcatccagcaggacatccagagccagaggaaggtgaagccccagccccccctgagtgatgcctacctgagcggcatgcctgccaagaggaggaagaccatgcagggcgagggcccccagctgctgctgtctgaggccgtgtcccgggccgccaaggccgccggggcccggcccctgaccagccctgagagcctgagccgggacctggaggcccctgaggtgcaggagagctaccggcagcagctgcggagtgacatccagaagaggctgcaggaggaccccaactacagcccccagcgcttccccaatgcccagagggcctttgctgatgacccctag

SEQ ID NO: 144901 - DNA, 3234 bp, synthetic construct
  misc_feature 1..3234: note = Description of Artificial Sequence: Synthetic coding sequence
  source 1..3234: mol_type = other DNA
atggagcccaatgacagcaccagcacagctgtggaggagccagacagcctggaggtgctggtgaagaccctggacagccagaccaggaccttcatcgtgggcgcccagatgaatgtgaaggagttcaaggagcacatcgccgcctctgtgtccatccccagcgagaagcagaggctcatctaccagggccgggtgctgcaggatgacaagaagctgcaggagtacaacgtgggcggcaaggtgatccacctggtggagcgggccccaccccagacccacctgcccagcggggccagcagcggcaccggcagcgccagcgccacccatggaggcggcagccccccaggcacccggggccctggggcctctgtgcatgacagaaatgccaacagctatgtgatggtgggcaccttcaacctgcccagtgatggcagcgctgtggatgtgcacatcaacatggagcaggcccccatccagagcgagccccgggtgcggctggtgatggcccagcacatgatccgggacatccagaccctgctgagcaggatggagtgccggggcggcccccagccccagcacagccagcccccaccccagcccccagctgtgaccccagagcctgtggccctgagcagccagaccagcgagcctgtggagagcgaggccccaccccgggagcccatggaggccgaggaggtggaggagcgggccccagcccagaaccctgagctgaccccaggccctgccccagctggccccaccccagcccctgagaccaatgcccccaaccaccccagccctgcagaatatgtggaggtgctgcaggagctgcagaggctggagagccggctgcagcccttcctgcagcgctactatgaggtgctgggcgccgccgccaccacagactacaacaacaaccacgagggccgggaggaggaccagaggctcatcaacctggtgggggagagcctgcggctgctgggcaacacctttgtggccctgagtgacctgcgctgcaacctggcctgcaccccacccaggcacctgcacgtggtgcggcccatgagccactacaccacccccatggtgctgcagcaggccgccatccccatccagatcaacgtgggcaccaccgtgaccatgactggaaatggcacccggcccccacccaccccaaatgctgaggcccctcctcctggccctggccaggccagctctgtggcccccagcagcaccaacgtggagagcagcgctgagggcgcccctcctcctggccctgcccctcctccagccaccagccaccccagggtcatccgcatcagccaccagagcgtggagcctgtggtgatgatgcacatgaacatccaggacagcggcacccagcccggcggcgtgcccagcgcccccaccggccccctgggccccccaggccacggccagaccctgggccagcaggtgcccggcttccccacagcccccaccagggtggtgattgcccggcccaccccaccccaggcccggcccagccaccctgggggcccccctgtgtctggcaccctgcagggcgccggcctgggcaccaatgccagcctggcccagatggtgtctggcctggtgggccagctgctgatgcagcctgtgctggtggcccagggcaccccaggcatggcccctcctccagccccagccacagccagcgccagcgctggcaccaccaacacagccaccacagctggccctgcccctgggggccctgcccagcccccacccaccccccagcccagcatggctgacctgcagttcagccagctgctgggcaacctgctgggccctgctggccctggggccggcggcagcggcgtggccagccccaccatcaccgtggccatgcctggggtgcctgccttcctgcagggcatgacagacttcctgcaggccacccagacagcccctcctcctcctcctcctcctcctcctcctcctccagcccctgagcagcagaccatgcctcctcctggcagccccagcggcggggccggcagccctgggggcctgggcctggagagcctgagccctgagttcttcacctctgtggtgcagggcgtgctgagcagcctgctgggcagcctgggcgcccgggccggcagcagcgagagcattgctgccttcatccagaggctgagcggcagcagcaacatctttgagcccggggctgatggagccctgggcttctttggagccctgctgagcctgctgtgccagaacttctccatggtggatgtggtgatgctgctgcacggccacttccagcccctgcagaggctgcagccccagctgcgctccttcttccaccagcactacctgggcggccaggagcccacccccagcaacatccgcatggccacccacaccctcatcaccggcctggaggagtatgtgcgggagagcttcagcctggtgcaggtgcagcccggggtggacatcatccgcaccaacctggagttcctgcaggagcagttcaacagcattgctgcccacgtgctgcactgcacagattctggctttggagcccggctgctggagctgtgcaaccagggcctgtttgaatgtctggccctgaacctgcactgcctgggcggccagcagatggagctggccgctgtgatcaatggccgcatccggaggatgagcagaggagtgaaccccagcctggtgtcctggctgaccaccatgatgggcctgcggctgcaggtggtgctggagcacatgcctgtgggcccagatgccatcctgcgctacgtgagaagagtgggggaccccccccagcccctgcctgaggagcccatggaggtgcagggcgctgagcgggccagccctgagccccagcgggagaatgccagccctgcccctggcaccacagctgaggaggccatgagccggggccccccaccagcccctgagggcggcagcagagatgagcaggatggagccagcgctgagacagagccctgggccgctgctgtgcccccagagtgggtgcccatcatccagcaggacatccagagccagaggaaggtgaagccccagccccccctgagtgatgcctacctgagcggcatgcctgccaagaggaggaagctgcggagtgacatccagaagaggctgcaggaggaccccaactacagcccccagcgcttccccaatgcccagagggcctttgctgatgacccctag

SEQ ID NO: 144902 - DNA, 3399 bp, synthetic construct; identical to SEQ ID NO: 144900
  misc_feature 1..3399: note = Description of Artificial Sequence: Synthetic coding sequence
  source 1..3399: mol_type = other DNA

SEQ ID NO: 144903 - DNA, 3381 bp, synthetic construct
  misc_feature 1..3381: note = Description of Artificial Sequence: Synthetic coding sequence
  source 1..3381: mol_type = other DNA
atggagcccaatgacagcaccagcacagctgtggaggagccagacagcctggaggtgctggtgaagaccctggacagccagaccaggaccttcatcgtgggcgcccagatgaatgtgaaggagttcaaggagcacatcgccgcctctgtgtccatccccagcgagaagcagaggctcatctaccagggccgggtgctgcaggatgacaagaagctgcaggagtacaacgtgggcggcaaggtgatccacctggtggagcgggccccaccccagacccacctgcccagcggggccagcagcggcaccggcagcgccagcgccacccatggaggcggcagccccccaggcacccggggccctggggcctctgtgcatgacagaaatgccaacagctatgtgatggtgggcaccttcaacctgcccagtgatggcagcgctgtggatgtgcacatcaacatggagcaggcccccatccagagcgagccccgggtgcggctggtgatggcccagcacatgatccgggacatccagaccctgctgagcaggatggagtgccggggcggcccccagccccagcacagccagcccccaccccagcccccagctgtgaccccagagcctgtggccctgagcagccagaccagcgagcctgtggagagcgaggccccaccccgggagcccatggaggccgaggaggtggaggagcgggccccagcccagaaccctgagctgaccccaggccctgccccagctggccccaccccagcccctgagaccaatgcccccaaccaccccagccctgcagaatatgtggaggtgctgcaggagctgcagaggctggagagccggctgcagcccttcctgcagcgctactatgaggtgctgggcgccgccgccaccacagactacaacaacaaccacgagggccgggaggaggaccagaggctcatcaacctggtgggggagagcctgcggctgctgggcaacacctttgtggccctgagtgacctgcgctgcaacctggcctgcaccccacccaggcacctgcacgtggtgcggcccatgagccactacaccacccccatggtgctgcagcaggccgccatccccatccagatcaacgtgggcaccaccgtgaccatgactggaaatggcacccggcccccacccaccccaaatgctgaggcccctcctcctggccctggccaggccagctctgtggcccccagcagcaccaacgtggagagcagcgctgagggcgcccctcctcctggccctgcccctcctccagccaccagccaccccagggtcatccgcatcagccaccagagcgtggagcctgtggtgatgatgcacatgaacatccaggacagcggcacccagcccggcggcgtgcccagcgcccccaccggccccctgggccccccaggccacggccagaccctgggccagcaggtgcccggcttccccacagcccccaccagggtggtgattgcccggcccaccccaccccaggcccggcccagccaccctgggggcccccctgtgtctggcaccctgcagggcgccggcctgggcaccaatgccagcctggcccagatggtgtctggcctggtgggccagctgctgatgcagcctgtgctggtggcccagggcaccccaggcatggcccctcctccagccccagccacagccagcgccagcgctggcaccaccaacacagccaccacagctggccctgcccctgggggccctgcccagcccccacccaccccccagcccagcatggctgacctgcagttcagccagctgctgggcaacctgctgggccctgctggccctggggccggcggcagcggcgtggccagccccaccatcaccgtggccatgcctggggtgcctgccttcctgcagggcatgacagacttcctgcaggccacccagacagcccctcctcctcctcctcctcctcctcctcctcctccagcccctgagcagcagaccatgcctcctcctggcagccccagcggcggggccggcagccctgggggcctgggcctggagagcctgagccctgagttcttcacctctgtggtgcagggcgtgctgagcagcctgctgggcagcctgggcgcccgggccggcagcagcgagagcattgctgccttcatccagaggctgagcggcagcagcaacatctttgagcccggggctgatggagccctgggcttctttggagccctgctgagcctgctgtgccagaacttctccatggtggatgtggtgatgctgctgcacggccacttccagcccctgcagaggctgcagccccagctgcgctccttcttccaccagcactacctgggcggccaggagcccacccccagcaacatccgcatggccacccacaccctcatcaccggcctggaggagtatgtgcgggagagcttcagcctggtgcaggtgcagcccggggtggacatcatccgcaccaacctggagttcctgcaggagcagttcaacagcattgctgcccacgtgctgcactgcacagattctggctttggagcccggctgctggagctgtgcaaccagggcctgtttgaatgtctggccctgaacctgcactgcctgggcggccagcagatggagctggccgctgtgatcaatggccgcatccggaggatgagcagaggagtgaaccccagcctggtgtcctggctgaccaccatgatgggcctgcggctgcaggtggtgctggagcacatgcctgtgggcccagatgccatcctgcgctacgtgagaagagtgggggaccccccccagcccctgcctgaggagcccatggaggtgcagggcgctgagcgggccagccctgagccccagcgggagaatgccagccctgcccctggcaccacagctgaggaggccatgagccggggccccccaccagcccctgagggcggcagcagagatgagcaggatggagccagcgctgagacagagccctgggccgctgctgtgcccccagagtgggtgcccatcatccagcaggacatccagagccagaggaaggtgaagccccagccccccctgagtgatgcctacctgagcggcatgcctgccaagaggaggaagaccatgcagggcgagggcccccagctgctgctgtctgaggccgtgtcccgggccgccaaggccgccggggcccggcccctgaccagccctgagagcctgagccgggacctggaggcccctgaggtgcaggagagctaccggcagcagctgcggagtgacatccagaagaggctgcaggaggaccccaactacagcccccagcgcttccccaatgcccagagggcctttgctgatgacccctag

SEQ ID NO: 144904 - DNA, 3381 bp, synthetic construct; identical to SEQ ID NO: 144903
  misc_feature 1..3381: note = Description of Artificial Sequence: Synthetic coding sequence
  source 1..3381: mol_type = other DNA

SEQ ID NO: 144905 - DNA, 3381 bp, synthetic construct; identical to SEQ ID NO: 144903
  misc_feature 1..3381: note = Description of Artificial Sequence: Synthetic coding sequence
  source 1..3381: mol_type = other DNA

SEQ ID NO: 144906 - DNA, 3489 bp, synthetic construct
  misc_feature 1..3489: note = Description of Artificial Sequence: Synthetic coding sequence
  source 1..3489: mol_type = other DNA
atggagcccaatgacagcaccagcacagctgtggaggagccagacagcctggaggtgctggtgaagaccctggacagccagaccaggaccttcatcgtgggcgcccagatgaatgtgaaggagttcaaggagcacatcgccgcctctgtgtccatccccagcgagaagcagaggctcatctaccagggccgggtgctgcaggatgacaagaagctgcaggagtacaacgtgggcggcaaggtgatccacctggtggagcgggccccaccccagacccacctgcccagcggggccagcagcggcaccggcagcgccagcgccacccatggaggcggcagccccccaggcacccggggccctggggcctctgtgcatgacagaaatgccaacagctatgtgatggtgggcaccttcaacctgcccagtgatggcagcgctgtggatgtgcacatcaacatggagcaggcccccatccagagcgagccccgggtgcggctggtgatggcccagcacatgatccgggacatccagaccctgctgagcaggatggagtgccggggcggcccccagccccagcacagccagcccccaccccagcccccagctgtgaccccagagcctgtggccctgagcagccagaccagcgagcctgtggagagcgaggccccaccccgggagcccatggaggccgaggaggtggaggagcgggccccagcccagaaccctgagctgaccccaggccctgccccagctggccccaccccagcccctgagaccaatgcccccaaccaccccagccctgcagaatatgtggaggtgctgcaggagctgcagaggctggagagccggctgcagcccttcctgcagcgctactatgaggtgctgggcgccgccgccaccacagactacaacaacaaccacgagggccgggaggaggaccagaggctcatcaacctggtgggggagagcctgcggctgctgggcaacacctttgtggccctgagtgacctgcgctgcaacctggcctgcaccccacccaggcacctgcacgtggtgcggcccatgagccactacaccacccccatggtgctgcagcaggccgccatccccatccagatcaacgtgggcaccaccgtgaccatgactggaaatggcacccggcccccacccaccccaaatgctgaggcccctcctcctggccctggccaggccagctctgtggcccccagcagcaccaacgtggagagcagcgctgagggcgcccctcctcctggccctgcccctcctccagccaccagccaccccagggtcatccgcatcagccaccagagcgtggagcctgtggtgatgatgcacatgaacatccaggacagcggcacccagcccggcggcgtgcccagcgcccccaccggccccctgggccccccaggccacggccagaccctgggcagcaccctcatccagctgcccagcctgcccccagagttcatgcatgctgtggcccaccagatcacccaccaggccatggtggccgctgtggccagcgctgctgctggccagcaggtgcccggcttccccacagcccccaccagggtggtgattgcccggcccaccccaccccaggcccggcccagccaccctgggggcccccctgtgtctggcaccctgcagggcgccggcctgggcaccaatgccagcctggcccagatggtgtctggcctggtgggccagctgctgatgcagcctgtgctggtggcccagggcaccccaggcatggcccctcctccagccccagccacagccagcgccagcgctggcaccaccaacacagccaccacagctggccctgcccctgggggccctgcccagcccccacccaccccccagcccagcatggctgacctgcagttcagccagctgctgggcaacctgctgggccctgctggccctggggccggcggcagcggcgtggccagccccaccatcaccgtggccatgcctggggtgcctgccttcctgcagggcatgacagacttcctgcaggccacccagacagcccctcctcctcctcctcctcctcctcctcctcctccagcccctgagcagcagaccatgcctcctcctggcagccccagcggcggggccggcagccctgggggcctgggcctggagagcctgagccctgagttcttcacctctgtggtgcagggcgtgctgagcagcctgctgggcagcctgggcgcccgggccggcagcagcgagagcattgctgccttcatccagaggctgagcggcagcagcaacatctttgagcccggggctgatggagccctgggcttctttggagccctgctgagcctgctgtgccagaacttctccatggtggatgtggtgatgctgctgcacggccacttccagcccctgcagaggctgcagccccagctgcgctccttcttccaccagcactacctgggcggccaggagcccacccccagcaacatccgcatggccacccacaccctcatcaccggcctggaggagtatgtgcgggagagcttcagcctggtgcaggtgcagcccggggtggacatcatccgcaccaacctggagttcctgcaggagcagttcaacagcattgctgcccacgtgctgcactgcacagattctggctttggagcccggctgctggagctgtgcaaccagggcctgtttgaatgtctggccctgaacctgcactgcctgggcggccagcagatggagctggccgctgtgatcaatggccgcatccggaggatgagcagaggagtgaaccccagcctggtgtcctggctgaccaccatgatgggcctgcggctgcaggtggtgctggagcacatgcctgtgggcccagatgccatcctgcgctacgtgagaagagtgggggaccccccccagcccctgcctgaggagcccatggaggtgcagggcgctgagcgggccagccctgagccccagcgggagaatgccagccctgcccctggcaccacagctgaggaggccatgagccggggccccccaccagcccctgagggcggcagcagagatgagcaggatggagccagcgctgagacagagccctgggccgctgctgtgcccccagagtgggtgcccatcatccagcaggacatccagagccagaggaaggtgaagccccagccccccctgagtgatgcctacctgagcggcatgcctgccaagaggaggaagaccatgcagggcgagggcccccagctgctgctgtctgaggccgtgtcccgggccgccaaggccgccggggcccggcccctgaccagccctgagagcctgagccgggacctggaggcccctgaggtgcaggagagctaccggcagcagctgcggagtgacatccagaagaggctgcaggaggaccccaactacagcccccagcgcttccccaatgcccagagggcctttgctgatgacccctag

SEQ ID NO: 144907 - DNA, 738 bp, synthetic construct
  misc_feature 1..738: note = Description of Artificial Sequence: Synthetic coding sequence
  source 1..738: mol_type = other DNA
cctcccaggcacctgcacgtggtgcggcccatgagccactacaccacccccatggtgctgcagcaggccgccatccccatccagatcaacgtgggcaccaccgtgaccatgacaggccctgcccctcctccagccaccagccaccccagggtcatccgcatcagccaccagagcgtggagcctgtggtgatgatgcacatgaacatccaggacagcggcacccagcccggcggcgtgcccagcgcccccaccggccccctgggccccccaggccacggccagaccctgggccagcaggtgcccggcttccccacagcccccaccagggtggtgattgcccggcccaccccaccccaggcccggcccagccaccctgggggcccccctgtgtctggcaccctgcagggcgccggcctgggcaccaatgccagcctggcccagatggtgtctggcctggtgggccagctgctgatgcagcctgtgctggtggcccagggcaccccaggcatggcccctcctccagccccagccacagccagcgccagcgctggcaccaccaacacagccaccacagctggccctgcccctgggggccctgcccagcccccacccaccccccagcccagcatggctgacctgcagttcagccagctgctgggcaacctgctgggccctgctggccctggggccggcggcagcggcgtggccagccccaccatcaccgtggccatgccctag

SEQ ID NO: 144908 - DNA, 3381 bp, synthetic construct
  misc_feature 1..3381: note = Description of Artificial Sequence: Synthetic coding sequence
  source 1..3381: mol_type = other DNA
atggagcccaatgacagcaccagcacagctgtggaggagccagacagcctggaggtgctggtgaagaccctggacagccagaccaggaccttcatcgtgggcgcccagatgaatgtgaaggagttcaaggagcacatcgccgcctctgtgtccatccccagcgagaagcagaggctcatctaccagggccgggtgctgcaggatgacaagaagctgcaggagtacaacgtgggcggcaaggtgatccacctggtggagcgggccccaccccagacccacctgcccagcggggccagcagcggcaccggcagcgccagcgccacccatggaggcggcagccccccaggcacccggggccctggggcctctgtgcatgacagaaatgccaacagctatgtgatggtgggcaccttcaacctgcccagtgatggcagcgctgtggatgtgcacatcaacatggagcaggcccccatccagagcgagccccgggtgcggctggtgatggcccagcacatgatccgggacatccagaccctgctgagcaggatggagtgccggggcggcccccagccccagcacagccagcccccaccccagcccccagctgtgaccccagagcctgtggccctgagcagccagaccagcgagcctgtggagagcgaggccccaccccgggagcccatggaggccgaggaggtggaggagcgggccccagcccagaaccctgagctgaccccaggccctgccccagctggccccaccccagcccctgagaccaatgcccccaaccaccccagccctgcagaatatgtggaggtgctgcaggagctgcagaggctggagagccggctgcagcccttcctgcagcgctactatgaggtgctgggcgccgccgccaccacagactacaacaacaaccacgagggccgggaggaggaccagaggctcatcaacctggtgggggagagcctgcggctgctgggcaacacctttgtggccctgagtgacctgcgctgcaacctggcctgcaccccacccaggcacctgcacgtggtgcggcccatgagccactacaccacccccatggtgctgcagcaggccgccatccccatccagatcaacgtgggcaccaccgtgaccatgactggaaatggcacccggcccccacccaccccaaatgctgaggcccctcctcctggccctggccaggccagctctgtggcccccagcagcaccaacgtggagagcagcgctgagggcgcccctcctcctggccctgcccctcctccagccaccagccaccccagggtcatccgcatcagccaccagagcgtggagcctgtggtgatgatgcacatgaacatccaggacagcggcacccagcccggcggcgtgcccagcgcccccaccggccccctgggccccccaggccacggccagaccctgggccagcaggtgcccggcttccccacagcccccaccagggtggtgattgcccggcccaccccaccccaggcccggcccagccaccctgggggcccccctgtgtctggcaccctgcagggcgccggcctgggcaccaatgccagcctggcccagatggtgtctggcctggtgggccagctgctgatgcagcctgtgctggtggcccagggcaccccaggcatggcccctcctccagccccagccacagccagcgccagcgctggcaccaccaacacagccaccacagctggccctgcccctgggggccctgcccagcccccacccaccccccagcccagcatggctgacctgcagttcagccagctgctgggcaacctgctgggccctgctggccctggggccggcggccctggggtggccagccccaccatcaccgtggccatgcctggggtgcctgccttcctgcagggcatgacagacttcctgcaggccacccagacagcccctcctcctcctcctcctcctcctcctcctcctccagcccctgagcagcagaccatgcctcctcctggcagccccagcggcggggccggcagccctgggggcctgggcctggagagcctgagccctgagttcttcacctctgtggtgcagggcgtgctgagcagcctgctgggcagcctgggcgcccgggccggcagcagcgagagcattgctgccttcatccagaggctgagcggcagcagcaacatctttgagcccggggctgatggagccctgggcttctttggagccctgctgagcctgctgtgccagaacttctccatggtggatgtggtgatgctgctgcacggccacttccagcccctgcagaggctgcagccccagctgcgctccttcttccaccagcactacctgggcggccaggagcccacccccagcaacatccgcatggccacccacaccctcatcaccggcctggaggagtatgtgcgggagagcttcagcctggtgcaggtgcagcccggggtggacatcatccgcaccaacctggagttcctgcaggagcagttcaacagcattgctgcccacgtgctgcactgcacagattctggctttggagcccggctgctggagctgtgcaaccagggcctgtttgaatgtctggccctgaacctgcactgcctgggcggccagcagatggagctggccgctgtgatcaatggccgcatccggaggatgagcagaggagtgaaccccagcctggtgtcctggctgaccaccatgatgggcctgcggctgcaggtggtgctggagcacatgcctgtgggcccagatgccatcctgcgctacgtgagaagagtgggggaccccccccagcccctgcctgaggagcccatggaggtgcagggcgctgagcgggccagccctgagccccagcgggagaatgccagccctgcccctggcaccacagctgaggaggccatgagccggggccccccaccagcccctgagggcggcagcagagatgagcaggatggagccagcgctgagacagagccctgggccgctgctgtgcccccagagtgggtgcccatcatccagcaggacatccagagccagaggaaggtgaagccccagccccccctgagtgatgcctacctgagcggcatgcctgccaagaggaggaagaccatgcagggcgagggcccccagctgctgctgtctgaggccgtgtcccgggccgccaaggccgccggggcccggcccctgaccagccctgagagcctgagccgggacctggaggcccctgaggtgcaggagagctaccggcagcagctgcggagtgacatccagaagaggctgcaggaggaccccaactacagcccccagcgcttccccaatgcccagagggcctttgctgatgacccctag

SEQ ID NO: 144909 - DNA, 789 bp, synthetic construct
  misc_feature 1..789: note = Description of Artificial Sequence: Synthetic coding sequence
  source 1..789: mol_type = other DNA
atggagcccaatgacagcaccagcacagctgtggaggagccagacagcctggaggtgctggtgaagaccctggacagccagaccaggaccttcatcgtgggcgcccagatgaatgtgaaggagttcaaggagcacatcgccgcctctgtgtccatccccagcgagaagcagaggctcatctaccagggccgggtgctgcaggatgacaagaagctgcaggagtacaacgtgggcggcaaggtgatccacctggtggagcgggccccaccccagacccacctgcccagcggggccagcagcggcaccggcagcgccagcgccacccatggaggcggcagccccccaggcacccggggccctggggcctctgtgcatgacagaaatgccaacagctatgtgatggtgggcaccttcaacctgcccagtgatggcagcgctgtggatgtgcacatcaacatggagcaggcccccatccagagcgagccccgggtgcggctggtgatggcccagcacatgatccgggacatccagaccctgctgagcaggatggagtgccggggcggcccccagccccagcacagccagcccccaccccagcccccagctgtgaccccagagcctgtggccctgagcagccagaccagcgagcctgtggagagcgaggccccaccccgggagcccatggaggccgaggaggtggaggagcgggccccagcccagaaccctgagctgaccccaggccctgccccagctggccccaccccagcccctgagaccaatgccccctag

SEQ ID NO: 144910 - DNA, 717 bp, synthetic construct
  misc_feature 1..717: note = Description of Artificial Sequence: Synthetic coding sequence
  source 1..717: mol_type = other DNA
agcagcgctgagggcgcccctcctcctggccctgcccctcctccagccaccagccaccccagggtcatccgcatcagccaccagagcgtggagcctgtggtgatgatgcacatgaacatccagggccccctgagcctgagcccctgcccagacagcggcacccagcccggcggcgtgcccagcgcccccaccggccccctgggccccccaggccacggccagaccctgggccagcaggtgcccggcttccccacagcccccaccagggtggtgattgcccggcccaccccaccccaggcccggcccagccaccctgggggcccccctgtgtctggcaccctgcagggcgccggcctgggcaccaatgccagcctggcccagatggtgtctggcctggtgggccagctgctgatgcagcctgtgctggtggcccagggcaccccaggcatggcccctcctccagccccagccacagccagcgccagcgctggcaccaccaacacagccaccacagctggccctgcccctgggggccctgcccagcccccacccaccccccagcccagcatggctgacctgcagttcagccagctgctgggcaacctgctgggccctgctggccctggggccggcggccctggggtggccagccccaccatcaccgtggccatgcctggggtgcctgccttcctgcagggcatgacagacttcctgtag

SEQ ID NO: 144911 - DNA, 3381 bp, synthetic construct; identical to SEQ ID NO: 144908
  misc_feature 1..3381: note = Description of Artificial Sequence: Synthetic coding sequence
  source 1..3381: mol_type = other DNA

SEQ ID NO: 144912 - DNA, 648 bp, synthetic construct
  misc_feature 1..648: note = Description of Artificial Sequence: Synthetic coding sequence
  source 1..648: mol_type = other DNA
atggagcccaatgacagcaccagcacagctgtggaggagccagacagcctggaggtgctggtgaagaccctggacagccagaccaggaccttcatcgtgggcgcccagatgaatgtgaaggagttcaaggagcacatcgccgcctctgtgtccatccccagcgagaagcagaggctcatctaccagggccgggtgctgcaggatgacaagaagctgcaggagtacaacgtgggcggcaaggtgatccacctggtggagcgggccccaccccagacccacctgcccagcggggccagcagcggcaccggcagcgccagcgccacccatggaggcggcagccccccaggcacccggggccctggggcctctgtgcatgacagaaatgccaacagctatgtgatggtgggcaccttcaacctgcccagcgagccccgggtgcggctggtgatggcccagcacatgatccgggacatccagaccctgctgagcaggatggagtgccggggcggcccccagccccagcacagccagcccccaccccagcccccagctgtgaccccagagcctgtggccctgagcagccagaccagcgagcctgtggagagcgaggccccaccccgggagcccatggaggccgaggaggtgtag

SEQ ID NO: 144913 - DNA, 789 bp, synthetic construct; identical to SEQ ID NO: 144909
  misc_feature 1..789: note = Description of Artificial Sequence: Synthetic coding sequence
  source 1..789: mol_type = other DNA

SEQ ID NO: 144914 - DNA, 2232 bp, synthetic construct
  misc_feature 1..2232: note = Description of Artificial Sequence: Synthetic coding sequence
  source 1..2232: mol_type = other DNA
atggagcccaatgacagcaccagcacagctgtggaggagccagacagcctggaggtgctggtgaagaccctggacagccagaccaggaccttcatcgtgggcgcccagatgaatgtgaaggagttcaaggagcacatcgccgcctctgtgtccatccccagcgagaagcagaggctcatctaccagggccgggtgctgcaggatgacaagaagctgcaggagtacaacgtgggcggcaaggtgatccacctggtggagcgggccccaccccagacccacctgcccagcggggccagcagcggcaccggcagcgccagcgccacccatggaggcggcagccccccaggcacccggggccctggggcctctgtgcatgacagaaatgccaacagctatgtgatggtgggcaccttcaacctgcccagtgatggcagcgctgtggatgtgcacatcaacatggagcaggcccccatccagagcgagccccgggtgcggctggtgatggcccagcacatgatccgggacatccagaccctgctgagcaggatggagtgccggggcggcccccagccccagcacagccagcccccaccccagcccccagctgtgaccccagagcctgtggccctgagcagccagaccagcgagcctgtggagagcgaggccccaccccgggagcccatggaggccgaggaggtggaggagcgggccccagcccagaaccctgagctgaccccaggccctgccccagctggccccaccccagcccctgagaccaatgcccccaaccaccccagccctgcagaatatgtggaggtgctgcaggagctgcagaggctggagagccggctgcagcccttcctgcagcgctactatgaggtgctgggcgccgccgccaccacagactacaacaacaaccacgagggccgggaggaggaccagaggctcatcaacctggtgggggagagcctgcggctgctgggcaacacctttgtggccctgagtgacctgcgctgcaacctggcctgcaccccacccaggcacctgcacgtggtgcggcccatgagccactacaccacccccatggtgctgcagcaggccgccatccccatccagatcaacgtgggcaccaccgtgaccatgactggaaatggcacccggcccccacccaccccaaatgctgaggcccctcctcctggccctggccaggccagctctgtggcccccagcagcaccaacgtggagagcagcgctgagggcgcccctcctcctggccctgcccctcctccagccaccagccaccccagggtcatccgcatcagccaccagagcgtggagcctgtggtgatgatgcacatgaacatccaggacagcggcacccagcccggcggcgtgcccagcgcccccaccggccccctgggccccccaggccacggccagaccctgggcagcaccctcatccagctgcccagcctgcccccagagttcatgcatgctgtggcccaccagatcacccaccaggccatggtggccgctgtggccagcgctgctgctggccagcaggtgcccggcttccccacagcccccaccagggtggtgattgcccggcccaccccaccccaggcccggcccagccaccctgggggcccccctgtgtctggcaccctgcagggcgccggcctgggcaccaatgccagcctggcccagatggtgtctggcctggtgggccagctgctgatgcagcctgtgctggtggcccagggcaccccaggcatggcccctcctccagccccagccacagccagcgccagcgctggcaccaccaacacagccaccacagctggccctgcccctgggggccctgcccagcccccacccaccccccagcccagcatggctgacctgcagttcagccagctgctgggcaacctgctgggccctgctggccctggggccggcggccctggggtggccagccccaccatcaccgtggccatgcctggggtgcctgccttcctgcagggcatgacagacttcctgcaggccacccagacagcccctcctcctcctcctcctcctcctcctcctcctccagcccctgagcagcagaccatgcctcctcctggcagccccagcggcggggccggcagccctgggggcctgggcctggagagcctgagccctgagttcttcacctctgtggtgcagggcgtgctgagcagcctgctgtag

SEQ ID NO: 144915 - DNA, 3381 bp, synthetic construct; identical to SEQ ID NO: 144908
  misc_feature 1..3381: note = Description of Artificial Sequence: Synthetic coding sequence
  source 1..3381: mol_type = other DNA

SEQ ID NO: 144916 - DNA, 3381 bp, synthetic construct; identical to SEQ ID NO: 144908
  misc_feature 1..3381: note = Description of Artificial Sequence: Synthetic coding sequence
  source 1..3381: mol_type = other DNA

SEQ ID NO: 144917 - DNA, 411 bp, synthetic construct
  misc_feature 1..411: note = Description of Artificial Sequence: Synthetic coding sequence
  source 1..411: mol_type = other DNA
tgaagaatgagccggggcgtgaaccccagcctggtgtcctggctgaccaccatgatgggcctgcggctgcaggtggtgctggagcacatgcctgtgggcccagatgccatcctgcgctacgtgcggcgggtgggggaccccccccagcccctgcctgaggagcccatggaggtgcagggcgctgagcgggccagccctgagccccaggagtgggtgcccatcatccagcaggacatccagagccagaggaaggtgaagccccagccccccctgagtgatgcctacctgagcggcatgcctgccaagaggaggaagctgcggagtgacatccagaagaggctgcaggaggaccccaactacagcccccagcgcttccccaatgcccagagggcctttgctgatgacccctag

SEQ ID NO: 144918 - DNA, 789 bp, synthetic construct; identical to SEQ ID NO: 144909
  misc_feature 1..789: note = Description of Artificial Sequence: Synthetic coding sequence
  source 1..789: mol_type = other DNA

SEQ ID NO: 144919 - DNA, 735 bp, synthetic construct
  misc_feature 1..735: note = Description of Artificial Sequence: Synthetic coding sequence
  source 1..735: mol_type = other DNA
atggagcccaatgacagcaccagcacagctgtggaggagccagacagcctggaggtgctggtgaagaccctggacagccagaccaggaccttcatcgtgggcgcccagatgaatgtgaaggagttcaaggagcacatcgccgcctctgtgtccatccccagcgagaagcagaggctcatctaccagggccgggtgctgcaggatgacaagaagctgcaggagtacaacgtgggcggcaaggtgatccacctggtggagcgggccccaccccagacccacctgcccagcggggccagcagcggcaccggcagcgccagcgccacccatggaggcggcagccccccaggcacccggggccctggggcctctgtgcatgacagaaatgccaacagctatgtgatggtgggcaccttcaacctgcccagcgagccccgggtgcggctggtgatggcccagcacatgatccgggacatccagaccctgctgagcaggatggagtgccggggcggcccccagccccagcacagccagcccccaccccagcccccagctgtgaccccagagcctgtggccctgagcagccagaccagcgagcctgtggagagcgaggccccaccccgggagcccatggaggccgaggaggtggaggagcgggccccagcccagaaccctgagctgaccccaggccctgccccagctggccccaccccagcccctgagaccaatgccccctag

SEQ ID NO: 144920 - DNA, 594 bp, synthetic construct
  misc_feature 1..594: note = Description of Artificial Sequence: Synthetic coding sequence
  source 1..594: mol_type = other DNA
atggagcccaatgacagcaccagcacagctgtggaggagccagacagcctggaggtgctggtgaagaccctggacagccagaccaggaccttcatcgtgggcgcccagatgaatgtgaaggagttcaaggagcacatcgccgcctctgtgtccatccccagcgagaagcagaggctcatctaccagggccgggtgctgcaggatgacaagaagctgcaggagtacaacgtgggcggcaaggtgatccacctggtggagcgggccccaccccagacccacctgcccagcggggccagcagcggcaccggcagcgccagcgccacccatggaggcggcagccccccaggcacccggggccctggggcctctgtgcatgacagaaatgccaacagctatgtgatggtgggcaccttcaacctgcccagtgatggcagcgctgtggatgtgcacatcaacatggagcaggcccccatccagagcgagccccgggtgcggctggtgatggcccagcacatgatccgggacatccagaccctgctgagcaggatggagtgccggggcggcccccagccccagcacagccagcccccatag

SEQ ID NO: 144921 - DNA, 621 bp, synthetic construct
  misc_feature 1..621: note = Description of Artificial Sequence: Synthetic coding sequence
  source 1..621: mol_type = other DNA
atggagcccaatgacagcaccagcacagctgtggaggagccagacagcctggaggtgctggtgaagaccctggacagccagaccaggaccttcatcgtgggcgcccagatgaatgtgaaggagttcaaggagcacatcgccgcctctgtgtccatccccagcgagaagcagaggctcatctaccagggccgggtgctgcaggatgacaagaagctgcaggagtacaacgtgggcggcaaggtgatccacctggtggagcgggccccaccccagacccacctgcccagcggggccagcagcggcaccggcagcgccagcgccacccatggaggcggcagccccccaggcacccggggccctggggcctctgtgcatgacagaaatgccaacagctatgtgatggtgggcaccttcaacctgcccagcgagccccgggtgcggctggtgatggcccagcacatgatccgggacatccagaccctgctgagcaggatggagtgccggggcggcccccagccccagcacagccagcccccaccccagcccccagctgtgaccccagagcctgtggccctgagcagccagaccagcgagcctgtggagagcgaggcccctccttag

SEQ ID NO: 144922 - DNA, 735 bp, synthetic construct; identical to SEQ ID NO: 144919
  misc_feature 1..735: note = Description of Artificial Sequence: Synthetic coding sequence
  source 1..735: mol_type = other DNA

SEQ ID NO: 144923 - DNA, 3381 bp, synthetic construct; identical to SEQ ID NO: 144903
  misc_feature 1..3381: note = Description of Artificial Sequence: Synthetic coding sequence
  source 1..3381: mol_type = other DNA

SEQ ID NO: 144924 - DNA, 735 bp, synthetic construct; identical to SEQ ID NO: 144919
  misc_feature 1..735: note = Description of Artificial Sequence: Synthetic coding sequence
  source 1..735: mol_type = other DNA

SEQ ID NO: 144925 - DNA, 717 bp, synthetic construct
  misc_feature 1..717: note = Description of Artificial Sequence: Synthetic coding sequence
  source 1..717: mol_type = other DNA
agcagcgctgagggcgcccctcctcctggccctgcccctcctccagccaccagccaccccagggtcatccgcatcagccaccagagcgtggagcctgtggtgatgatgcacatgaacatccagggccccctgagcctgagcccctgcccagacagcggcacccagcccggcggcgtgcccagcgcccccaccggccccctgggccccccaggccacggccagaccctgggccagcaggtgcccggcttccccacagcccccaccagggtggtgattgcccggcccaccccaccccaggcccggcccagccaccctgggggcccccctgtgtctggcaccctgcagggcgccggcctgggcaccaatgccagcctggcccagatggtgtctggcctggtgggccagctgctgatgcagcctgtgctggtggcccagggcaccccaggcatggcccctcctccagccccagccacagccagcgccagcgctggcaccaccaacacagccaccacagctggccctgcccctgggggccctgcccagcccccacccaccccccagcccagcatggctgacctgcagttcagccagctgctgggcaacctgctgggccctgctggccctggggccggcggcagcggcgtggccagccccaccatcaccgtggccatgcctggggtgcctgccttcctgcagggcatgacagacttcctgtag

SEQ ID NO: 144926 - DNA, 735 bp, synthetic construct; identical to SEQ ID NO: 144919
  misc_feature 1..735: note = Description of Artificial Sequence: Synthetic coding sequence
  source 1..735: mol_type = other DNA

SEQ ID NO: 144927 - DNA, 2232 bp, synthetic construct
  misc_feature 1..2232: note = Description of Artificial Sequence: Synthetic coding sequence
  source 1..2232: mol_type = other DNA
atggagcccaatgacagcaccagcacagctgtggaggagccagacagcctggaggtgctggtgaagaccctggacagccagaccaggaccttcatcgtgggcgcccagatgaatgtgaaggagttcaaggagcacatcgccgcctctgtgtccatccccagcgagaagcagaggctcatctaccagggccgggtgctgcaggatgacaagaagctgcaggagtacaacgtgggcggcaaggtgatccacctggtggagcgggccccaccccagacccacctgcccagcggggccagcagcggcaccggcagcgccagcgccacccatggaggcggcagccccccaggcacccggggccctggggcctctgtgcatgacagaaatgccaacagctatgtgatggtgggcaccttcaacctgcccagtgatggcagcgctgtggatgtgcacatcaacatggagcaggcccccatccagagcgagccccgggtgcggctggtgatggcccagcacatgatccgggacatccagaccctgctgagcaggatggagtgccggggcggcccccagccccagcacagccagcccccaccccagcccccagctgtgaccccagagcctgtggccctgagcagccagaccagcgagcctgtggagagcgaggccccaccccgggagcccatggaggccgaggaggtggaggagcgggccccagcccagaaccctgagctgaccccaggccctgccccagctggccccaccccagcccctgagaccaatgcccccaaccaccccagccctgcagaatatgtggaggtgctgcaggagctgcagaggctggagagccggctgcagcccttcctgcagcgctactatgaggtgctgggcgccgccgccaccacagactacaacaacaaccacgagggccgggaggaggaccagaggctcatcaacctggtgggggagagcctgcggctgctgggcaacacctttgtggccctgagtgacctgcgctgcaacctggcctgcaccccacccaggcacctgcacgtggtgcggcccatgagccactacaccacccccatggtgctgcagcaggccgccatccccatccagatcaacgtgggcaccaccgtgaccatgactggaaatggcacccggcccccacccaccccaaatgctgaggcccctcctcctggccctggccaggccagctctgtggcccccagcagcaccaacgtggagagcagcgctgagggcgcccctcctcctggccctgcccctcctccagccaccagccaccccagggtcatccgcatcagccaccagagcgtggagcctgtggtgatgatgcacatgaacatccaggacagcggcacccagcccggcggcgtgcccagcgcccccaccggccccctgggccccccaggccacggccagaccctgggcagcaccctcatccagctgcccagcctgcccccagagttcatgcatgctgtggcccaccagatcacccaccaggccatggtggccgctgtggccagcgctgctgctggccagcaggtgcccggcttccccacagcccccaccagggtggtgattgcccggcccaccccaccccaggcccggcccagccaccctgggggcccccctgtgtctggcaccctgcagggcgccggcctgggcaccaatgccagcctggcccagatggtgtctggcctggtgggccagctgctgatgcagcctgtgctggtggcccagggcaccccaggcatggcccctcctccagccccagccacagccagcgccagcgctggcaccaccaacacagccaccacagctggccctgcccctgggggccctgcccagcccccacccaccccccagcccagcatggctgacctgcagttcagccagctgctgggcaacctgctgggccctgctggccctggggccggcggcagcggcgtggccagccccaccatcaccgtggccatgcctggggtgcctgccttcctgcagggcatgacagacttcctgcaggccacccagacagcccctcctcctcctcctcctcctcctcctcctcctccagcccctgagcagcagaccatgcctcctcctggcagccccagcggcggggccggcagccctgggggcctgggcctggagagcctgagccctgagttcttcacctctgtggtgcagggcgtgctgagcagcctgctgtag

SEQ ID NO: 144928 - DNA, 477 bp, synthetic construct
  misc_feature 1..477: note = Description of Artificial Sequence: Synthetic coding sequence
  source 1..477: mol_type = other DNA
atggagcccaatgacagcaccagcacagctgtggaggagccagacagcctggaggtgctggtgaagaccctggacagccagaccaggaccttcatcgtgggcgcccagatgaatgtgaaggagttcaaggagcacatcgccgcctctgtgtccatccccagcgagaagcagaggctcatctaccagggccgggtgctgcaggatgacaagaagctgcaggagtacaacgtgggcggcaaggtgatccacctggtggagcgggccccaccccagacccacctgcccagcggggccagcagcggcaccggcagcgccagcgccacccatggaggcggcagccccccaggcacccggggccctggggcctctgtgcatgacagaaatgccaacagctatgtgatggtgggcaccttcaacctgcccagtgatggcagcgctgtggatgtgcacatcaacatggagcaggcccccatctag

SEQ ID NO: 144929 - DNA, 681 bp, synthetic construct
  misc_feature 1..681: note = Description of Artificial Sequence: Synthetic coding sequence
  source 1..681: mol_type = other DNA
tgaagcggctttggagcccggctgctggagctgtgcaaccagggcctgtttgagtgcctggccctgaacctgcactgcctgggcggccagcagatggagctggccgccgtcatcaatggccgcatccggaggatgagccggggcgtgaaccccagcctggtgtcctggctgaccaccatgatgggcctgcggctgcaggtggtgctggagcacatgcctgtgggcccagatgccatcctgcgctacgtgcggcgggtgggggaccccccccagcccctgcctgaggagcccatggaggtgcagggcgctgagcgggccagccctgagccccagagagaaaatgccagccctgcccctggcaccacagctgaggaggccatgagccggggccccccaccagcccctgagggcggcagcagagatgagcaggatggagccagcgctgagacagagccctgggccgctgctgtgcccccagagtgggtgcccatcatccagcaggacatccagagccagaggaaggtgaagccccagccccccctgagtgatgcctacctgagcggcatgcctgccaagaggaggaagctgcggagtgacatccagaagaggctgcaggaggaccccaactacagcccccagcgcttccccaatgcccagagggcctttgctgatgacccctag

SEQ ID NO: 144930 - DNA, 717 bp, synthetic construct; identical to SEQ ID NO: 144910
  misc_feature 1..717: note = Description of Artificial Sequence: Synthetic coding sequence
  source 1..717: mol_type = other DNA

SEQ ID NO: 144931 - DNA, 3381 bp, synthetic construct; identical to SEQ ID NO: 144903
  misc_feature 1..3381: note = Description of Artificial Sequence: Synthetic coding sequence
  source 1..3381: mol_type = other DNA

SEQ ID NO: 144932 - DNA, 789 bp, synthetic construct; identical to SEQ ID NO: 144909
  misc_feature 1..789: note = Description of Artificial Sequence: Synthetic coding sequence
  source 1..789: mol_type = other DNA

SEQ ID NO: 144933 - DNA, 477 bp, synthetic construct; identical to SEQ ID NO: 144928
  misc_feature 1..477: note = Description of Artificial Sequence: Synthetic coding sequence
  source 1..477: mol_type = other DNA

SEQ ID NO: 144934 - DNA, 777 bp, synthetic construct
  misc_feature 1..777: note = Description of Artificial Sequence: Synthetic coding sequence
  source 1..777: mol_type = other DNA
atggagcccaatgacagcaccagcacagctgtggaggagccagacagcctggaggtgctggtgaagaccctggacagccagaccaggaccttcatcgtgggcgcccagatgaatgtgaaggagttcaaggagcacatcgccgcctctgtgtccatccccagcgagaagcagaggctcatctaccagggccgggtgctgcaggatgacaagaagctgcaggagtacaacgtgggcggcaaggtgatccacctggtggagcgggccccaccccagacccacctgcccagcggggccagcagcggcaccggcagcgccagcgccacccatggaggcggcagccccccaggcacccggggccctggggcctctgtgcatgacagaaatgccaacagctatgtgatggtgggcaccttcaacctgcccagtgatggcagcgctgtggatgtgcacatcaacatggagcaggcccccatccagagcgagccccgggtgcggctggtgatggcccagcacatgatccgggacatccagaccctgctgagcaggatggagtgccggggcggcccccagccccagcacagccagcccccaccccagcccccagctgtgaccccagagcctgtggccctgagcagccagaccagcgagcctgtggagagcgaggccccaccccgggagcccatggaggccgaggaggtggaggagcgggccccagcccagaaccctgagctgaccccaggccctgccccagctggccccaccccagcccctgagtag

SEQ ID NO: 144935 - DNA, 735 bp, synthetic construct; identical to SEQ ID NO: 144919
  misc_feature 1..735: note = Description of Artificial Sequence: Synthetic coding sequence
  source 1..735: mol_type = other DNA

SEQ ID NO: 144936 - DNA, 1548 bp, synthetic construct
  misc_feature 1..1548: note = Description of Artificial Sequence: Synthetic coding sequence
  source 1..1548: mol_type = other DNA
atggagcccaatgacagcaccagcacagctgtggaggagccagacagcctggaggtgctggtgaagaccctggacagccagaccaggaccttcatcgtgggcgcccagatgaatgtgaaggagttcaaggagcacatcgccgcctctgtgtccatccccagcgagaagcagaggctcatctaccagggccgggtgctgcaggatgacaagaagctgcaggagtacaacgtgggcggcaaggtgatccacctggtggagcgggccccaccccagacccacctgcccagcggggccagcagcggcaccggcagcgccagcgccacccatggaggcggcagccccccaggcacccggggccctggggcctctgtgcatgacagaaatgccaacagctatgtgatggtgggcaccttcaacctgcccagtgatggcagcgctgtggatgtgcacatcaacatggagcaggcccccatccagagcgagccccgggtgcggctggtgatggcccagcacatgatccgggacatccagaccctgctgagcaggatggagtgccggggcggcccccagccccagcacagccagcccccaccccagcccccagctgtgaccccagagcctgtggccctgagcagccagaccagcgagcctgtggagagcgaggccccaccccgggagcccatggaggccgaggaggtggaggagcgggccccagcccagaaccctgagctgaccccaggccctgccccagctggccccaccccagcccctgagaccaatgcccccaaccaccccagccctgcagaatatgtggaggtgctgcaggagctgcagaggctggagagccggctgcagcccttcctgcagcgctactatgaggtgctgggcgccgccgccaccacagactacaacaacaaccacgagggccgggaggaggaccagaggctcatcaacctggtgggggagagcctgcggctgctgggcaacacctttgtggccctgagtgacctgcgctgcaacctggcctgcaccccacccaggcacctgcacgtggtgcggcccatgagccactacaccacccccatggtgctgcagcaggccgccatccccatccagatcaacgtgggcaccaccgtgaccatgactggaaatggcacccggcccccacccaccccaaatgctgaggcccctcctcctggccctggccaggccagctctgtggcccccagcagcaccaacgtggagagcagcgctgagggcgcccctcctcctggccctgcccctcctccagccaccagccaccccagggtcatccgcatcagccaccagagcgtggagcctgtggtgatgatgcacatgaacatccaggacagcggcacccagcccggcggcgtgcccagcgcccccaccggccccctgggccccccaggccacggccagaccctgggcagcaccctcatccagctgcccagcctgcccccagagttcatgcatgctgtggcccaccagatcacccaccaggccatggtggccgctgtggccagctag

SEQ ID NO: 144937 - DNA, 702 bp, synthetic construct
  misc_feature 1..702: note = Description of Artificial Sequence: Synthetic coding sequence
  source 1..702: mol_type = other DNA
atggagcccaatgacagcaccagcacagctgtggaggagccagacagcctggaggtgctggtgaagaccctggacagccagaccaggaccttcatcgtgggcgcccagatgaatgtgaaggagttcaaggagcacatcgccgcctctgtgtccatccccagcgagaagcagaggctcatctaccagggccgggtgctgcaggatgacaagaagctgcaggagtacaacgtgggcggcaaggtgatccacctggtggagcgggccccaccccagacccacctgcccagcggggccagcagcggcaccggcagcgccagcgccacccatggaggcggcagccccccaggcacccggggccctggggcctctgtgcatgacagaaatgccaacagctatgtgatggtgggcaccttcaacctgcccagtgatggcagcgctgtggatgtgcacatcaacatggagcaggcccccatccagagcgagccccgggtgcggctggtgatggcccagcacatgatccgggacatccagaccctgctgagcaggatggagaccctgccctacctgcagtgccggggcggcccccagccccagcacagccagcccccaccccagcccccagctgtgaccccagagcctgtggccctgagcagccagaccagcgagcctgtggagagcgaggccccaccccgggagccctag

SEQ ID NO: 144938 - DNA, 3381 bp, synthetic construct; identical to SEQ ID NO: 144908
  misc_feature 1..3381: note = Description of Artificial Sequence: Synthetic coding sequence
  source 1..3381: mol_type = other DNA

SEQ ID NO: 144939 - DNA, 789 bp, synthetic construct; identical to SEQ ID NO: 144909
  misc_feature 1..789: note = Description of Artificial Sequence: Synthetic coding sequence
  source 1..789: mol_type = other DNA

SEQ ID NO: 144940 - DNA, 411 bp, synthetic construct; identical to SEQ ID NO: 144917
  misc_feature 1..411: note = Description of Artificial Sequence: Synthetic coding sequence
  source 1..411: mol_type = other DNA

SEQ ID NO: 144941 - DNA, 558 bp, synthetic construct
  misc_feature 1..558: note = Description of Artificial Sequence: Synthetic coding sequence
  source 1..558: mol_type = other DNA
tgactggcctgcaccccacccaggcacctgcacgtggtgcggcccatgagccactacaccacccccatggtgctgcagcaggccgccatccccatccagatcaacgtgggcaccaccgtgaccatgactggaaatggcacccggcccccacccaccccaaatgctgaggcccctcctcctggccctggccaggccagctctgtggcccccagcagcaccaacgtggagagcagcgctgagggcgcccctcctcctggccctgcccctcctccagccaccagccaccccagggtcatccgcatcagccaccagagcgtggagcctgtggtgatgatgcacatgaacatccagggccagcaggtgcccggcttccccacagcccccaccagggtggtgattgcccggcccaccccaccccaggcccggcccagccaccctgggggcccccctgtgtctggcaccctgcagggcgccggcctgggcaccaatgccagcctggcccagatggtgtctggcctggtgggccagctgctgatgcagcctgtgctggtggcctag

SEQ ID NO: 144942 - DNA, 681 bp, synthetic construct; identical to SEQ ID NO: 144929
  misc_feature 1..681: note = Description of Artificial Sequence: Synthetic coding sequence
  source 1..681: mol_type = other DNA

SEQ ID NO: 144943 - DNA, 594 bp, synthetic construct; identical to SEQ ID NO: 144920
  misc_feature 1..594: note = Description of Artificial Sequence: Synthetic coding sequence
  source 1..594: mol_type = other DNA

SEQ ID NO: 144944 - DNA, 648 bp, synthetic construct; identical to SEQ ID NO: 144912
  misc_feature 1..648: note = Description of Artificial Sequence: Synthetic coding sequence
  source 1..648: mol_type = other DNA

SEQ ID NO: 144945 - DNA, 702 bp, synthetic construct; identical to SEQ ID NO: 144937
  misc_feature 1..702: note = Description of Artificial Sequence: Synthetic coding sequence
  source 1..702: mol_type = other DNA

SEQ ID NO: 144946 - DNA, 777 bp, synthetic construct; identical to SEQ ID NO: 144934
  misc_feature 1..777: note = Description of Artificial Sequence: Synthetic coding sequence
  source 1..777: mol_type = other DNA

SEQ ID NO: 144947 - DNA, 411 bp, synthetic construct; identical to SEQ ID NO: 144917
  misc_feature 1..411: note = Description of Artificial Sequence: Synthetic coding sequence
  source 1..411: mol_type = other DNA

SEQ ID NO: 144948 - DNA, 780 bp, synthetic construct
  misc_feature 1..780: note = Description of Artificial Sequence: Synthetic coding sequence
  source 1..780: mol_type = other DNA
atggagcccaatgacagcaccagcacagctgtggaggagccagacagcctggaggtgctggtgaagaccctggacagccagaccaggaccttcatcgtgggcgcccagatgaatgtgaaggagttcaaggagcacatcgccgcctctgtgtccatccccagcgagaagcagaggctcatctaccagggccgggtgctgcaggatgacaagaagctgcaggagtacaacgtgggcggcaaggtgatccacctggtggagcgggccccaccccagacccacctgcccagcggggccagcagcggcaccggcagcgccagcgccacccatggaggcggcagccccccaggcacccggggccctggggcctctgtgcatgacagaaatgccaacagctatgtgatggtgggcaccttcaacctgcccagtgatggcagcgctgtggatgtgcacatcaacatggagcaggcccccatccagagcgagccccgggtgcggctggtgatggcccagcacatgatccgggacatccagaccctgctgagcaggatggagtgccggggcggcccccagccccagcacagccagcccccaccccagcccccagctgtgaccccagagcctgtggccctgagcagccagaccagcgagcctgtggagagcgaggccccaccccgggagcccatggaggccgaggaggtggaggagcgggccccagcccagaaccctgagctgaccccaggccctgccccagctggccccaccccagcccctgagacctag

SEQ ID NO: 144949 - DNA, 2232 bp, synthetic construct; identical to SEQ ID NO: 144927
  misc_feature 1..2232: note = Description of Artificial Sequence: Synthetic coding sequence
  source 1..2232: mol_type = other DNA

SEQ ID NO: 144950 - DNA, 3399 bp, synthetic construct
  misc_feature 1..3399: note = Description of Artificial Sequence: Synthetic coding sequence
  source 1..3399: mol_type = other DNA
atggagcccaatgacagcaccagcacagctgtggaggagccagacagcctggaggtgctggtgaagaccctggacagccagaccaggaccttcatcgtgggcgcccagatgaatgtgaaggagttcaaggagcacatcgccgcctctgtgtccatccccagcgagaagcagaggctcatctaccagggccgggtgctgcaggatgacaagaagctgcaggagtacaacgtgggcggcaaggtgatccacctggtggagcgggccccaccccagacccacctgcccagcggggccagcagcggcaccggcagcgccagcgccacccatggaggcggcagccccccaggcacccggggccctggggcctctgtgcatgacagaaatgccaacagctatgtgatggtgggcaccttcaacctgcccagtgatggcagcgctgtggatgtgcacatcaacatggagcaggcccccatccagagcgagccccgggtgcggctggtgatggcccagcacatgatccgggacatccagaccctgctgagcaggatggagaccctgccctacctgcagtgccggggcggcccccagccccagcacagccagcccccaccccagcccccagctgtgaccccagagcctgtggccctgagcagccagaccagcgagcctgtggagagcgaggccccaccccgggagcccatggaggccgaggaggtggaggagcgggccccagcccagaaccctgagctgaccccaggccctgccccagctggccccaccccagcccctgagaccaatgcccccaaccaccccagccctgcagaatatgtggaggtgctgcaggagctgcagaggctggagagccggctgcagcccttcctgcagcgctactatgaggtgctgggcgccgccgccaccacagactacaacaacaaccacgagggccgggaggaggaccagaggctcatcaacctggtgggggagagcctgcggctgctgggcaacacctttgtggccctgagtgacctgcgctgcaacctggcctgcaccccacccaggcacctgcacgtggtgcggcccatgagccactacaccacccccatggtgctgcagcaggccgccatccccatccagatcaacgtgggcaccaccgtgaccatgactggaaatggcacccggcccccacccaccccaaatgctgaggcccctcctcctggccctggccaggccagctctgtggcccccagcagcaccaacgtggagagcagcgctgagggcgcccctcctcctggccctgcccctcctccagccaccagccaccccagggtcatccgcatcagccaccagagcgtggagcctgtggtgatgatgcacatgaacatccaggacagcggcacccagcccggcggcgtgcccagcgcccccaccggccccctgggccccccaggccacggccagaccctgggccagcaggtgcccggcttccccacagcccccaccagggtggtgattgcccggcccaccccaccccaggcccggcccagccaccctgggggcccccctgtgtctggcaccctgcagggcgccggcctgggcaccaatgccagcctggcccagatggtgtctggcctggtgggccagctgctgatgcagcctgtgctggtggcccagggcaccccaggcatggcccctcctccagccccagccacagccagcgccagcgctggcaccaccaacacagccaccacagctggccctgcccctgggggccctgcccagcccccacccaccccccagcccagcatggctgacctgcagttcagccagctgctgggcaacctgctgggccctgctggccctggggccggcggccctggggtggccagccccaccatcaccgtggccatgcctggggtgcctgccttcctgcagggcatgacagacttcctgcaggccacccagacagcccctcctcctcctcctcctcctcctcctcctcctccagcccctgagcagcagaccatgcctcctcctggcagccccagcggcggggccggcagccctgggggcctgggcctggagagcctgagccctgagttcttcacctctgtggtgcagggcgtgctgagcagcctgctgggcagcctgggcgcccgggccggcagcagcgagagcattgctgccttcatccagaggctgagcggcagcagcaacatctttgagcccggggctgatggagccctgggcttctttggagccctgctgagcctgctgtgccagaacttctccatggtggatgtggtgatgctgctgcacggccacttccagcccctgcagaggctgcagccccagctgcgctccttcttccaccagcactacctgggcggccaggagcccacccccagcaacatccgcatggccacccacaccctcatcaccggcctggaggagtatgtgcgggagagcttcagcctggtgcaggtgcagcccggggtggacatcatccgcaccaacctggagttcctgcaggagcagttcaacagcattgctgcccacgtgctgcactgcacagattctggctttggagcccggctgctggagctgtgcaaccagggcctgtttgaatgtctggccctgaacctgcactgcctgggcggccagcagatggagctggccgctgtgatcaatggccgcatccggaggatgagcagaggagtgaaccccagcctggtgtcctggctgaccaccatgatgggcctgcggctgcaggtggtgctggagcacatgcctgtgggcccagatgccatcctgcgctacgtgagaagagtgggggaccccccccagcccctgcctgaggagcccatggaggtgcagggcgctgagcgggccagccctgagccccagcgggagaatgccagccctgcccctggcaccacagctgaggaggccatgagccggggccccccaccagcccctgagggcggcagcagagatgagcaggatggagccagcgctgagacagagccctgggccgctgctgtgcccccagagtgggtgcccatcatccagcaggacatccagagccagaggaaggtgaagccccagccccccctgagtgatgcctacctgagcggcatgcctgccaagaggaggaagaccatgcagggcgagggcccccagctgctgctgtctgaggccgtgtcccgggccgccaaggccgccggggcccggcccctgaccagccctgagagcctgagccgggacctggaggcccctgaggtgcaggagagctaccggcagcagctgcggagtgacatccagaagaggctgcaggaggaccccaactacagcccccagcgcttccccaatgcccagagggcctttgctgatgacccctag

SEQ ID NO: 144951 - DNA, 594 bp, synthetic construct; identical to SEQ ID NO: 144920
  misc_feature 1..594: note = Description of Artificial Sequence: Synthetic coding sequence
  source 1..594: mol_type = other DNA

SEQ ID NO: 144952 - DNA, 735 bp, synthetic construct; identical to SEQ ID NO: 144919
  misc_feature 1..735: note = Description of Artificial Sequence: Synthetic coding sequence
  source 1..735: mol_type = other DNA

SEQ ID NO: 144953 - DNA, 594 bp, synthetic construct; identical to SEQ ID NO: 144920
  misc_feature 1..594: note = Description of Artificial Sequence: Synthetic coding sequence
  source 1..594: mol_type = other DNA

SEQ ID NO: 144954 - DNA, 1548 bp, synthetic construct; identical to SEQ ID NO: 144936
  misc_feature 1..1548: note = Description of Artificial Sequence: Synthetic coding sequence
  source 1..1548: mol_type = other DNA

SEQ ID NO: 144955 - DNA, 735 bp, synthetic construct; identical to SEQ ID NO: 144919
  misc_feature 1..735: note = Description of Artificial Sequence: Synthetic coding sequence
  source 1..735: mol_type = other DNA

SEQ ID NO: 144956 - DNA, 789 bp, synthetic construct; identical to SEQ ID NO: 144909
  misc_feature 1..789: note = Description of Artificial Sequence: Synthetic coding sequence
  source 1..789: mol_type = other DNA

SEQ ID NO: 144957 - DNA, 789 bp, synthetic construct; identical to SEQ ID NO: 144909
  misc_feature 1..789: note = Description of Artificial Sequence: Synthetic coding sequence
  source 1..789: mol_type = other DNA

SEQ ID NO: 144958 - DNA, 717 bp, synthetic construct; identical to SEQ ID NO: 144925
  misc_feature 1..717: note = Description of Artificial Sequence: Synthetic coding sequence
  source 1..717: mol_type = other DNA

SEQ ID NO: 144959 - DNA, 735 bp, synthetic construct; identical to SEQ ID NO: 144919
  misc_feature 1..735: note = Description of Artificial Sequence: Synthetic coding sequence
  source 1..735: mol_type = other DNA

SEQ ID NO: 144960 - DNA, 621 bp, synthetic construct; identical to SEQ ID NO: 144921
  misc_feature 1..621: note = Description of Artificial Sequence: Synthetic coding sequence
  source 1..621: mol_type = other DNA

SEQ ID NO: 144961 - DNA, 735 bp, synthetic construct; identical to SEQ ID NO: 144919
  misc_feature 1..735: note = Description of Artificial Sequence: Synthetic coding sequence
  source 1..735: mol_type = other DNA

SEQ ID NO: 144962 - DNA, 780 bp, synthetic construct; identical to SEQ ID NO: 144948
  misc_feature 1..780: note = Description of Artificial Sequence: Synthetic coding sequence
  source 1..780: mol_type = other DNA

SEQ ID NO: 144963 - DNA, 558 bp, synthetic construct; identical to SEQ ID NO: 144941
  misc_feature 1..558: note = Description of Artificial Sequence: Synthetic coding sequence
  source 1..558: mol_type = other DNA

SEQ ID NO: 144964 - DNA, 621 bp, synthetic construct; identical to SEQ ID NO: 144921
  misc_feature 1..621: note = Description of Artificial Sequence: Synthetic coding sequence
  source 1..621: mol_type = other DNA

SEQ ID NO: 144965 - DNA, 735 bp, synthetic construct; identical to SEQ ID NO: 144919
  misc_feature 1..735: note = Description of Artificial Sequence: Synthetic coding sequence
  source 1..735: mol_type = other DNA

SEQ ID NO: 144966 - DNA, 1548 bp, synthetic construct; identical to SEQ ID NO: 144936
  misc_feature 1..1548: note = Description of Artificial Sequence: Synthetic coding sequence
  source 1..1548: mol_type = other DNA

SEQ ID NO: 144967 - DNA, 717 bp, synthetic construct; identical to SEQ ID NO: 144910
  misc_feature 1..717: note = Description of Artificial Sequence: Synthetic coding sequence
  source 1..717: mol_type = other DNA

SEQ ID NO: 144968 - DNA, 648 bp, synthetic construct; identical to SEQ ID NO: 144912
  misc_feature 1..648: note = Description of Artificial Sequence: Synthetic coding sequence
  source 1..648: mol_type = other DNA

SEQ ID NO: 144969 - DNA, 477 bp, synthetic construct; identical to SEQ ID NO: 144928
  misc_feature 1..477: note = Description of Artificial Sequence: Synthetic coding sequence
  source 1..477: mol_type = other DNA

SEQ ID NO: 144970 - DNA, 702 bp, synthetic construct; identical to SEQ ID NO: 144937
  misc_feature 1..702: note = Description of Artificial Sequence: Synthetic coding sequence
  source 1..702: mol_type = other DNA

SEQ ID NO: 144971 - DNA, 780 bp, synthetic construct; identical to SEQ ID NO: 144948
  misc_feature 1..780: note = Description of Artificial Sequence: Synthetic coding sequence
  source 1..780: mol_type = other DNA

SEQ ID NO: 144972 - DNA, 411 bp, synthetic construct; identical to SEQ ID NO: 144917
  misc_feature 1..411: note = Description of Artificial Sequence: Synthetic coding sequence
  source 1..411: mol_type = other DNA

SEQ ID NO: 144973 - DNA, 735 bp, synthetic construct; identical to SEQ ID NO: 144919
  misc_feature 1..735: note = Description of Artificial Sequence: Synthetic coding sequence
  source 1..735: mol_type = other DNA

SEQ ID NO: 144974 - DNA, 3381 bp, synthetic construct; identical to SEQ ID NO: 144908
  misc_feature 1..3381: note = Description of Artificial Sequence: Synthetic coding sequence
  source 1..3381: mol_type = other DNA

SEQ ID NO: 144975 - DNA, 411 bp, synthetic construct; identical to SEQ ID NO: 144917
  misc_feature 1..411: note = Description of Artificial Sequence: Synthetic coding sequence
  source 1..411: mol_type = other DNA

SEQ ID NO: 144976 - DNA, 648 bp, synthetic construct; identical to SEQ ID NO: 144912
  misc_feature 1..648: note = Description of Artificial Sequence: Synthetic coding sequence
  source 1..648: mol_type = other DNA

SEQ ID NO: 144977 - DNA, 594 bp, synthetic construct; identical to SEQ ID NO: 144920
  misc_feature 1..594: note = Description of Artificial Sequence: Synthetic coding sequence
  source 1..594: mol_type = other DNA

SEQ ID NO: 144978 - DNA, 1548 bp, synthetic construct; identical to SEQ ID NO: 144936
  misc_feature 1..1548: note = Description of Artificial Sequence: Synthetic coding sequence
  source 1..1548: mol_type = other DNA

SEQ ID NO: 144979 - DNA, 738 bp, synthetic construct
  misc_feature 1..738: note = Description of Artificial Sequence: Synthetic coding sequence
  source 1..738: mol_type = other DNA
cctcccaggcacctgcacgtggtgcggcccatgagccactacaccacccccatggtgctgcagcaggccgccatccccatccagatcaacgtgggcaccaccgtgaccatgacaggccctgcccctcctccagccaccagccaccccagggtcatccgcatcagccaccagagcgtggagcctgtggtgatgatgcacatgaacatccaggacagcggcacccagcccggcggcgtgcccagcgcccccaccggccccctgggccccccaggccacggccagaccctgggccagcaggtgcccggcttccccacagcccccaccagggtggtgattgcccggcccaccccaccccaggcccggcccagccaccctgggggcccccctgtgtctggcaccctgcagggcgccggcctgggcaccaatgccagcctggcccagatggtgtctggcctggtgggccagctgctgatgcagcctgtgctggtggcccagggcaccccaggcatggcccctcctccagccccagccacagccagcgccagcgctggcaccaccaacacagccaccacagctggccctgcccctgggggccctgcccagcccccacccaccccccagcccagcatggctgacctgcagttcagccagctgctgggcaacctgctgggccctgctggccctggggccggcggccctggggtggccagccccaccatcaccgtggccatgccctag

SEQ ID NO: 144980 - DNA, 738 bp, synthetic construct; identical to SEQ ID NO: 144907
  misc_feature 1..738: note = Description of Artificial Sequence: Synthetic coding sequence
  source 1..738: mol_type = other DNA

SEQ ID NO: 144981 - DNA, 777 bp, synthetic construct; identical to SEQ ID NO: 144934
  misc_feature 1..777: note = Description of Artificial Sequence: Synthetic coding sequence
  source 1..777: mol_type = other DNA

SEQ ID NO: 144982 - DNA, 789 bp, synthetic construct; identical to SEQ ID NO: 144909
  misc_feature 1..789: note = Description of Artificial Sequence: Synthetic coding sequence
  source 1..789: mol_type = other DNA

SEQ ID NO: 144983 - DNA, 2232 bp, synthetic construct; identical to SEQ ID NO: 144927
  misc_feature 1..2232: note = Description of Artificial Sequence: Synthetic coding sequence
  source 1..2232: mol_type = other DNA

SEQ ID NO: 144984 - DNA, 777 bp, synthetic construct; identical to SEQ ID NO: 144934
  misc_feature 1..777: note = Description of Artificial Sequence: Synthetic coding sequence
  source 1..777: mol_type = other DNA

SEQ ID NO: 144985 - DNA, 558 bp, synthetic construct; identical to SEQ ID NO: 144941
  misc_feature 1..558: note = Description of Artificial Sequence: Synthetic coding sequence
  source 1..558: mol_type = other DNA

SEQ ID NO: 144986 - DNA, 648 bp, synthetic construct; identical to SEQ ID NO: 144912
  misc_feature 1..648: note = Description of Artificial Sequence: Synthetic coding sequence
  source 1..648: mol_type = other DNA

SEQ ID NO: 144987 - DNA, 780 bp, synthetic construct; identical to SEQ ID NO: 144948
  misc_feature 1..780: note = Description of Artificial Sequence: Synthetic coding sequence
  source 1..780: mol_type = other DNA

SEQ ID NO: 144988 - DNA, 477 bp, synthetic construct; identical to SEQ ID NO: 144928
  misc_feature 1..477: note = Description of Artificial Sequence: Synthetic coding sequence
  source 1..477: mol_type = other DNA

SEQ ID NO: 144989 - DNA, 621 bp, synthetic construct; identical to SEQ ID NO: 144921
  misc_feature 1..621: note = Description of Artificial Sequence: Synthetic coding sequence
  source 1..621: mol_type = other DNA

SEQ ID NO: 144990 - DNA, 2232 bp, synthetic construct; identical to SEQ ID NO: 144927
  misc_feature 1..2232: note = Description of Artificial Sequence: Synthetic coding sequence
  source 1..2232: mol_type = other DNA

SEQ ID NO: 144991 - DNA, 681 bp, synthetic construct; identical to SEQ ID NO: 144929
  misc_feature 1..681: note = Description of Artificial Sequence: Synthetic coding sequence
  source 1..681: mol_type = other DNA

SEQ ID NO: 144992 - DNA, 594 bp, synthetic construct; identical to SEQ ID NO: 144920
  misc_feature 1..594: note = Description of Artificial Sequence: Synthetic coding sequence
  source 1..594: mol_type = other DNA

SEQ ID NO: 144993 - DNA, 717 bp, synthetic construct; identical to SEQ ID NO: 144925
  misc_feature 1..717: note = Description of Artificial Sequence: Synthetic coding sequence
  source 1..717: mol_type = other DNA

SEQ ID NO: 144994 - DNA, 735 bp, synthetic construct; identical to SEQ ID NO: 144919
  misc_feature 1..735: note = Description of Artificial Sequence: Synthetic coding sequence
  source 1..735: mol_type = other DNA

SEQ ID NO: 144995 - DNA, 789 bp, synthetic construct; identical to SEQ ID NO: 144909
  misc_feature 1..789: note = Description of Artificial Sequence: Synthetic coding sequence
  source 1..789: mol_type = other DNA

SEQ ID NO: 144996 - DNA, 2232 bp, synthetic construct; identical to SEQ ID NO: 144914
  misc_feature 1..2232: note = Description of Artificial Sequence: Synthetic coding sequence
  source 1..2232: mol_type = other DNA

SEQ ID NO: 144997 - DNA, 735 bp, synthetic construct; identical to SEQ ID NO: 144919
  misc_feature 1..735: note = Description of Artificial Sequence: Synthetic coding sequence
  source 1..735: mol_type = other DNA

SEQ ID NO: 144998 - DNA, 789 bp, synthetic construct; identical to SEQ ID NO: 144909
  misc_feature 1..789: note = Description of Artificial Sequence: Synthetic coding sequence
  source 1..789: mol_type = other DNA

SEQ ID NO: 144999 - DNA, 2712 bp, synthetic construct
  misc_feature 1..2712: note = Description of Artificial Sequence: Synthetic coding sequence
  source 1..2712: mol_type = other DNA
atggagcccaatgacagcaccagcacagctgtggaggagccagacagcctggaggtgctggtgaagaccctggacagccagaccaggaccttcatcgtgggcgcccagatgaatgtgaaggagttcaaggagcacatcgccgcctctgtgtccatccccagcgagaagcagaggctcatctaccagggccgggtgctgcaggatgacaagaagctgcaggagtacaacgtgggcggcaaggtgatccacctggtggagcgggccccaccccagacccacctgcccagcggggccagcagcggcaccggcagcgccagcgccacccatggaggcggcagccccccaggcacccggggccctggggcctctgtgcatgacagaaatgccaacagctatgtgatggtgggcaccttcaacctgcccagtgatggcagcgctgtggatgtgcacatcaacatggagcaggcccccatccagagcgagccccgggtgcggctggtgatggcccagcacatgatccgggacatccagaccctgctgagcaggatggagtgccggggcggcccccagccccagcacagccagcccccaccccagcccccagctgtgaccccagagcctgtggccctgagcagccagaccagcgagcctgtggagagcgaggccccaccccgggagcccatggaggccgaggaggtggaggagcgggccccagcccagaaccctgagctgaccccaggccctgccccagctggccccaccccagcccctgagaccaatgcccccaaccaccccagccctgcagaatatgtggaggtgctgcaggagctgcagaggctggagagccggctgcagcccttcctgcagcgctactatgaggtgctgggcgccgccgccaccacagactacaacaacaaccacgagggccgggaggaggaccagaggctcatcaacctggtgggggagagcctgcggctgctgggcaacacctttgtggccctgagtgacctgcgctgcaacctggcctgcaccccacccaggcacctgcacgtggtgcggcccatgagccactacaccacccccatggtgctgcagcaggccgccatccccatccagatcaacgtgggcaccaccgtgaccatgactggaaatggcacccggcccccacccaccccaaatgctgaggcccctcctcctggccctggccaggccagctctgtggcccccagcagcaccaacgtggagagcagcgctgagggcgcccctcctcctggccctgcccctcctccagccaccagccaccccagggtcatccgcatcagccaccagagcgtggagcctgtggtgatgatgcacatgaacatccaggacagcggcacccagcccggcggcgtgcccagcgcccccaccggccccctgggccccccaggccacggccagaccctgggccagcaggtgcccggcttccccacagcccccaccagggtggtgattgcccggcccaccccaccccaggcccggcccagccaccctgggggcccccctgtgtctggcaccctgggcgccggcctgggcaccaatgccagcctggcccagatggtgtctggcctggtgggccagctgctgatgcagcctgtgctggtggcccagggcaccccaggcagccctgggggcctgggcctggagagcctgagccctgagttcttcacctctgtggtgcagggcgtgctgagcagcctgctgggcagcctgggcgcccgggccggcagcagcgagagcattgctgccttcatccagaggctgagcggcagcagcaacatctttgagcccggggctgatggagccctgggcttctttggagccctgctgagcctgctgtgccagaacttctccatggtggatgtggtgatgctgctgcacggccacttccagcccctgcagaggctgcagccccagctgcgctccttcttccaccagcactacctgggcggccaggagcccacccccagcaacatccgcatggccacccacaccctcatcaccggcctggaggagtatgtgcgggagagcttcagcctggtgcaggtgcagcccggggtggacatcatccgcaccaacctggagttcctgcaggagcagttcaacagcattgctgcccacgtgctgcactgcacagattctggctttggagcccggctgctggagctgtgcaaccagggcctgtttgaatgtctggccctgaacctgcactgcctgggcggccagcagatggagctggccgctgtgatcaatggccgcatccggaggatgagcagaggagtgaaccccagcctggtgtcctggctgaccaccatgatgggcctgcggctgcaggtggtgctggagcacatgcctgtgggcccagatgccatcctgcgctacgtgagaagagtgggggaccccccccagcccctgcctgaggagcccatggaggtgcagggcgctgagcgggccagccctgagccccaggagtgggtgcccatcatccagcaggacatccagagccagaggaaggtgaagccccagccccccctgagtgatgcctacctgagcggcatgcctgccaagaggaggaagctgcggagtgacatccagaagaggctgcaggaggaccccaactacagcccccagcgcttccccaatgcccagagggcctttgctgatgacccctag

SEQ ID NO: 145000 - DNA, 558 bp, synthetic construct; identical to SEQ ID NO: 144941
  misc_feature 1..558: note = Description of Artificial Sequence: Synthetic coding sequence
  source 1..558: mol_type = other DNA

SEQ ID NO: 145001 - DNA, 789 bp, synthetic construct; identical to SEQ ID NO: 144909
  misc_feature 1..789: note = Description of Artificial Sequence: Synthetic coding sequence
  source 1..789: mol_type = other DNA

SEQ ID NO: 145002 - DNA, 621 bp, synthetic construct; identical to SEQ ID NO: 144921
  misc_feature 1..621: note = Description of Artificial Sequence: Synthetic coding sequence
  source 1..621: mol_type = other DNA

SEQ ID NO: 145003 - DNA, 681 bp, synthetic construct; identical to SEQ ID NO: 144929
  misc_feature 1..681: note = Description of Artificial Sequence: Synthetic coding sequence
  source 1..681: mol_type = other DNA

SEQ ID NO: 145004 - DNA, 780 bp, synthetic construct; identical to SEQ ID NO: 144948
  misc_feature 1..780: note = Description of Artificial Sequence: Synthetic coding sequence
  source 1..780: mol_type = other DNA

SEQ ID NO: 145005 - DNA, 777 bp, synthetic construct; identical to SEQ ID NO: 144934
  misc_feature 1..777: note = Description of Artificial Sequence: Synthetic coding sequence
  source 1..777: mol_type = other DNA

SEQ ID NO: 145006 - DNA, 477 bp, synthetic construct; identical to SEQ ID NO: 144928
  misc_feature 1..477: note = Description of Artificial Sequence: Synthetic coding sequence
  source 1..477: mol_type = other DNA

SEQ ID NO: 145007 - DNA, 735 bp, synthetic construct; identical to SEQ ID NO: 144919
  misc_feature 1..735: note = Description of Artificial Sequence: Synthetic coding sequence
  source 1..735: mol_type = other DNA

SEQ ID NO: 145008 - DNA, 3381 bp, synthetic construct; identical to SEQ ID NO: 144903
  misc_feature 1..3381: note = Description of Artificial Sequence: Synthetic coding sequence
  source 1..3381: mol_type = other DNA

SEQ ID NO: 145009 - DNA, 735 bp, synthetic construct; identical to SEQ ID NO: 144919
  misc_feature 1..735: note = Description of Artificial Sequence: Synthetic coding sequence
  source 1..735: mol_type = other DNA

SEQ ID NO: 145010 - DNA, 1548 bp, synthetic construct; identical to SEQ ID NO: 144936
  misc_feature 1..1548: note = Description of Artificial Sequence: Synthetic coding sequence
  source 1..1548: mol_type = other DNA

SEQ ID NO: 145011 - DNA, 3381 bp, synthetic construct; identical to SEQ ID NO: 144903
  misc_feature 1..3381: note = Description of Artificial Sequence: Synthetic coding sequence
  source 1..3381: mol_type = other DNA

SEQ ID NO: 145012 - DNA, 411 bp, synthetic construct; identical to SEQ ID NO: 144917
  misc_feature 1..411: note = Description of Artificial Sequence: Synthetic coding sequence
  source 1..411: mol_type = other DNA

SEQ ID NO: 145013 - DNA, 3399 bp, synthetic construct; identical to SEQ ID NO: 144950
  misc_feature 1..3399: note = Description of Artificial Sequence: Synthetic coding sequence
  source 1..3399: mol_type = other DNA

SEQ ID NO: 145014 - DNA, 702 bp, synthetic construct; identical to SEQ ID NO: 144937
  misc_feature 1..702: note = Description of Artificial Sequence: Synthetic coding sequence
  source 1..702: mol_type = other DNA

SEQ ID NO: 145015 - DNA, 558 bp, synthetic construct; identical to SEQ ID NO: 144941
  misc_feature 1..558: note = Description of Artificial Sequence: Synthetic coding sequence
  source 1..558: mol_type = other DNA

SEQ ID NO: 145016 - DNA, 738 bp, synthetic construct; identical to SEQ ID NO: 144979
  misc_feature 1..738: note = Description of Artificial Sequence: Synthetic coding sequence
  source 1..738: mol_type = other DNA

SEQ ID NO: 145017 - DNA, 702 bp, synthetic construct; identical to SEQ ID NO: 144937
  misc_feature 1..702: note = Description of Artificial Sequence: Synthetic coding sequence
  source 1..702: mol_type = other DNA

SEQ ID NO: 145018 - DNA, 780 bp, synthetic construct; identical to SEQ ID NO: 144948
  misc_feature 1..780: note = Description of Artificial Sequence: Synthetic coding sequence
  source 1..780: mol_type = other DNA

SEQ ID NO: 145019 - DNA, 702 bp, synthetic construct; identical to SEQ ID NO: 144937
  misc_feature 1..702: note = Description of Artificial Sequence: Synthetic coding sequence
  source 1..702: mol_type = other DNA

SEQ ID NO: 145020 - DNA, 1548 bp, synthetic construct; identical to SEQ ID NO: 144936
  misc_feature 1..1548: note = Description of Artificial Sequence: Synthetic coding sequence
  source 1..1548: mol_type = other DNA

SEQ ID NO: 145021 - DNA, 477 bp, synthetic construct; identical to SEQ ID NO: 144928
  misc_feature 1..477: note = Description of Artificial Sequence: Synthetic coding sequence
  source 1..477: mol_type = other DNA

SEQ ID NO: 145022 - DNA, 702 bp, synthetic construct; identical to SEQ ID NO: 144937
  misc_feature 1..702: note = Description of Artificial Sequence: Synthetic coding sequence
  source 1..702: mol_type = other DNA

SEQ ID NO: 145023 - DNA, 735 bp, synthetic construct; identical to SEQ ID NO: 144919
  misc_feature 1..735: note = Description of Artificial Sequence: Synthetic coding sequence
  source 1..735: mol_type = other DNA

SEQ ID NO: 145024 - DNA, 3399 bp, synthetic construct; identical to SEQ ID NO: 144900
  misc_feature 1..3399: note = Description of Artificial Sequence: Synthetic coding sequence
  source 1..3399: mol_type = other DNA

SEQ ID NO: 145025 - DNA, 1548 bp, synthetic construct; identical to SEQ ID NO: 144936
  misc_feature 1..1548: note = Description of Artificial Sequence: Synthetic coding sequence
  source 1..1548: mol_type = other DNA

SEQ ID NO: 145026 - DNA, 735 bp, synthetic construct; identical to SEQ ID NO: 144919
  misc_feature 1..735: note = Description of Artificial Sequence: Synthetic coding sequence
  source 1..735: mol_type = other DNA

SEQ ID NO: 145027 - DNA, 2232 bp, synthetic construct; identical to SEQ ID NO: 144914
  misc_feature 1..2232: note = Description of Artificial Sequence: Synthetic coding sequence
  source 1..2232: mol_type = other DNA

SEQ ID NO: 145028 - DNA, 735 bp, synthetic construct; identical to SEQ ID NO: 144919
  misc_feature 1..735: note = Description of Artificial Sequence: Synthetic coding sequence
  source 1..735: mol_type = other DNA

SEQ ID NO: 145029 - DNA, 735 bp, synthetic construct; identical to SEQ ID NO: 144919
  misc_feature 1..735: note = Description of Artificial Sequence: Synthetic coding sequence
  source 1..735: mol_type = other DNA

SEQ ID NO: 145030 - DNA, 3399 bp, synthetic construct; identical to SEQ ID NO: 144900
  misc_feature 1..3399: note = Description of Artificial Sequence: Synthetic coding sequence
  source 1..3399: mol_type = other DNA

SEQ ID NO: 145031 - DNA, 738 bp, synthetic construct; identical to SEQ ID NO: 144979
  misc_feature 1..738: note = Description of Artificial Sequence: Synthetic coding sequence
  source 1..738: mol_type = other DNA

SEQ ID NO: 145032 - DNA, 777 bp, synthetic construct; identical to SEQ ID NO: 144934
  misc_feature 1..777: note = Description of Artificial Sequence: Synthetic coding sequence
  source 1..777: mol_type = other DNA

SEQ ID NO: 145033 - DNA, 789 bp, synthetic construct; identical to SEQ ID NO: 144909
  misc_feature 1..789: note = Description of Artificial Sequence: Synthetic coding sequence
  source 1..789: mol_type = other DNA

SEQ ID NO: 145034 - DNA, 789 bp, synthetic construct; identical to SEQ ID NO: 144909
  misc_feature 1..789: note = Description of Artificial Sequence: Synthetic coding sequence
  source 1..789: mol_type = other DNA

SEQ ID NO: 145035 - DNA, 738 bp, synthetic construct; identical to SEQ ID NO: 144907
  misc_feature 1..738: note = Description of Artificial Sequence: Synthetic coding sequence
  source 1..738: mol_type = other DNA

SEQ ID NO: 145036 - DNA, 648 bp, synthetic construct; identical to SEQ ID NO: 144912
  misc_feature 1..648: note = Description of Artificial Sequence: Synthetic coding sequence
  source 1..648: mol_type = other DNA

SEQ ID NO: 145037 - DNA, 735 bp, synthetic construct; identical to SEQ ID NO: 144919
  misc_feature 1..735: note = Description of Artificial Sequence: Synthetic coding sequence
  source 1..735: mol_type = other DNA

SEQ ID NO: 145038 - DNA, 558 bp, synthetic construct; identical to SEQ ID NO: 144941
  misc_feature 1..558: note = Description of Artificial Sequence: Synthetic coding sequence
  source 1..558: mol_type = other DNA

SEQ ID NO: 145039 - DNA, 780 bp, synthetic construct; identical to SEQ ID NO: 144948
  misc_feature 1..780: note = Description of Artificial Sequence: Synthetic coding sequence
  source 1..780: mol_type = other DNA

SEQ ID NO: 145040 - DNA, 477 bp, synthetic construct; identical to SEQ ID NO: 144928
  misc_feature 1..477: note = Description of Artificial Sequence: Synthetic coding sequence
  source 1..477: mol_type = other DNA

SEQ ID NO: 145041 - DNA, 621 bp, synthetic construct; identical to SEQ ID NO: 144921
  misc_feature 1..621: note = Description of Artificial Sequence: Synthetic coding sequence
  source 1..621: mol_type = other DNA

SEQ ID NO: 145042 - DNA, 3399 bp, synthetic construct; identical to SEQ ID NO: 144950
  misc_feature 1..3399: note = Description of Artificial Sequence: Synthetic coding sequence
  source 1..3399: mol_type = other DNA

SEQ ID NO: 145043 - DNA, 717 bp, synthetic construct; identical to SEQ ID NO: 144925
  misc_feature 1..717: note = Description of Artificial Sequence: Synthetic coding sequence
  source 1..717: mol_type = other DNA

SEQ ID NO: 145044 - DNA, 621 bp, synthetic construct; identical to SEQ ID NO: 144921
  misc_feature 1..621: note = Description of Artificial Sequence: Synthetic coding sequence
  source 1..621: mol_type = other DNA

SEQ ID NO: 145045 - DNA, 558 bp, synthetic construct; identical to SEQ ID NO: 144941
  misc_feature 1..558: note = Description of Artificial Sequence: Synthetic coding sequence
  source 1..558: mol_type = other DNA

SEQ ID NO: 145046 - DNA, 648 bp, synthetic construct; identical to SEQ ID NO: 144912
  misc_feature 1..648: note = Description of Artificial Sequence: Synthetic coding sequence
  source 1..648: mol_type = other DNA

SEQ ID NO: 145047 - DNA, 789 bp, synthetic construct; identical to SEQ ID NO: 144909
  misc_feature 1..789: note = Description of Artificial Sequence: Synthetic coding sequence
  source 1..789: mol_type = other DNA

SEQ ID NO: 145048 - DNA, 594 bp, synthetic construct; identical to SEQ ID NO: 144920
  misc_feature 1..594: note = Description of Artificial Sequence: Synthetic coding sequence
  source 1..594: mol_type = other DNA

SEQ ID NO: 145049 - DNA, 735 bp, synthetic construct; identical to SEQ ID NO: 144919
  misc_feature 1..735: note = Description of Artificial Sequence: Synthetic coding sequence
  source 1..735: mol_type = other DNA

SEQ ID NO: 145050 - DNA, 681 bp, synthetic construct; identical to SEQ ID NO: 144929
  misc_feature 1..681: note = Description of Artificial Sequence: Synthetic coding sequence
  source 1..681: mol_type = other DNA

SEQ ID NO: 145051 - DNA, 738 bp, synthetic construct; identical to SEQ ID NO: 144907
  misc_feature 1..738: note = Description of Artificial Sequence: Synthetic coding sequence
  source 1..738: mol_type = other DNA

SEQ ID NO: 145052 - DNA, 681 bp, synthetic construct; identical to SEQ ID NO: 144929
  misc_feature 1..681: note = Description of Artificial Sequence: Synthetic coding sequence
  source 1..681: mol_type = other DNA

SEQ ID NO: 145053 - DNA, 681 bp, synthetic construct; identical to SEQ ID NO: 144929
  misc_feature 1..681: note = Description of Artificial Sequence: Synthetic coding sequence
  source 1..681: mol_type = other DNA

SEQ ID NO: 145054 - DNA, 777 bp, synthetic construct; identical to SEQ ID NO: 144934
  misc_feature 1..777: note = Description of Artificial Sequence: Synthetic coding sequence
  source 1..777: mol_type = other DNA

SEQ ID NO: 145055 - DNA, 411 bp, synthetic construct; identical to SEQ ID NO: 144917
  misc_feature 1..411: note = Description of Artificial Sequence: Synthetic coding sequence
  source 1..411: mol_type = other DNA

SEQ ID NO: 145056 - DNA, 3489 bp, synthetic construct
  misc_feature 1..3489: note = Description of Artificial Sequence: Synthetic coding sequence
  source 1..3489: mol_type = other DNA
atggagcccaatgacagcaccagcacagctgtggaggagccagacagcctggaggtgctggtgaagaccctggacagccagaccaggaccttcatcgtgggcgcccagatgaatgtgaaggagttcaaggagcacatcgccgcctctgtgtccatccccagcgagaagcagaggctcatctaccagggccgggtgctgcaggatgacaagaagctgcaggagtacaacgtgggcggcaaggtgatccacctggtggagcgggccccaccccagacccacctgcccagcggggccagcagcggcaccggcagcgccagcgccacccatggaggcggcagccccccaggcacccggggccctggggcctctgtgcatgacagaaatgccaacagctatgtgatggtgggcaccttcaacctgcccagtgatggcagcgctgtggatgtgcacatcaacatggagcaggcccccatccagagcgagccccgggtgcggctggtgatggcccagcacatgatccgggacatccagaccctgctgagcaggatggagtgccggggcggcccccagccccagcacagccagcccccaccccagcccccagctgtgaccccagagcctgtggccctgagcagccagaccagcgagcctgtggagagcgaggccccaccccgggagcccatggaggccgaggaggtggaggagcgggccccagcccagaaccctgagctgaccccaggccctgccccagctggccccaccccagcccctgagaccaatgcccccaaccaccccagccctgcagaatatgtggaggtgctgcaggagctgcagaggctggagagccggctgcagcccttcctgcagcgctactatgaggtgctgggcgccgccgccaccacagactacaacaacaaccacgagggccgggaggaggaccagaggctcatcaacctggtgggggagagcctgcggctgctgggcaacacctttgtggccctgagtgacctgcgctgcaacctggcctgcaccccacccaggcacctgcacgtggtgcggcccatgagccactacaccacccccatggtgctgcagcaggccgccatccccatccagatcaacgtgggcaccaccgtgaccatgactggaaatggcacccggcccccacccaccccaaatgctgaggcccctcctcctggccctggccaggccagctctgtggcccccagcagcaccaacgtggagagcagcgctgagggcgcccctcctcctggccctgcccctcctccagccaccagccaccccagggtcatccgcatcagccaccagagcgtggagcctgtggtgatgatgcacatgaacatccaggacagcggcacccagcccggcggcgtgcccagcgcccccaccggccccctgggccccccaggccacggccagaccctgggcagcaccctcatccagctgcccagcctgcccccagagttcatgcatgctgtggcccaccagatcacccaccaggccatggtggccgctgtggccagcgctgctgctggccagcaggtgcccggcttccccacagcccccaccagggtggtgattgcccggcccaccccaccccaggcccggcccagccaccctgggggcccccctgtgtctggcaccctgcagggcgccggcctgggcaccaatgccagcctggcccagatggtgtctggcctggtgggccagctgctgatgcagcctgtgctggtggcccagggcaccccaggcatggcccctcctccagccccagccacagccagcgccagcgctggcaccaccaacacagccaccacagctggccctgcccctgggggccctgcccagcccccacccaccccccagcccagcatggctgacctgcagttcagccagctgctgggcaacctgctgggccctgctggccctggggccggcggccctggggtggccagccccaccatcaccgtggccatgcctggggtgcctgccttcctgcagggcatgacagacttcctgcaggccacccagacagcccctcctcctcctcctcctcctcctcctcctcctccagcccctgagcagcagaccatgcctcctcctggcagccccagcggcggggccggcagccctgggggcctgggcctggagagcctgagccctgagttcttcacctctgtggtgcagggcgtgctgagcagcctgctgggcagcctgggcgcccgggccggcagcagcgagagcattgctgccttcatccagaggctgagcggcagcagcaacatctttgagcccggggctgatggagccctgggcttctttggagccctgctgagcctgctgtgccagaacttctccatggtggatgtggtgatgctgctgcacggccacttccagcccctgcagaggctgcagccccagctgcgctccttcttccaccagcactacctgggcggccaggagcccacccccagcaacatccgcatggccacccacaccctcatcaccggcctggaggagtatgtgcgggagagcttcagcctggtgcaggtgcagcccggggtggacatcatccgcaccaacctggagttcctgcaggagcagttcaacagcattgctgcccacgtgctgcactgcacagattctggctttggagcccggctgctggagctgtgcaaccagggcctgtttgaatgtctggccctgaacctgcactgcctgggcggccagcagatggagctggccgctgtgatcaatggccgcatccggaggatgagcagaggagtgaaccccagcctggtgtcctggctgaccaccatgatgggcctgcggctgcaggtggtgctggagcacatgcctgtgggcccagatgccatcctgcgctacgtgagaagagtgggggaccccccccagcccctgcctgaggagcccatggaggtgcagggcgctgagcgggccagccctgagccccagcgggagaatgccagccctgcccctggcaccacagctgaggaggccatgagccggggccccccaccagcccctgagggcggcagcagagatgagcaggatggagccagcgctgagacagagccctgggccgctgctgtgcccccagagtgggtgcccatcatccagcaggacatccagagccagaggaaggtgaagccccagccccccctgagtgatgcctacctgagcggcatgcctgccaagaggaggaagaccatgcagggcgagggcccccagctgctgctgtctgaggccgtgtcccgggccgccaaggccgccggggcccggcccctgaccagccctgagagcctgagccgggacctggaggcccctgaggtgcaggagagctaccggcagcagctgcggagtgacatccagaagaggctgcaggaggaccccaactacagcccccagcgcttccccaatgcccagagggcctttgctgatgacccctag

SEQ ID NO: 145057 - DNA, 2712 bp, synthetic construct; identical to SEQ ID NO: 144999
  misc_feature 1..2712: note = Description of Artificial Sequence: Synthetic coding sequence
  source 1..2712: mol_type = other DNA

SEQ ID NO: 145058 - DNA, 2712 bp, synthetic construct; identical to SEQ ID NO: 144999
  misc_feature 1..2712: note = Description of Artificial Sequence: Synthetic coding sequence
  source 1..2712: mol_type = other DNA

SEQ ID NO: 145059 - DNA, 3234 bp, synthetic construct; identical to SEQ ID NO: 144901
  misc_feature 1..3234: note = Description of Artificial Sequence: Synthetic coding sequence
  source 1..3234: mol_type = other DNA

SEQ ID NO: 145060 - DNA, 3234 bp, synthetic construct
  misc_feature 1..3234: note = Description of Artificial Sequence: Synthetic coding sequence
  source 1..3234: mol_type = other DNA
atggagcccaatgacagcaccagcacagctgtggaggagccagacagcctggaggtgctggtgaagaccctggacagccagaccaggaccttcatcgtgggcgcccagatgaatgtgaaggagttcaaggagcacatcgccgcctctgtgtccatccccagcgagaagcagaggctcatctaccagggccgggtgctgcaggatgacaagaagctgcaggagtacaacgtgggcggcaaggtgatccacctggtggagcgggccccaccccagacccacctgcccagcggggccagcagcggcaccggcagcgccagcgccacccatggaggcggcagccccccaggcacccggggccctggggcctctgtgcatgacagaaatgccaacagctatgtgatggtgggcaccttcaacctgcccagtgatggcagcgctgtggatgtgcacatcaacatggagcaggcccccatccagagcgagccccgggtgcggctggtgatggcccagcacatgatccgggacatccagaccctgctgagcaggatggagtgccggggcggcccccagccccagcacagccagcccccaccccagcccccagctgtgaccccagagcctgtggccctgagcagccagaccagcgagcctgtggagagcgaggccccaccccgggagcccatggaggccgaggaggtggaggagcgggccccagcccagaaccctgagctgaccccaggccctgccccagctggccccaccccagcccctgagaccaatgcccccaaccaccccagccctgcagaatatgtggaggtgctgcaggagctgcagaggctggagagccggctgcagcccttcctgcagcgctactatgaggtgctgggcgccgccgccaccacagactacaacaacaaccacgagggccgggaggaggaccagaggctcatcaacctggtgggggagagcctgcggctgctgggcaacacctttgtggccctgagtgacctgcgctgcaacctggcctgcaccccacccaggcacctgcacgtggtgcggcccatgagccactacaccacccccatggtgctgcagcaggccgccatccccatccagatcaacgtgggcaccaccgtgaccatgactggaaatggcacccggcccccacccaccccaaatgctgaggcccctcctcctggccctggccaggccagctctgtggcccccagcagcaccaacgtggagagcagcgctgagggcgcccctcctcctggccctgcccctcctccagccaccagccaccccagggtcatccgcatcagccaccagagcgtggagcctgtggtgatgatgcacatgaacatccaggacagcggcacccagcccggcggcgtgcccagcgcccccaccggccccctgggccccccaggccacggccagaccctgggccagcaggtgcccggcttccccacagcccccaccagggtggtgattgcccggcccaccccaccccaggcccggcccagccaccctgggggcccccctgtgtctggcaccctgcagggcgccggcctgggcaccaatgccagcctggcccagatggtgtctggcctggtgggccagctgctgatgcagcctgtgctggtggcccagggcaccccaggcatggcccctcctccagccccagccacagccagcgccagcgctggcaccaccaacacagccaccacagctggccctgcccctgggggccctgcccagcccccacccaccccccagcccagcatggctgacctgcagttcagccagctgctgggcaacctgctgggccctgctggccctggggccggcggccctggggtggccagccccaccatcaccgtggccatgcctggggtgcctgccttcctgcagggcatgacagacttcctgcaggccacccagacagcccctcctcctcctcctcctcctcctcctcctcctccagcccctgagcagcagaccatgcctcctcctggcagccccagcggcggggccggcagccctgggggcctgggcctggagagcctgagccctgagttcttcacctctgtggtgcagggcgtgctgagcagcctgctgggcagcctgggcgcccgggccggcagcagcgagagcattgctgccttcatccagaggctgagcggcagcagcaacatctttgagcccggggctgatggagccctgggcttctttggagccctgctgagcctgctgtgccagaacttctccatggtggatgtggtgatgctgctgcacggccacttccagcccctgcagaggctgcagccccagctgcgctccttcttccaccagcactacctgggcggccaggagcccacccccagcaacatccgcatggccacccacaccctcatcaccggcctggaggagtatgtgcgggagagcttcagcctggtgcaggtgcagcccggggtggacatcatccgcaccaacctggagttcctgcaggagcagttcaacagcattgctgcccacgtgctgcactgcacagattctggctttggagcccggctgctggagctgtgcaaccagggcctgtttgaatgtctggccctgaacctgcactgcctgggcggccagcagatggagctggccgctgtgatcaatggccgcatccggaggatgagcagaggagtgaaccccagcctggtgtcctggctgaccaccatgatgggcctgcggctgcaggtggtgctggagcacatgcctgtgggcccagatgccatcctgcgctacgtgagaagagtgggggaccccccccagcccctgcctgaggagcccatggaggtgcagggcgctgagcgggccagccctgagccccagcgggagaatgccagccctgcccctggcaccacagctgaggaggccatgagccggggccccccaccagcccctgagggcggcagcagagatgagcaggatggagccagcgctgagacagagccctgggccgctgctgtgcccccagagtgggtgcccatcatccagcaggacatccagagccagaggaaggtgaagccccagccccccctgagtgatgcctacctgagcggcatgcctgccaagaggaggaagctgcggagtgacatccagaagaggctgcaggaggaccccaactacagcccccagcgcttccccaatgcccagagggcctttgctgatgacccctag

SEQ ID NO: 145061 - DNA, 3489 bp, synthetic construct; identical to SEQ ID NO: 145056
  misc_feature 1..3489: note = Description of Artificial Sequence: Synthetic coding sequence
  source 1..3489: mol_type = other DNA

SEQ ID NO: 145062 - DNA, 3234 bp, synthetic construct; identical to SEQ ID NO: 144901
  misc_feature 1..3234: note = Description of Artificial Sequence: Synthetic coding sequence
  source 1..3234: mol_type = other DNA

SEQ ID NO: 145063 - DNA, 2712 bp, synthetic construct; identical to SEQ ID NO: 144999
  misc_feature 1..2712: note = Description of Artificial Sequence: Synthetic coding sequence
  source 1..2712: mol_type = other DNA

SEQ ID NO: 145064 - DNA, 3489 bp, synthetic construct; identical to SEQ ID NO: 144906
  misc_feature 1..3489: note = Description of Artificial Sequence: Synthetic coding sequence
  source 1..3489: mol_type = other DNA

SEQ ID NO: 145065 - DNA, 3234 bp, synthetic construct; identical to SEQ ID NO: 145060
  misc_feature 1..3234: note = Description of Artificial Sequence: Synthetic coding sequence
  source 1..3234: mol_type = other DNA

SEQ ID NO: 145066 - DNA, 2712 bp, synthetic construct; identical to SEQ ID NO: 144999
  misc_feature 1..2712: note = Description of Artificial Sequence: Synthetic coding sequence
  source 1..2712: mol_type = other DNA

SEQ ID NO: 145067 - DNA, 2712 bp, synthetic construct; identical to SEQ ID NO: 144999
  misc_feature 1..2712: note = Description of Artificial Sequence: Synthetic coding sequence
  source 1..2712: mol_type = other DNA

SEQ ID NO: 145068 - DNA, 3489 bp, synthetic construct; identical to SEQ ID NO: 144906
  misc_feature 1..3489: note = Description of Artificial Sequence: Synthetic coding sequence
  source 1..3489: mol_type = other DNA

SEQ ID NO: 145069 - DNA, 3489 bp, synthetic construct; identical to SEQ ID NO: 145056
  misc_feature 1..3489: note = Description of Artificial Sequence: Synthetic coding sequence
  source 1..3489: mol_type = other DNA

SEQ ID NO: 145070 - DNA, 3489 bp, synthetic construct; identical to SEQ ID NO: 144906
  misc_feature 1..3489: note = Description of Artificial Sequence: Synthetic coding sequence
  source 1..3489: mol_type = other DNA

SEQ ID NO: 145071 - DNA, 3234 bp, synthetic construct; identical to SEQ ID NO: 145060
  misc_feature 1..3234: note = Description of Artificial Sequence: Synthetic coding sequence
  source 1..3234: mol_type = other DNA

SEQ ID NO: 145072 - DNA, 3234 bp, synthetic construct; identical to SEQ ID NO: 144901
  misc_feature 1..3234: note = Description of Artificial Sequence: Synthetic coding sequence
  source 1..3234: mol_type = other DNA

SEQ ID NO: 145073 - DNA, 2712 bp, synthetic construct; identical to SEQ ID NO: 144999
  misc_feature 1..2712: note = Description of Artificial Sequence: Synthetic coding sequence
  source 1..2712: mol_type = other DNA

SEQ ID NO: 145074 - DNA, 417 bp, synthetic construct
  misc_feature 1..417: note = Description of Artificial Sequence: Synthetic coding sequence
  source 1..417: mol_type = other DNA
atgaaggagtacagcggctttgctggggtgtcccggccccggggcaccttcttccgcatccggggccggggccgggcccggggcgtgtttgctggcaccaacacaggccccaacaacagcaacaccaccttccagaagaggcccaaggaggaggagtgggaccctgagtacacccccaagagcaagaagtacttcctgcatgatgacagagatgatggagtggactactgggccaagaggggccggggccggggcaccttccagaggggccggggccgcttcaacttcaagaagagcggcagcagccccaagtggacccatgacaagtaccagggagatggcatcgtggaggatgaggaggagaccatggagaacaatgaggagaagaaggacaggaggaaggaggagaaggagtag

SEQ ID NO: 145075 - DNA, 2610 bp, synthetic construct
  misc_feature 1..2610: note = Description of Artificial Sequence: Synthetic coding sequence
  source 1..2610: mol_type = other DNA
atgggccgcagcaacagccgcagccacagcagccgcagcaagagccgcagccagagcagcagccgcagccgcagccgcagccacagcaggaagaagcgctaccgcagccgcagcaggacctacagccgcagccgcagccgggacaggatgtacagccgggactaccgccgggactacagaaacaacagaggcatgaggcggccctacggctaccggggccggggccggggctactaccagggcggcggcggccgctaccacagaggaggctacagacctgtgtggaacagaagacacagccgcagcccccggcggggccgcagccgcagccgcagccccaagagaagatctgtgagcagccagaggagccgcagccgcagccgccgcagctaccgcagcagccgcagccccaggagcagcagcagccgcagcagcagcccctacagcaagagccctgtgtccaagaggcggggcagccaggagaagcagaccaagaaggccgagggggagccccaggaggagagccccctgaagagcaagagccaggaggagcccaaggacacctttgaacatgaccccagcgagagcattgatgagttcaacaagagcagcgccaccagcggggacatctggccaggcctgagcgcctatgacaacagccccaggagcccccacagccccagccccatcgccaccccacccagccagagcagcagctgcagtgatgcccccatgctgagcacagtgcacagcgccaagaacacccccagccagcacagccacagcatccagcacagccctgagaggagcggcagcggctctgtgggcaatggcagcagccgctacagccccagccagaacagccccatccaccacatccccagccgccgcagccctgccaagaccatcgccccccagaatgcccccagagatgagagccggggccgcagcagcttctacccagatggaggagaccaggagacagccaagacaggcaagttcctgaagcgcttcacagatgaggagagcagggtcttcctgctggaccggggcaacacccgggacaaggaggccagcaaggagaagggcagcgagaagggccgggcagagggggagtgggaggaccaggaggccctggactacttcagtgacaaggagagcggcaagcagaagttcaatgattctgaaggagatgacacagaggagacagaggactaccggcagttcaggaagtctgtgctggccgaccagggcaagagctttgccacagccagccacaggaacacagaggaggagggcctgaagtacaagagcaaggtgtccctgaagggcaaccgggagagtgatggcttccgggaggagaagaactacaagctgaaggagaccggctacgtggtggagcggcccagcaccaccaaggacaagcacaaggaggaggacaagaacagcgagcgcatcaccgtgaagaaggagacccagagccctgagcaggtgaagtctgagaagctgaaggacctgtttgactacagcccccccctgcacaagaacctggatgcccgggagaagagcaccttccgggaggagagccccctgcgcatcaagatgattgccagtgacagccacaggcctgaggtgaagctgaagatggcccctgtgcccctggatgacagcaacagacctgccagcctgaccaaggaccggctgctggccagcaccctggtgcacagcgtgaagaaggagcaggagttccgcagcatctttgaccacatcaagctgccccaggccagcaagagcaccagcgagagcttcatccagcacatcgtgtccctggtgcaccacgtgaaggagcagtacttcaagtctgctgccatgaccctgaatgaacgcttcaccagctaccagaaggccacagaggagcacagcacccggcagaagagccctgagatccacagaagaattgacatcagccccagcaccctgaggaagcacacccggctggccggggaggagagggtcttcaaggaggagaaccagaagggggacaagaagctgcgctgtgacagcgctgacctgcggcatgacatcgacagaagaaggaaggagaggagcaaggagcggggggacagcaagggcagccgggagagcagcggcagcaggaagcaggagaagacccccaaggactacaaggagtacaagagctacaaggatgacagcaagcacaagcgggagcaggaccacagccgcagcagcagcagcagcgccagccccagcagccccagcagccgggaggagaaggagagcaagaaggagcgggaggaggagttcaagacccaccacgagatgaaggagtacagcggctttgctggggtgtcccggccccggggcaccttccatgatgacagagatgatggagtggactactgggccaagaggggccggggccggggcaccttccagaggggccggggccgcttcaacttcaagaagagcggcagcagccccaagtggacccatgacaagtaccagggagatggcatcgtggaggatgaggaggagaccatggagaacaatgaggagaagaaggacaggaggaaggaggagaaggagtag

SEQ ID NO: 145076 - DNA, 2610 bp, synthetic construct; identical to SEQ ID NO: 145075
  misc_feature 1..2610: note = Description of Artificial Sequence: Synthetic coding sequence
  source 1..2610: mol_type = other DNA

SEQ ID NO: 145077 - DNA, 2757 bp, synthetic construct
  misc_feature 1..2757: note = Description of Artificial Sequence: Synthetic coding sequence
  source 1..2757: mol_type = other DNA
atgggccgcagcaacagccgcagccacagcagccgcagcaagagccgcagccagagcagcagccgcagccgcagccgcagccacagcaggaagaagcgctaccgcagccgcagcaggacctacagccgcagccgcagccgggacaggatgtacagccgggactaccgccgggactacagaaacaacagaggcatgaggcggccctacggctaccggggccggggccggggctactaccagggcggcggcggccgctaccacagaggaggctacagacctgtgtggaacagaagacacagccgcagcccccggcggggccgcagccgcagccgcagccccaagagaagatctgtgagcagccagaggagccgcagccgcagccgccgcagctaccgcagcagccgcagccccaggagcagcagcagccgcagcagcagcccctacagcaagagccctgtgtccaagaggcggggcagccaggagaagcagaccaagaaggccgagggggagccccaggaggagagccccctgaagagcaagagccaggaggagcccaaggacacctttgaacatgaccccagcgagagcattgatgagttcaacaagagcagcgccaccagcggggacatctggccaggcctgagcgcctatgacaacagccccaggagcccccacagccccagccccatcgccaccccacccagccagagcagcagctgcagtgatgcccccatgctgagcacagtgcacagcgccaagaacacccccagccagcacagccacagcatccagcacagccctgagaggagcggcagcggctctgtgggcaatggcagcagccgctacagccccagccagaacagccccatccaccacatccccagccgccgcagccctgccaagaccatcgccccccagaatgcccccagagatgagagccggggccgcagcagcttctacccagatggaggagaccaggagacagccaagacaggcaagttcctgaagcgcttcacagatgaggagagcagggtcttcctgctggaccggggcaacacccgggacaaggaggccagcaaggagaagggcagcgagaagggccgggcagagggggagtgggaggaccaggaggccctggactacttcagtgacaaggagagcggcaagcagaagttcaatgattctgaaggagatgacacagaggagacagaggactaccggcagttcaggaagtctgtgctggccgaccagggcaagagctttgccacagccagccacaggaacacagaggaggagggcctgaagtacaagagcaaggtgtccctgaagggcaaccgggagagtgatggcttccgggaggagaagaactacaagctgaaggagaccggctacgtggtggagcggcccagcaccaccaaggacaagcacaaggaggaggacaagaacagcgagcgcatcaccgtgaagaaggagacccagagccctgagcaggtgaagtctgagaagctgaaggacctgtttgactacagcccccccctgcacaagaacctggatgcccgggagaagagcaccttccgggaggagagccccctgcgcatcaagatgattgccagtgacagccacaggcctgaggtgaagctgaagatggcccctgtgcccctggatgacagcaacagacctgccagcctgaccaaggaccggctgctggccagcaccctggtgcacagcgtgaagaaggagcaggagttccgcagcatctttgaccacatcaagctgccccaggccagcaagagcaccagcgagagcttcatccagcacatcgtgtccctggtgcaccacgtgaaggagcagtacttcaagtctgctgccatgaccctgaatgaacgcttcaccagctaccagaaggccacagaggagcacagcacccggcagaagagccctgagatccacagaagaattgacatcagccccagcaccctgaggaagcacacccggctggccggggaggagagggtcttcaaggaggagaaccagaagggggacaagaagctgcgctgtgacagcgctgacctgcggcatgacatcgacagaagaaggaaggagaggagcaaggagcggggggacagcaagggcagccgggagagcagcggcagcaggaagcaggagaagacccccaaggactacaaggagtacaagagctacaaggatgacagcaagcacaagcgggagcaggaccacagccgcagcagcagcagcagcgccagccccagcagccccagcagccgggaggagaaggagagcaagaaggagcgggaggaggagttcaagacccaccacgagatgaaggagtacagcggctttgctggggtgtcccggccccggggcaccttcttccgcatccggggccggggccgggcccggggcgtgtttgctggcaccaacacaggccccaacaacagcaacaccaccttccagaagaggcccaaggaggaggagtgggaccctgagtacacccccaagagcaagaagtacttcctgcatgatgacagagatgatggagtggactactgggccaagaggggccggggccggggcaccttccagaggggccggggccgcttcaacttcaagaagagcggcagcagccccaagtggacccatgacaagtaccagggagatggcatcgtggaggatgaggaggagaccatggagaacaatgaggagaagaaggacaggaggaaggaggagaaggagtag

SEQ ID NO: 145078 - DNA, 2244 bp, synthetic construct
  misc_feature 1..2244: note = Description of Artificial Sequence: Synthetic coding sequence
  source 1..2244: mol_type = other DNA
atgggccgcagcaacagccgcagccacagcagccgcagcaagagccgcagccagagcagcagccgcagccgcagccgcagccacagcaggaagaagcgctacagcagccgcagccgcagcaggacctacagccgcagccgcagccgggacaggatgtacagccgggactaccgccgggactacagaaacaacagaggcatgaggcggccctacggctaccggggccggggccggggctactaccagggcggcggcggccgctaccacagaggaggctacagacctgtgtggaacagaagacacagccgcagcccccggcggggccgcagccgcagccgcagccccaagagaagatctgtgagcagccagaggagccgcagccgcagccgccgcagctaccgcagcagccgcagccccaggagcagcagcagccgcagcagcagcccctacagcaagagccctgtgtccaagaggcggggcagccaggagaagcagaccaagaaggccgagggggagccccaggaggagagccccctgaagagcaagagccaggaggagcccaaggacacctttgaacatgaccccagcgagagcattgatgagttcaacaagagcagcgccaccagcggggacatctggccaggcctgagcgcctatgacaacagccccaggagcccccacagccccagccccatcgccaccccacccagccagagcagcagctgcagtgatgcccccatgctgagcacagtgcacagcgccaagaacacccccagccagcacagccacagcatccagcacagccctgagaggagcggcagcggctctgtgggcaatggcagcagccgctacagccccagccagaacagccccatccaccacatccccagccgccgcagccctgccaagaccatcgccccccagaatgcccccagagatgagagccggggccgcagcagcttctacccagatggaggagaccaggagacagccaagacaggcaagttcctgaagagcccccccctgcacaagaacctggatgcccgggagaagagcaccttccgggaggagagccccctgcgcatcaagatgattgccagtgacagccacaggcctgaggtgaagctgaagatggcccctgtgcccctggatgacagcaacagacctgccagcctgaccaaggaccggctgctggccagcaccctggtgcacagcgtgaagaaggagcaggagttccgcagcatctttgaccacatcaagctgccccaggccagcaagagcaccagcgagagcttcatccagcacatcgtgtccctggtgcaccacgtgaaggagcagtacttcaagtctgctgccatgaccctgaatgaacgcttcaccagctaccagaaggccacagaggagcacagcacccggcagaagagccctgagatccacagaagaattgacatcagccccagcaccctgaggaagcacacccggctggccggggaggagagggtcttcaaggaggagaaccagaagggggacaagaagctgcgctgtgacagcgctgacctgcggcatgacatcgacagaagaaggaaggagaggagcaaggagcggggggacagcaagggcagccgggagagcagcggcagcaggaagcaggagaagacccccaaggactacaaggagtacaagagctacaaggatgacagcaagcacaagcgggagcaggaccacagccgcagcagcagcagcagcgccagccccagcagccccagcagccgggaggagaaggagagcaagaaggagcgggaggaggagttcaagacccaccacgagatgaaggagtacagcggctttgctggggtgtcccggccccggggcaccttcttccgcatccggggccggggccgggcccggggcgtgtttgctggcaccaacacaggccccaacaacagcaacaccaccttccagaagaggcccaaggaggaggagtgggaccctgagtacacccccaagagcaagaagtacttcctgcatgatgacagagatgatggagtggactactgggccaagaggggccggggccggggcaccttccagaggggccggggccgcttcaacttcaagaagagcggcagcagccccaagtggacccatgacaagtaccagggagatggcatcgtggaggatgaggaggagaccatggagaacaatgaggagaagaaggacaggaggaaggaggagaaggagtag

SEQ ID NO: 145079 - DNA, 2763 bp, synthetic construct
  misc_feature 1..2763: note = Description of Artificial Sequence: Synthetic coding sequence
  source 1..2763: mol_type = other DNA
atgggccgcagcaacagccgcagccacagcagccgcagcaagagccgcagccagagcagcagccgcagccgcagccgcagccacagcaggaagaagcgctacagcagccgcagccgcagcaggacctacagccgcagccgcagccgggacaggatgtacagccgggactaccgccgggactacagaaacaacagaggcatgaggcggccctacggctaccggggccggggccggggctactaccagggcggcggcggccgctaccacagaggaggctacagacctgtgtggaacagaagacacagccgcagcccccggcggggccgcagccgcagccgcagccccaagagaagatctgtgagcagccagaggagccgcagccgcagccgccgcagctaccgcagcagccgcagccccaggagcagcagcagccgcagcagcagcccctacagcaagagccctgtgtccaagaggcggggcagccaggagaagcagaccaagaaggccgagggggagccccaggaggagagccccctgaagagcaagagccaggaggagcccaaggacacctttgaacatgaccccagcgagagcattgatgagttcaacaagagcagcgccaccagcggggacatctggccaggcctgagcgcctatgacaacagccccaggagcccccacagccccagccccatcgccaccccacccagccagagcagcagctgcagtgatgcccccatgctgagcacagtgcacagcgccaagaacacccccagccagcacagccacagcatccagcacagccctgagaggagcggcagcggctctgtgggcaatggcagcagccgctacagccccagccagaacagccccatccaccacatccccagccgccgcagccctgccaagaccatcgccccccagaatgcccccagagatgagagccggggccgcagcagcttctacccagatggaggagaccaggagacagccaagacaggcaagttcctgaagcgcttcacagatgaggagagcagggtcttcctgctggaccggggcaacacccgggacaaggaggccagcaaggagaagggcagcgagaagggccgggcagagggggagtgggaggaccaggaggccctggactacttcagtgacaaggagagcggcaagcagaagttcaatgattctgaaggagatgacacagaggagacagaggactaccggcagttcaggaagtctgtgctggccgaccagggcaagagctttgccacagccagccacaggaacacagaggaggagggcctgaagtacaagagcaaggtgtccctgaagggcaaccgggagagtgatggcttccgggaggagaagaactacaagctgaaggagaccggctacgtggtggagcggcccagcaccaccaaggacaagcacaaggaggaggacaagaacagcgagcgcatcaccgtgaagaaggagacccagagccctgagcaggtgaagtctgagaagctgaaggacctgtttgactacagcccccccctgcacaagaacctggatgcccgggagaagagcaccttccgggaggagagccccctgcgcatcaagatgattgccagtgacagccacaggcctgaggtgaagctgaagatggcccctgtgcccctggatgacagcaacagacctgccagcctgaccaaggaccggctgctggccagcaccctggtgcacagcgtgaagaaggagcaggagttccgcagcatctttgaccacatcaagctgccccaggccagcaagagcaccagcgagagcttcatccagcacatcgtgtccctggtgcaccacgtgaaggagcagtacttcaagtctgctgccatgaccctgaatgaacgcttcaccagctaccagaaggccacagaggagcacagcacccggcagaagagccctgagatccacagaagaattgacatcagccccagcaccctgaggaagcacacccggctggccggggaggagagggtcttcaaggaggagaaccagaagggggacaagaagctgcgctgtgacagcgctgacctgcggcatgacatcgacagaagaaggaaggagaggagcaaggagcggggggacagcaagggcagccgggagagcagcggcagcaggaagcaggagaagacccccaaggactacaaggagtacaagagctacaaggatgacagcaagcacaagcgggagcaggaccacagccgcagcagcagcagcagcgccagccccagcagccccagcagccgggaggagaaggagagcaagaaggagcgggaggaggagttcaagacccaccacgagatgaaggagtacagcggctttgctggggtgtcccggccccggggcaccttcttccgcatccggggccggggccgggcccggggcgtgtttgctggcaccaacacaggccccaacaacagcaacaccaccttccagaagaggcccaaggaggaggagtgggaccctgagtacacccccaagagcaagaagtacttcctgcatgatgacagagatgatggagtggactactgggccaagaggggccggggccggggcaccttccagaggggccggggccgcttcaacttcaagaagagcggcagcagccccaagtggacccatgacaagtaccagggagatggcatcgtggaggatgaggaggagaccatggagaacaatgaggagaagaaggacaggaggaaggaggagaaggagtag

SEQ ID NO: 145080 - DNA, 531 bp, synthetic construct
  misc_feature 1..531: note = Description of Artificial Sequence: Synthetic coding sequence
  source 1..531: mol_type = other DNA
atgggccggcctgctggcctcttcccccccctgtgccccttcctgggcttccggcctgaggcctgctgggagcggcacatgcagatcgagcgggcccccagcgtgccccccttcctgcgctgggccggctaccggcccggccctgtgagaagaagaggcaaggtggagctgatcaagtttgtgcgggtgcagtggaggcggccccaggtggagtggaggagaagacgctggggccctggccctggggcctccatggccggcagcgaggagctgggcctgcgggaggacaccctgcgggtgctggccgccttcctgcggcggggggaggccgccggcagccctgtgcccaccccaccccggcccagctacagccggctgctgtgctttggaggccctgctgctggaacagctggccccagggctgctgagatcagcgcccagccccgcatcaccggcagccccatcgaccgggagggcagccacacagctgaggccggcggccctgctgggggcggcggccgcagccactag

SEQ ID NO: 145081 - DNA, 1005 bp, synthetic construct
  misc_feature 1..1005: note = Description of Artificial Sequence: Synthetic coding sequence
  source 1..1005: mol_type = other DNA
atgggccggcctgctggcctcttcccccccctgtgccccttcctgggcttccggcctgaggcctgctgggagcggcacatgcagatcgagcgggcccccagcgtgccccccttcctgcgctgggccggctaccggcccggccctgtgagaagaagaggcaaggtggagctgatcaagtttgtgcgggtgcagtggaggcggccccaggtggagtggaggagaagacgctggggccctggccctggggcctccatggccggcagcgaggagctgggcctgcgggaggacaccctgcgggtgctggccgccttcctgcggcggggggaggccgccggcagccctgtgcccaccccacccaggagccctgcccaggaggagcccacagacttcctgagccggctgcggcgctgcctgccctgcagcctgggccgcggggccgcccccagcgagagcccccggccctgcagcctgcccatccggccctgctacggcctggagcccggccctgccaccccagacttctacgccctggtggcccagaggctggagcagctggtgcaggagcagctgaagagcccccccagccctgagctgcagggcccccccagcacagagaaggaggccatcctgcggcggctggtggccctgctggaggaggaggccgaggtgatcaaccagaagctggccagtgaccctgccctgcggagcaagctggtgcggctgagcagtgacagctttgcccggctggtggagctgttctgcagcagagatgacagcagccggcccagccgggcctgccccggccccccaccacccagccctgagcccctggcccggctggccctggccatggagctgagccggcgggtggccggcctgggcggcaccctggccggcctgtctgtggagcacgtgcacagcttcaccccctggatccaggcccatggaggctgggagggcatcctggccgtgtcccctgtggacctgaacctgcccctggactag

SEQ ID NO: 145082 - DNA, 1002 bp, synthetic construct
  misc_feature 1..1002: note = Description of Artificial Sequence: Synthetic coding sequence
  source 1..1002: mol_type = other DNA
atgggccggcctgctggcctcttcccccccctgtgccccttcctgggcttccggcctgaggcctgctgggagcggcacatgcagatcgagcgggcccccagcgtgccccccttcctgcgctgggccggctaccggcccggccctgtgagaagaagaggcaaggtggagctgatcaagtttgtgcgggtgcagtggaggcggccccaggtggagtggaggagaagacgctggggccctggccctggggcctccatggccggcagcgaggagctgggcctgcgggaggacaccctgcgggtgctggccgccttcctgcggcggggggaggccgccggcagccctgtgcccaccccacccagccctgcccaggaggagcccacagacttcctgagccggctgcggcgctgcctgccctgcagcctgggcagaggagctgcccccagcgagagcccccggccctgcagcctgcccatccggccctgctacggcctggagcccggccctgccaccccagacttctacgccctggtggcccagaggctggagcagctggtgcaggagcagctgaagagcccccccagccctgagctgcagggcccccccagcacagagaaggaggccatcctgcggcggctggtggccctgctggaggaggaggccgaggtgatcaaccagaagctggccagtgaccctgccctgcggagcaagctggtgcggctgagcagtgacagctttgcccggctggtggagctgttctgcagcagagatgacagcagccggcccagccgggcctgccccggccccccaccacccagccctgagcccctggcccggctggccctggccatggagctgagcagaagagtggccggcctgggcggcaccctggccggcctgtctgtggagcacgtgcacagcttcaccccctggatccaggcccacggcggctgggagggcatcctggccgtgtcccctgtggacctgaacctgcccctggactag

SEQ ID NO: 145083 - DNA, 5166 bp, synthetic construct
  misc_feature 1..5166: note = Description of Artificial Sequence: Synthetic coding sequence
  source 1..5166: mol_type = other DNA
atgctgagcgccacccccctgtatggaaatgtgcacagctggatgaacagcgagcgggtgaggatgtgtggggccagcgaggacaggaagatcctggtgaatgatggagatgccagcaaggcccggctggagctgcgggaggagaaccccctgaaccacaacgtggtggatgccagcacagcccacagaattgatggcctggccgccctgtccatggacagaacaggcctcatccgggagggcctgcgggtgcccggcaacatcgtgtacagcagcctgtgtggcctgggcagcgagaagggccgggaggccgccaccagcaccctgggcggcctgggcttcagcagcgagaggaaccctgagatgcagttcaagcccaacaccccagagaccgtggaggccagcgctgtgtctgggaagcccccaaatggcttcagcgccatctacaagaccccacctggcatccagaagtctgctgtggccacagctgaggccctgggcctggacaggcctgccagtgacaagcagagccccctgaacatcaacggggccagctacctgcggctgccctgggtgaacccctacatggagggcgccaccccagccatctaccccttcctggacagccccaacaagtacagcctgaacatgtacaaggccctgctgccccagcagagctacagcctggcccagcccctgtacagccctgtgtgcaccaacggggagcgcttcctgtacctgcccccaccccactacgtgggcccccacatccccagcagcctggccagccccatgaggctgagcaccccatctgccagccctgccatcccccccctggtgcactgtgccgacaagagcctgccctggaagatgggcgtgtccccaggcaaccctgtggacagccacgcctacccccacatccagaacagcaagcagccccgggtgcccagcgccaaggctgtgaccagcggcctgcccggggacacagccctgctgctgccccccagcccccggcccagcccccgggtgcacctgcccacccagcctgctgctgacacctacagcgagttccacaagcactacgcccgcatcagcaccagccccagcgtggccctgagcaagccctacatgacagtgtcctctgagttccctgctgcccggctgagcaatggcaagtaccccaaggcccctgagggcggggagggcgcccagcctgtgcccggccacgccaggaagacagctgtgcaggacaggaaggatggcagcagcccccccctgctggagaagcagacagtgaccaaggatgtgacagacaagcccctggacctgagcagcaaggtggtggatgtggatgccagcaaggctgaccacatgaagaagatggcccccaccgtgctggtgcacagcagagctggcagcggcctggtgctgagcggcagcgagatccccaaggagaccctgagccccccaggaaatggctgtgccatctacagaagtgagatcatcagcacagcccccagctcctgggtggtgcccggccccagccccaatgaagaaaataatggcaagtccatgagcctgaagaacaaggccctggactgggccatcccccagcagaggagcagcagctgccccaggatgggcggcacagatgctgtgatcaccaacgtgtctggctctgtgtcctctgctggccgcccagccagcgccagccctgccccaaatgccaatgctgatggcaccaagaccagccgcagctctgtggagaccaccccatctgtcatccagcacgtgggccagcccccagccaccccagccaagcacagcagcagcaccagcagcaaaggagccaaggccagcaaccctgagcccagcttcaaggccaatgaaaatggcctgccccccagcagcatcttcctgagccccaatgaggccttccgcagcccccccatcccctaccccaggagctacctgccctacccagcccctgagggcattgctgtgagccccctgagcctgcacggcaagggccctgtgtacccccaccctgtgctgctgcccaacggcagcctcttccctggccacctggcccccaagccaggcctgccctacggcctgcccaccggccggcctgagtttgtgacctaccaggatgccctgggcctgggcatggtgcaccccatgctgatcccccacacccccatcgagatcaccaaggaggagaagccagagaggaggagccgcagccatgagcgggcccgctatgaggaccccaccctgaggaaccgcttcagcgagatcctggagaccagcagcaccaagctgcacccagatgtgcccacagacaagaacctgaagcccaaccccaactggaaccagggcaagacagtggtgaagagtgacaagctggtgtatgtggacctgctgcgggaggagccagatgccaagacagacaccaacgtgtccaagcccagctttgctgctgagagcgtgggccagagcgctgagccccccaagcccagcgtggagcccgccctgcagcagcaccgggacttcatcgccctgcgggaggagctgggccgcatcagtgacttccacgagacctacaccttcaagcagcccgtcttcaccgtgtccaaggacagcgtgctggccggcaccaacaaggagaacctgggcctgcctgtgtccacccccttcctggagccccccctgggcagtgatggccctgctgtgaccttcggcaagacccaggaggaccccaagcccttctgtgtgggcagcgccccacccagcgtggatgtgacccccacctacaccaaggatggagcagatgaagctgagagcaatgatggcaaggtgctgaagcccaagcccagcaagctggccaagagaattgccaacagcgctggctacgtgggggaccgcttcaagtgtgtgaccacagagctgtatgctgacagcagccagctgagccgggagcagagggccctgcagatggagggcctgcaggaggacagcatcctgtgcctgcctgctgcctactgtgagcgggccatgatgaggttcagcgagctggagatgaaggagcgggagggcggccacccagccaccaaggacagcgagatgtgcaagttcagccctgctgactgggagcggctgaagggcaaccaggacaagaagcccaagtctgtgaccctggaggaggccatcgccgagcagaatgaaagtgagcgctgtgagtacagcgtgggcaacaagcaccgggacccctttgaggcccctgaggacaaggacctgcctgtggagaagtactttgtggagcggcagcctgtgtctgagcccccagctgaccaggtggccagtgacatgccccacagccccaccctgcgggtggacaggaagaggaaggtgtctggggacagcagccacacagagaccacagctgaggaggtgcctgaggaccccctgctgaaggccaagagaagaagagtgtccaagggcctgcaccccaagaagcagaggcacctgctgcacctgcgggagcgctgggagcagcaggtgtctgctgctgatggcaagccaggccggcagagcaggaaggaggtgacccaggccacccagcctgaggccatcccccagggcaccaacatcacagaggagaagccaggcaggaagagagctgaggccaagggcaacagatcctggagcgaggagagcctgaagcccagcgacaatgagcagggcctgcctgtgttcagcggcagcccccccatgaagagcctgagcagcaccagcgctgggggcaagaagcaggcccagcccagctgtgccccagccagccggcccccagccaagcagcagaagatcaaggagaaccagaagacagatgtgctgtgtgctgatgaggaggaggactgccaggccgccagcctgctgcagaagtacacagacaacagcgagaagcccagcggcaagaggctgtgcaagaccaagcacctgatcccccaggagagccggcggggcctgcccctgaccggggagtactacgtggagaatgctgatggcaaggtgacagtgcggcgcttcaggaagaggcctgagcccagcagtgactatgacctgagccctgccaagcaggagcccaagccctttgaccggctgcagcagctgctgcctgccagccagagcacccagctgccctgcagcagcagcccccaggagaccacccagagccggcccatgcctcctgaggcccggcggctgattgtgaacaagaatgctggggagaccctgctgcagagagctgcccggctgggctatgaggaggtggtgctgtactgcctggagaacaagatctgtgatgtgaaccaccgggacaatgccggctactgtgccctgcacgaggcctgtgcccggggctggctgaacatcgtgcgccacctgctggagtatggagcagatgtgaactgcagcgcccaggacggcacccggcccctgcatgatgctgtggagaatgaccacctggagatcgtgcggctgctgctgtcctatggagctgaccccaccctggccacctacagcggccgcaccatcatgaagatgacccacagcgagctgatggagaagttcctgacagactacctgaatgacctgcagggcagaaatgatgatgatgccagcggcacctgggacttctacggcagctctgtgtgtgagccagatgatgagagcggctatgatgtgctggccaaccccccaggccctgaggaccaggatgatgatgatgatgcctacagtgatgtgtttgaatttgagttcagcgagacccccctgctgccctgctacaacatccaggtgtctgtggcccagggccccaggaactggctgctgctgagtgatgtgctgaagaagctgaagatgagcagccgcatcttccgctgcaacttccccaacgtggagatcgtgaccatcgccgaggccgagttctaccggcaggtgtctgccagcctgctcttcagctgcagcaaggacctggaggccttcaaccctgagagcaaggagctgctggacctggtggagttcaccaatgagatccagaccctgctgggcagctctgtggagtggctgcaccccagcgacctggccagtgacaactactggtag

SEQ ID NO: 145084 - DNA, 5268 bp, synthetic construct
  misc_feature 1..5268: note = Description of Artificial Sequence: Synthetic coding sequence
  source 1..5268: mol_type = other DNA
atgctgagcgccacccccctgtatggaaatgtgcacagctggatgaacagcgagcgggtgaggatgtgtggggccagcgaggacaggaagatcctggtgaatgatggagatgccagcaaggcccggctggagctgcgggaggagaaccccctgaaccacaacgtggtggatgccagcacagcccacagaattgatggcctggccgccctgtccatggacagaacaggcctcatccgggagggcctgcgggtgcccggcaacatcgtgtacagcagcctgtgtggcctgggcagcgagaagggccgggaggccgccaccagcaccctgggcggcctgggcttcagcagcgagaggaaccctgagatgcagttcaagcccaacaccccagagaccgtggaggccagcgctgtgtctgggaagcccccaaatggcttcagcgccatctacaagaccccacctggcatccagaagtctgctgtggccacagctgaggccctgggcctggacaggcctgccagtgacaagcagagccccctgaacatcaacggggccagctacctgcggctgccctgggtgaacccctacatggagggcgccaccccagccatctaccccttcctggacagccccaacaagtacagcctgaacatgtacaaggccctgctgccccagcagagctacagcctggcccagcccctgtacagccctgtgtgcaccaacggggagcgcttcctgtacctgcccccaccccactacgtgggcccccacatccccagcagcctggccagccccatgaggctgagcaccccatctgccagccctgccatcccccccctggtgcactgtgccgacaagagcctgccctggaagatgggcgtgtccccaggcaaccctgtggacagccacgcctacccccacatccagaacagcaagcagccccgggtgcccagcgccaaggctgtgaccagcggcctgcccggggacacagccctgctgctgccccccagcccccggcccagcccccgggtgcacctgcccacccagcctgctgctgacacctacagcgagttccacaagcactacgcccgcatcagcaccagccccagcgtggccctgagcaagccctacatgacagtgtcctctgagttccctgctgcccggctgagcaatggcaagtaccccaaggcccctgagggcggggagggcgcccagcctgtgcccggccacgccaggaagacagctgtgcaggacaggaaggatggcagcagcccccccctgctggagaagcagacagtgaccaaggatgtgacagacaagcccctggacctgagcagcaaggtggtggatgtggatgccagcaaggctgaccacatgaagaagatggcccccaccgtgctggtgcacagcagagctggcagcggcctggtgctgagcggcagcgagatccccaaggagaccctgagccccccaggaaatggctgtgccatctacagaagtgagatcatcagcacagcccccagctcctgggtggtgcccggccccagccccaatgaagaaaataatggcaagtccatgagcctgaagaacaaggccctggactgggccatcccccagcagaggagcagcagctgccccaggatgggcggcacagatgctgtgatcaccaacgtgtctggctctgtgtcctctgctggccgcccagccagcgccagccctgccccaaatgccaatgctgatggcaccaagaccagccgcagctctgtggagaccaccccatctgtcatccagcacgtgggccagcccccagccaccccagccaagcacagcagcagcaccagcagcaaaggagccaaggccagcaaccctgagcccagcttcaaggccaatgaaaatggcctgccccccagcagcatcttcctgagccccaatgaggccttccgcagcccccccatcccctaccccaggagctacctgccctacccagcccctgagggcattgctgtgagccccctgagcctgcacggcaagggccctgtgtacccccaccctgtgctgctgcccaacggcagcctcttccctggccacctggcccccaagccaggcctgccctacggcctgcccaccggccggcctgagtttgtgacctaccaggatgccctgggcctgggcatggtgcaccccatgctgatcccccacacccccatcgagatcaccaaggaggagaagccagagaggaggagccgcagccatgagcgggcccgctatgaggaccccaccctgaggaaccgcttcagcgagatcctggagaccagcagcaccaagctgcacccagatgtgcccacagacaagaacctgaagcccaaccccaactggaaccagggcaagacagtggtgaagagtgacaagctggtgtatgtggacctgctgcgggaggagccagatgccaagacagacaccaacgtgtccaagcccagctttgctgctgagagcgtgggccagagcgctgagccccccaagcccagcgtggagcccgccctgcagcagcaccgggacttcatcgccctgcgggaggagctgggccgcatcagtgacttccacgagacctacaccttcaagcagcccgtcttcaccgtgtccaaggacagcgtgctggccggcaccaacaaggagaacctgggcctgcctgtgtccacccccttcctggagccccccctgggcagtgatggccctgctgtgaccttcggcaagacccaggaggaccccaagcccttctgtgtgggcagcgccccacccagcgtggatgtgacccccacctacaccaaggatggagcagatgaagctgagagcaatgatggcaaggtgctgaagcccaagcccagcaagctggccaagagaattgccaacagcgctggctacgtgggggaccgcttcaagtgtgtgaccacagagctgtatgctgacagcagccagctgagccgggagcagagggccctgcagatggagggcctgcaggaggacagcatcctgtgcctgcctgctgcctactgtgagcgggccatgatgaggttcagcgagctggagatgaaggagcgggagggcggccacccagccaccaaggacagcgagatgtgcaagttcagccctgctgactgggagcggctgaagggcaaccaggacaagaagcccaagtctgtgaccctggaggaggccatcgccgagcagaatgaaagtgagcgctgtgagtacagcgtgggcaacaagcaccgggacccctttgaggcccctgaggacaaggacctgcctgtggagaagtactttgtggagcggcagcctgtgtctgagcccccagctgaccaggtggccagtgacatgccccacagccccaccctgcgggtggacaggaagaggaaggtgtctggggacagcagccacacagagaccacagctgaggaggtgcctgaggaccccctgctgaaggccaagagaagaagagtgtccaaggatgactggccagagcgggagatgaccaacagcagcagcaaccacctggaggacccccactacagcgagctgaccaacctgaaggtgtgcatcgagctgaccggcctgcaccccaagaagcagaggcacctgctgcacctgcgggagcgctgggagcagcaggtgtctgctgctgatggcaagccaggccggcagagcaggaaggaggtgacccaggccacccagcctgaggccatcccccagggcaccaacatcacagaggagaagccaggcaggaagagagctgaggccaagggcaacagatcctggagcgaggagagcctgaagcccagcgacaatgagcagggcctgcctgtgttcagcggcagcccccccatgaagagcctgagcagcaccagcgctgggggcaagaagcaggcccagcccagctgtgccccagccagccggcccccagccaagcagcagaagatcaaggagaaccagaagacagatgtgctgtgtgctgatgaggaggaggactgccaggccgccagcctgctgcagaagtacacagacaacagcgagaagcccagcggcaagaggctgtgcaagaccaagcacctgatcccccaggagagccggcggggcctgcccctgaccggggagtactacgtggagaatgctgatggcaaggtgacagtgcggcgcttcaggaagaggcctgagcccagcagtgactatgacctgagccctgccaagcaggagcccaagccctttgaccggctgcagcagctgctgcctgccagccagagcacccagctgccctgcagcagcagcccccaggagaccacccagagccggcccatgcctcctgaggcccggcggctgattgtgaacaagaatgctggggagaccctgctgcagagagctgcccggctgggctatgaggaggtggtgctgtactgcctggagaacaagatctgtgatgtgaaccaccgggacaatgccggctactgtgccctgcacgaggcctgtgcccggggctggctgaacatcgtgcgccacctgctggagtatggagcagatgtgaactgcagcgcccaggacggcacccggcccctgcatgatgctgtggagaatgaccacctggagatcgtgcggctgctgctgtcctatggagctgaccccaccctggccacctacagcggccgcaccatcatgaagatgacccacagcgagctgatggagaagttcctgacagactacctgaatgacctgcagggcagaaatgatgatgatgccagcggcacctgggacttctacggcagctctgtgtgtgagccagatgatgagagcggctatgatgtgctggccaaccccccaggccctgaggaccaggatgatgatgatgatgcctacagtgatgtgtttgaatttgagttcagcgagacccccctgctgccctgctacaacatccaggtgtctgtggcccagggccccaggaactggctgctgctgagtgatgtgctgaagaagctgaagatgagcagccgcatcttccgctgcaacttccccaacgtggagatcgtgaccatcgccgaggccgagttctaccggcaggtgtctgccagcctgctcttcagctgcagcaaggacctggaggccttcaaccctgagagcaaggagctgctggacctggtggagttcaccaatgagatccagaccctgctgggcagctctgtggagtggctgcaccccagcgacctggccagtgacaactactggtag

SEQ ID NO: 145085 - DNA, 5112 bp, synthetic construct
  misc_feature 1..5112: note = Description of Artificial Sequence: Synthetic coding sequence
  source 1..5112: mol_type = other DNA
atgctgagcgccacccccctgtatggaaatgtgcacagctggatgaacagcgagcgggtgaggatgtgtggggccagcgaggacaggaagatcctggtgaatgatggagatgccagcaaggcccggctggagctgcgggaggagaaccccctgaaccacaacgtggtggatgccagcacagcccacagaattgatggcctggccgccctgtccatggacagaacaggcctcatccgggagggcctgcgggtgcccggcaacatcgtgtacagcagcctgtgtggcctgggcagcgagaagggccgggaggccgccaccagcaccctgggcggcctgggcttcagcagcgagaggaaccctgagatgcagttcaagcccaacaccccagagaccgtggaggccagcgctgtgtctgggaagcccccaaatggcttcagcgccatctacaagaccccacctggcatccagaagtctgctgtggccacagctgaggccctgggcctggacaggcctgccagtgacaagcagagccccctgaacatcaacggggccagctacctgcggctgccctgggtgaacccctacatggagggcgccaccccagccatctaccccttcctggacagccccaacaagtacagcctgaacatgtacaaggccctgctgccccagcagagctacagcctggcccagcccctgtacagccctgtgtgcaccaacggggagcgcttcctgtacctgcccccaccccactacgtgggcccccacatccccagcagcctggccagccccatgaggctgagcaccccatctgccagccctgccatcccccccctggtgcactgtgccgacaagagcctgccctggaagatgggcgtgtccccaggcaaccctgtggacagccacgcctacccccacatccagaacagcaagcagccccgggtgcccagcgccaaggctgtgaccagcggcctgcccggggacacagccctgctgctgccccccagcccccggcccagcccccgggtgcacctgcccacccagcctgctgctgacacctacagcgagttccacaagcactacgcccgcatcagcaccagccccagcgtggccctgagcaagccctacatgacagtgtcctctgagttccctgctgcccggctgagcaatggcaagtaccccaaggcccctgagggcggggagggcgcccagcctgtgcccggccacgccaggaagacagctgtgcaggacaggaaggatggcagcagcccccccctgctggagaagcagacagtgaccaaggatgtgacagacaagcccctggacctgagcagcaaggtggtggatgtggatgccagcaaggctgaccacatgaagaagatggcccccaccgtgctggtgcacagcagagctggcagcggcctggtgctgagcggcagcgagatccccaaggagaccctgagccccccaggaaatggctgtgccatctacagaagtgagatcatcagcacagcccccagctcctgggtggtgcccggccccagccccaatgaagaaaataatggcaagtccatgagcctgaagaacaaggccctggactgggccatcccccagcagaggagcagcagctgccccaggatgggcggcacagatgctgtgatcaccaacgtgtctggctctgtgtcctctgctggccgcccagccagcgccagccctgccccaaatgccaatgctgatggcaccaagaccagccgcagctctgtggagaccaccccatctgtcatccagcacgtgggccagcccccagccaccccagccaagcacagcagcagcaccagcagcaaaggagccaaggccagcaaccctgagcccagcttcaaggccaatgaaaatggcctgccccccagcagcatcttcctgagccccaatgaggccttccgcagcccccccatcccctaccccaggagctacctgccctacccagcccctgagggcattgctgtgagccccctgagcctgcacggcaagggccctgtgtacccccaccctgtgctgctgcccaacggcagcctcttccctggccacctggcccccaagccaggcctgccctacggcctgcccaccggccggcctgagtttgtgacctaccaggatgccctgggcctgggcatggtgcaccccatgctgatcccccacacccccatcgagatcaccaaggaggagaagccagagaggaggagccgcagccatgagcgggcccgctatgaggaccccaccctgaggaaccgcttcagcgagatcctggagaccagcagcaccaagctgcacccagatgtgcccacagacaagaacctgaagcccaaccccaactggaaccagggcaagacagtggtgaagagtgacaagctggtgtatgtggacctgctgcgggaggagccagatgccaagacagacaccaacgtgtccaagcccagctttgctgctgagagcgtgggccagagcgctgagccccccaagcccagcgtggagcccgccctgcagcagcaccgggacttcatcgccctgcgggaggagctgggccgcatcagtgacttccacgagacctacaccttcaagcagcccgtcttcaccgtgtccaaggacagcgtgctggccggcaccaacaaggagaacctgggcctgcctgtgtccacccccttcctggagccccccctgggcagtgatggccctgctgtgaccttcggcaagacccaggaggaccccaagcccttctgtgtgggcagcgccccacccagcgtggatgtgacccccacctacaccaaggatggagcagatgaagctgagagcaatgatggcaaggtgctgaagcccaagcccagcaagctggccaagagaattgccaacagcgctggctacgtgggggaccgcttcaagtgtgtgaccacagagctgtatgctgacagcagccagctgagccgggagcagagggccctgcagagggccatgatgaggttcagcgagctggagatgaaggagcgggagggcggccacccagccaccaaggacagcgagatgtgcaagttcagccctgctgactgggagcggctgaagggcaaccaggacaagaagcccaagtctgtgaccctggaggaggccatcgccgagcagaatgaaagtgagcgctgtgagtacagcgtgggcaacaagcaccgggacccctttgaggcccctgaggacaaggacctgcctgtggagaagtactttgtggagcggcagcctgtgtctgagcccccagctgaccaggtggccagtgacatgccccacagccccaccctgcgggtggacaggaagaggaaggtgtctggggacagcagccacacagagaccacagctgaggaggtgcctgaggaccccctgctgaaggccaagagaagaagagtgtccaagggcctgcaccccaagaagcagaggcacctgctgcacctgcgggagcgctgggagcagcaggtgtctgctgctgatggcaagccaggccggcagagcaggaaggaggtgacccaggccacccagcctgaggccatcccccagggcaccaacatcacagaggagaagccaggcaggaagagagctgaggccaagggcaacagatcctggagcgaggagagcctgaagcccagcgacaatgagcagggcctgcctgtgttcagcggcagcccccccatgaagagcctgagcagcaccagcgctgggggcaagaagcaggcccagcccagctgtgccccagccagccggcccccagccaagcagcagaagatcaaggagaaccagaagacagatgtgctgtgtgctgatgaggaggaggactgccaggccgccagcctgctgcagaagtacacagacaacagcgagaagcccagcggcaagaggctgtgcaagaccaagcacctgatcccccaggagagccggcggggcctgcccctgaccggggagtactacgtggagaatgctgatggcaaggtgacagtgcggcgcttcaggaagaggcctgagcccagcagtgactatgacctgagccctgccaagcaggagcccaagccctttgaccggctgcagcagctgctgcctgccagccagagcacccagctgccctgcagcagcagcccccaggagaccacccagagccggcccatgcctcctgaggcccggcggctgattgtgaacaagaatgctggggagaccctgctgcagagagctgcccggctgggctatgaggaggtggtgctgtactgcctggagaacaagatctgtgatgtgaaccaccgggacaatgccggctactgtgccctgcacgaggcctgtgcccggggctggctgaacatcgtgcgccacctgctggagtatggagcagatgtgaactgcagcgcccaggacggcacccggcccctgcatgatgctgtggagaatgaccacctggagatcgtgcggctgctgctgtcctatggagctgaccccaccctggccacctacagcggccgcaccatcatgaagatgacccacagcgagctgatggagaagttcctgacagactacctgaatgacctgcagggcagaaatgatgatgatgccagcggcacctgggacttctacggcagctctgtgtgtgagccagatgatgagagcggctatgatgtgctggccaaccccccaggccctgaggaccaggatgatgatgatgatgcctacagtgatgtgtttgaatttgagttcagcgagacccccctgctgccctgctacaacatccaggtgtctgtggcccagggccccaggaactggctgctgctgagtgatgtgctgaagaagctgaagatgagcagccgcatcttccgctgcaacttccccaacgtggagatcgtgaccatcgccgaggccgagttctaccggcaggtgtctgccagcctgctcttcagctgcagcaaggacctggaggccttcaaccctgagagcaaggagctgctggacctggtggagttcaccaatgagatccagaccctgctgggcagctctgtggagtggctgcaccccagcgacctggccagtgacaactactggtag

SEQ ID NO: 145086 - DNA, 1869 bp, synthetic construct
  misc_feature 1..1869: note = Description of Artificial Sequence: Synthetic coding sequence
  source 1..1869: mol_type = other DNA
atgccccacagccccaccctgcgggtggacaggaagaggaaggtgtctggggacagcagccacacagagaccacagctgaggaggtgcctgaggaccccctgctgaaggccaagagaagaagagtgtccaagggcctgcaccccaagaagcagaggcacctgctgcacctgcgggagcgctgggagcagcaggtgtctgctgctgatggcaagccaggccggcagagcaggaaggaggtgacccaggccacccagcctgaggccatcccccagggcaccaacatcacagaggagaagccaggcaggaagagagctgaggccaagggcaacagatcctggagcgaggagagcctgaagcccagcgacaatgagcagggcctgcccgtcttcagcggcagcccccccatgaagagcctgagcagcaccagcgctgggggcaagaagcaggcccagcccagctgtgccccagccagccggcccccagccaagcagcagaagatcaaggagaaccagaagacagatgtgctgtgtgctgatgaggaggaggactgccaggccgccagcctgctgcagaagtacacagacaacagcgagaagcccagcggcaagaggctgtgcaagaccaagcacctgatcccccaggagagcagaagaggcctgcccctgactggagagtactacgtggagaatgctgatggcaaggtgacagtgcggcgcttcaggaagaggcctgagcccagcagtgactatgacctgagccctgccaagcaggagcccaagccctttgaccggctgcagcagctgctgcctgccagccagagcacccagctgccctgcagcagcagcccccaggagaccacccagagccggcccatgcctcctgaggcccggcggctcatcgtgaacaagaatgctggggagaccctgctgcagagagctgcccggctgggctatgaggaggtggtgctgtactgcctggagaacaagatctgtgatgtgaaccaccgggacaatgccggctactgtgccctgcacgaggcctgtgcccggggctggctgaacatcgtgcgccacctgctggagtatggagcagatgtgaactgcagcgcccaggacggcacccggcccctgcatgatgctgtggagaatgaccacctggagatcgtgcggctgctgctgtcctatggagctgaccccaccctggccacctacagcggccgcaccatcatgaagatgacccacagcgagctgatggagaagttcctgacagactacctgaatgacctgcagggcagaaatgatgatgatgccagcggcacctgggacttctacggcagctctgtgtgtgagccagatgatgaaagtggctatgatgtgctggccaaccccccaggccctgaggaccaggatgatgatgatgatgcctacagtgatgtgtttgaatttgagttcagcgagacccccctgctgccctgctacaacatccaggtgtctgtggcccagggccccaggaactggctgctgctgagtgatgtgctgaagaagctgaagatgagcagccgcatcttccgctgcaacttccccaacgtggagatcgtgaccatcgccgaggccgagttctaccggcaggtgtctgccagcctgctcttcagctgcagcaaggacctggaggccttcaaccctgagagcaaggagctgctggacctggtggagttcaccaatgagatccagaccctgctgggcagctctgtggagtggctgcaccccagcgacctggccagtgacaactactggaagagcccccagatcgcccggggctctgtggagggcaagaagacagatgacaagaccagcaagacagacctgtag

SEQ ID NO: 145087 - DNA, 5166 bp, synthetic construct; identical to SEQ ID NO: 145083
  misc_feature 1..5166: note = Description of Artificial Sequence: Synthetic coding sequence
  source 1..5166: mol_type = other DNA

SEQ ID NO: 145088 - DNA, 87 bp, synthetic construct
  misc_feature 1..87: note = Description of Artificial Sequence: Synthetic coding sequence
  source 1..87: mol_type = other DNA
atgctgagcgccacccccctgtatggaaatgtgcacagctggatgaacagcgagcgggtgaggatgtgtggggcctctgaagattag

SEQ ID NO: 145089 - DNA, 1236 bp, synthetic construct
  misc_feature 1..1236: note = Description of Artificial Sequence: Synthetic coding sequence
  source 1..1236: mol_type = other DNA
atgaccaggcctgccttccagcccccagccaccccagccaagcacagcagcagcaccagcagcaagggggccaaggccagcaaccctgagcccagcttcaaggccaatgaaaatggcctgccccccagcagcatcttcctgagccccaatgaggccttccgcagcccccccatcccctaccccaggagctacctgccctacccagcccctgagggcattgctgtgagccccctgagcctgcatggaaaaggacctgtgtacccccaccctgtgctgctgcccaacggcagcctcttccctggccacctggcccccaagccaggcctgccctacggcctgcccaccggccggcctgagtttgtgacctaccaggatgccctgggcctgggcatggtgcaccccatgctgatcccccacacccccatcgagatcaccaaggaggagaagccagagcggcgcagccgcagccatgagcgggcccgctatgaggaccccaccctgaggaaccgcttcagcgagatcctggagaccagcagcaccaagctgcacccagatgtgcccacagacaagaacctgaagcccaaccccaactggaaccagggcaagacagtggtgaagagtgacaagctggtgtatgtggacctgctgcgggaggagccagatgccaagacagacaccaacgtgtccaagcccagctttgctgctgagagcgtgggccagagcgctgagccccccaagcccagcgtggagcccgccctgcagcagcaccgggacttcatcgccctgcgggaggagctgggccgcatcagtgacttccacgagacctacaccttcaagcagcctgtgttcaccgtgtccaaggacagcgtgctggccggcaccaacaaggagaacctgggcctgcctgtgtccacccccttcctggagccccccctgggcagtgatggccctgctgtgaccttcggcaagacccaggaggaccccaagcccttctgtgtgggcagcgcccctccttctgtggatgtgacccccacctacaccaaggatggagcagatgaggccgagagcaatgatggcaaggtgctgaagcccaagcccagcaagctggccaagagaattgccaacagcgctggctacgtgggggaccgcttcaagtgtgtgaccacagagctgtatgctgacagcagccagctgagccgggagcagagggccctgcaggtgtccccacccacctag

SEQ ID NO: 145090 - DNA, 2238 bp, synthetic construct
  misc_feature 1..2238: note = Description of Artificial Sequence: Synthetic coding sequence
  source 1..2238: mol_type = other DNA
atgcctgtgctgagccggccccggccctggaggggcaacaccctgaagaggacagctgtgctgctggccctggccgcctatggagcccacaaggtgtaccccctggtgcggcagtgcctggccccagcccggggcctgcaggccccagctggggagcccacccaggaggccagcggcgtggccgccgccaaggccggcatgaacagagtcttcctgcagaggctgctgtggctgctgcggctgctcttcccccgggtgctgtgccgggagaccggcctgctggccctgcacagcgctgccctggtgtccaggaccttcctgtctgtgtatgtggcccggctggatggccgcctggcccgctgcatcgtgaggaaggacccccgggccttcggctggcagctgctgcagtggctgctgattgccctgcctgccacctttgtgaacagcgccatccgctacctggagggccagctggccctgtccttccgcagccggctggtggcccacgcctaccgcctgtacttcagccagcagacctactacagagtgagcaacatggatggccgcctgagaaatccagaccagagcctgacagaagatgtggtggcctttgctgcctctgtggcccacctgtacagcaacctgaccaagcccctgctggatgtggccgtgaccagctacaccctgctgcgggccgcccggagcagaggagctggaacagcctggcccagcgccatcgccggcctggtggtgttcctgacagccaacgtgctgcgggccttcagccccaagtttggagagctggtggccgaggaggcccggaggaagggggagctgcgctacatgcacagccgggtggtggccaacagcgaggagatcgccttctacggcggccacgaggtggagctggccctgctgcagaggagctaccaggacctggccagccagatcaacctgatcctgctggagcggctgtggtacgtgatgctggagcagttcctgatgaagtatgtgtggagcgccagcggcctgctgatggtggccgtgcccatcatcacagccaccggctacagcgagagtgatgctgaggccgtgaagaaggccgccctggagaagaaggaggaggagctggtgtctgagaggacagaggccttcaccatcgccaggaacctgctgacagctgctgctgatgccatcgagcgcatcatgagcagctacaaggaggtgacagagctggccggctacacagcccgggtgcatgagatgttccaggtgtttgaagatgtgcagcgctgccacttcaagaggccccgggagctggaggatgcccaggccggcagcggcaccatcggccgctctggagtgcgggtggagggccccctgaagatccggggccaggtggtggatgtggagcagggcatcatctgtgagaacatccccatcgtgaccccatctggagaggtggtggtggccagcctgaacatccgggtggaggagggcatgcacctgctgatcaccggccccaacggctgcggcaagagcagcctcttccgcatcctgggcggcctgtggcccacctatggaggagtgctgtacaagcccccaccccagaggatgttctacatcccccagaggccctacatgtctgtgggcagcctgcgggaccaggtgatctacccagacagcgtggaggacatgcagaggaagggctacagcgagcaggacctggaggccatcctggatgtggtgcacctgcaccacatcctgcagcgggagggcggctgggaggccatgtgtgactggaaggatgtgctgagcggcggggagaagcagagaattggcatggccaggatgttctaccaccggcccaagtatgccctgctggatgagtgcaccagcgctgtgtccattgatgtggagggcaagatcttccaggccgccaaggatgctggcatcgccctgctgagcatcacccaccggcccagcctgtggaagtaccacacccacctgctgcagtttgatggagagggcggctggaagtttgagaagctggacagcgctgcccggctgagcctgacagaggagaagcagaggctggagcagcagctggccggcatccccaagatgcagaggcggctgcaggagctgtgccagatcctgggggaggccgtggccccagcccacgtgcctgcccccagcccccagggccctgggggcctgcagggcgccagcacctag

SEQ ID NO: 145091 - DNA, 5358 bp, synthetic construct
  misc_feature 1..5358: note = Description of Artificial Sequence: Synthetic coding sequence
  source 1..5358: mol_type = other DNA
atgatcagcacagcccccctgtacagcggcgtgcacaactggaccagcagtgaccgcatccgcatgtgtggcatcaatgaggagcggcgggcccccctgagtgatgaggagagcaccaccggggactgccagcacttcggcagccaggagttctgtgtgagcagcagcttcagcaaggtggagctgacagctgtgggcagcggcagcaatgcccggggagctgaccctgatggcagcgccacagagaagctgggccacaagtctgaggacaagccagatgacccccagcccaagatggactatgctggaaatgtggccgaggccgagggcttcctggtgcccctgagcagccctggagatggcctgaagctgcctgccagtgacagcgctgaggccagcaacagcagagctgactgctcctggacccccctgaacacccagatgagcaagcaggtggactgcagccctgctggggtgaaggccctggacagccggcagggcgtgggggagaagaacaccttcatcctggccaccctgggcactggagtgcctgtggagggcaccctgcccctggtgaccaccaacttcagccccctgcctgcccccatctgccccccagcccctggcagcgcctctgtgccccacagcgtgcctgatgccttccaggtgcccctgtctgtgcctgcccctgtgccccacagcggcctggtgcctgtgcaggtggccacctctgtgcctgcccccagcccccccctggcccctgtgcctgccctggccccagccccacccagcgtgcccaccctcatcagtgacagcaaccccctgtctgtgtctgcctctgtgctggtgcctgtgcctgccagcgccccacccagcggccctgtgcccctgagcgccccagccccagcccccctgtctgtgcctgtgtctgccccacccctggccctgatccaggcccctgtgccccccagcgcccccaccctggtgctggcccctgtgcccacccctgtgctggcccccatgcctgccagcaccccacctgctgccccagccccacccagcgtgcccatgcccacccccacccccagcagcggcccccccagcacccccaccctcatcccagcctttgcccccacccctgtgcctgcccccaccccagcccccatcttcaccccagcccccacccccatgcctgctgccaccccagctgccatccccaccagcgcccccatcccagccagcttcagcctgagccgggtgtgcttccctgctgcccaggccccagccatgcagaaggtgcccctgtccttccagcccggcaccgtgctgacccccagccagcccctggtgtacatccccccacccagctgtggccagcccctgtctgtggccaccctgcccaccaccctgggcgtgagcagcaccctgaccctgcctgtgctgcccagctacctgcaggaccgctgcctgcccggggtgctggccagccctgagctgcggagctacccctatgccttctctgtggcccggcccctgaccagtgacagcaagctggtgtccctggaggtgaaccggctgccctgcaccagccccagcggcagcaccaccacccagcctgccccagatggagtgcccggccccctggccgacaccagcctggtgacagccagcgccaaggtgctgcccaccccccagcccctgctgcctgcccccagcggcagcagcgccccaccccacccagccaagatgcccagcggcacagagcagcagacagagggcacctctgtgaccttcagccccctgaagagccccccccagctggagcgggagatggccagccccccagagtgcagcgagatgcccctggacctgagcagcaagagcaaccggcagaagctgcccctgcccaaccagaggaagaccccacccatgcctgtgctgacccctgtgcacaccagcagcaaggccctgctgagcacagtgctgagccgcagccagaggaccacccaggccgccggcggcaatgtgaccagctgcctgggcagcaccagcagcccctttgtgatcttccctgagatcgtgagaaatggagaccccagcacctgggtgaagaacagcacagccctgatcagcaccatccctggcacctacgtgggcgtggccaaccctgtgcctgccagcctgctgctgaacaaggaccccaacctgggcctgaacagagaccccaggcacctgcccaagcaggagcccatcagcatcatcgaccagggcgagcccaagggcaccggggccacctgtgggaagaagggcagccaggccggggctgagggccagcccagcacagtgaagcgctacaccccagcccgcatcgcccctggcctgcccggctgccagaccaaggagctgagcctgtggaagcccaccggccctgccaacatctacccccgctgcagcgtgaatggcaagcccaccagcacccaggtgctgcctgtgggctggagcccctaccaccaggccagcctgctgagcatcggcatcagcagcgctggccagctgacccccagccagggcgcccccatccggcccacctctgtggtgtctgagttcagcggcgtgcccagcctgagcagcagcgaggccgtgcacggcctgcctgagggccagcccaggcctgggggcagctttgtgcctgagcaggaccctgtgaccaagaacaagacctgcagaattgctgccaagccctatgaggagcaggtgaaccctgtgctgctgaccctgagcccccagacaggcaccctggccctgtctgtgcagcccagcggcggggacatccgcatgaaccagggccctgaggagagcgagagccacctgtgcagcgacagcacccccaagatggagggcccccagggcgcctgtggcctgaagctggccggggacaccaagcccaagaaccaggtgctggccacctacatgagccatgagctggtgctggccaccccccagaacctgcccaagatgcctgagctgcccctgctgccccatgacagccaccccaaggagctgatcctggatgtggtgcccagcagccggcggggcagcagcacagagcggccccagctgggcagccaggtggacctgggccgggtgaagatggagaaggtggatggagatgtggtgttcaacctggccacctgcttccgggcagatggcctgcctgtggccccccagaggggccaggccgaggtgcgggccaaggccggccaggcccgggtgaagcaggagagcgtgggcgtgtttgcctgcaagaacaagtggcagccagatgatgtgacagagagcctgccccccaagaagatgaagtgtgggaaggagaaggacagcgaggagcagcagctgcagccccaggccaaggctgtggtgcgcagcagccaccggcccaagtgcaggaagctgcccagcgacccccaggagagcaccaagaagagccccaggggggccagtgacagcggcaaggagcacaacggggtgcggggcaagcacaagcacaggaagcccaccaagccagagagccagagccctgggaagagagctgacagccatgaggagggcagcctggagaagaaggccaagagcagcttccgggacttcatccctgtggtgctgagcaccaggaccaggagccagagcggcagcatctgcagcagctttgctggcatggctgacagcgacatgggcagccaggaggtgttccccacagaggaggaggaggaggtgacccccaccccagccaagaggaggaaggtgaggaagacccagagggacacccagtaccgcagccaccacgcccaggacaagagcctgctgagccagggccgccgccacctgtggagggcccgggagatgccctggaggacagaagctgcccggcagatgtgggacaccaatgaggaggaggaggaggaggaggaggagggcctgctgaagaggaagaagagaagacggcagaagagcaggaagtaccagacaggagagtacctgacagagcaggaggatgagcagaggaggaagggccgggctgacctgaaggccaggaagcagaagaccagcagcagccagagcctggagcaccggctgaggaacagaaacctgctgctgcccaacaaggtgcagggcatcagtgacagccccaacggcttcctgcccaacaacctggaggagcccgcctgcctggagaacagcgagaagcccagcggcaagaggaagtgcaagaccaagcacatggccaccgtgtctgaggaggccaagggcaagggccgctggagccagcagaagaccaggagccccaagagccccacccctgtgaagcccacagagccctgcacccccagcaagagccgcagcgccagcagcgaggaggccagcgagagccccacagcccggcagatccccccagaggcccggcggctcatcgtgaacaagaatgctggggagaccctgctgcagagagctgcccggctgggctacaaggatgtggtgctgtactgcctgcagaaggacagtgaagatgtgaaccaccgggacaatgccggctacacagccctgcacgaggcctgcagccggggctggacagacatcctgaacatcctgctggagcacggggccaacgtgaactgcagcgcccaggacggcaccaggcctgtgcatgatgctgtggtgaatgacaacctggagaccatctggctgctgctgtcctatggagctgaccccaccctggccacctacagcggccagacagccatgaagctggccagcagtgacaccatgaagcgcttcctgagtgaccacctgagtgacctgcagggccgggcagagggggaccccggggtgtcctgggacttctacagcagctctgtgctggaggagaaggatggctttgcctgtgacctgctgcacaaccccccaggcagcagtgaccaggagggagatgaccccatggaggaggatgacttcatgtttgagctgagtgacaagcccctgctgccctgctacaacctgcaggtgtctgtgtcccggggcccctgcaactggttcctgttcagtgatgtgctgaagaggctgaagctgagcagccgcatcttccaggcccgcttcccccactttgagatcaccaccatgcccaaggccgagttctaccggcaggtggccagcagccagctgctgaccccagctgagaggcctgggggcctggatgacaggagccccccaggcagcagcgagaccgtggagctggtgcgctatgagccagacctgctgcggctgctgggcagcgaggtggagttccagagctgcaacagctag

SEQ ID NO: 145092 - DNA, 4746 bp, synthetic construct
  misc_feature 1..4746: note = Description of Artificial Sequence: Synthetic coding sequence
  source 1..4746: mol_type = other DNA
atgatcagcacagcccccctgtacagcggcgtgcacaactggaccagcagtgaccgcatccgcatgtgtggcatcaatgaggagcggcgggcccccctgagtgatgaggagagcaccaccggggactgccagcacttcggcagccaggagttctgtgtgagcagcagcttcagcaaggtggagctgacagctgtgggcagcggcagcaatgcccggggagctgaccctgatggcagcgccacagagaagctgggccacaagtctgaggacaagccagatgacccccagcccaagatggactatgctggaaatgtggccgaggccgagggcttcctggtgcccctgagcagccctggagatggcctgaagctgcctgccagtgacagcgctgaggccagcaacagcagagctgactgctcctggacccccctgaacacccagatgagcaagcaggtggactgcagccctgctggggtgaaggccctggacagccggcagggcgtgggggagaagaacaccttcatcctggccaccctgggcactggagtgcctgtggagggcaccctgcccctggtgaccaccaacttcagccccctgcctgcccccatctgccccccagcccctggcagcgcctctgtgccccacagcgtgcctgatgccttccaggtgcccctgtctgtgcctgcccctgtgccccacagcggcctggtgcctgtgcaggtggccacctctgtgcctgcccccagcccccccctggcccctgtgcctgccctggccccagccccacccagcgtgcccaccctcatcagtgacagcaaccccctgtctgtgtctgcctctgtgctggtgcctgtgcctgccagcgccccacccagcggccctgtgcccctgagcgccccagccccagcccccctgtctgtgcctgtgtctgccccacccctggccctgatccaggcccctgtgccccccagcgcccccaccctggtgctggcccctgtgcccacccctgtgctggcccccatgcctgccagcaccccacctgctgccccagccccacccagcgtgcccatgcccacccccacccccagcagcggcccccccagcacccccaccctcatcccagcctttgcccccacccctgtgcctgcccccaccccagcccccatcttcaccccagcccccacccccatgcctgctgccaccccagctgccatccccaccagcgcccccatcccagccagcttcagcctgagccgggtgtgcttccctgctgcccaggccccagccatgcagaaggtgcccctgtccttccagcccggcaccgtgctgacccccagccagcccctggtgtacatccccccacccagctgtggccagcccctgtctgtggccaccctgcccaccaccctgggcgtgagcagcaccctgaccctgcctgtgctgcccagctacctgcaggaccgctgcctgcccggggtgctggccagccctgagctgcggagctacccctatgccttctctgtggcccggcccctgaccagtgacagcaagctggtgtccctggaggtgaaccggctgccctgcaccagccccagcggcagcaccaccacccagcctgccccagatggagtgcccggccccctggccgacaccagcctggtgacagccagcgccaaggtgctgcccaccccccagcccctgctgcctgcccccagcggcagcagcgccccaccccacccagccaagatgcccagcggcacagagcagcagacagagggcacctctgtgaccttcagccccctgaagagccccccccagctggagcgggagatggccagccccccagagtgcagcgagatgcccctggacctgagcagcaagagcaaccggcagaagctgcccctgcccaaccagaggaagaccccacccatgcctgtgctgacccctgtgcacaccagcagcaaggccctgctgagcacagtgctgagccgcagccagaggaccacccaggccgccggcggcaatgtgaccagctgcctgggcagcaccagcagcccctttgtgatcttccctgagatcgtgagaaatggagaccccagcacctgggtgaagaacagcacagccctgatcagcaccatccctggcacctacgtgggcgtggccaaccctgtgcctgccagcctgctgctgaacaaggaccccaacctgggcctgaacagagaccccaggcacctgcccaagcaggagcccatcagcatcatcgaccagggcgagcccaagggcaccggggccacctgtgggaagaagggcagccaggccggggctgagggccagcccagcacagtgaagcgctacaccccagcccgcatcgcccctggcctgcccggctgccagaccaaggagctgagcctgtggaagcccaccggccctgccaacatctacccccgctgcagcgtgaatggcaagcccaccagcacccaggtgctgcctgtgggctggagcccctaccaccaggccagcctgctgagcatcggcatcagcagcgctggccagctgacccccagccagggcgcccccatccggcccacctctgtggtgtctgagttcagcggcgtgcccagcctgagcagcagcgaggccgtgcacggcctgcctgagggccagcccaggcctgggggcagctttgtgcctgagcaggaccctgtgaccaagaacaagacctgcagaattgctgccaagccctatgaggagcaggtgaaccctgtgctgctgaccctgagcccccagacaggcaccctggccctgtctgtgcagcccagcggcggggacatccgcatgaaccagggccctgaggagagcgagagccacctgtgcagcgacagcacccccaagatggagggcccccagggcgcctgtggcctgaagctggccggggacaccaagcccaagaaccaggtgctggccacctacatgagccatgagctggtgctggccaccccccagaacctgcccaagatgcctgagctgcccctgctgccccatgacagccaccccaaggagctgatcctggatgtggtgcccagcagccggcggggcagcagcacagagcggccccagctgggcagccaggtggacctgggccgggtgaagatggagaaggtggatggagatgtggtgttcaacctggccacctgcttccgggcagatggcctgcctgtggccccccagaggggccaggccgaggtgcgggccaaggccggccaggcccgggtgaagcaggagagcgtgggcgtgtttgcctgcaagaacaagtggcagccagatgatgtgacagagagcctgccccccaagaagatgaagtgtgggaaggagaaggacagcgaggagcagcagctgcagccccaggccaaggctgtggtgcgcagcagccaccggcccaagtgcaggaagctgcccagcgacccccaggagagcaccaagaagagccccaggggggccagtgacagcggcaaggagcacaacggggtgcggggcaagcacaagcacaggaagcccaccaagccagagagccagagccctgggaagagagctgacagccatgaggagggcagcctggagaagaaggccaagagcagcttccgggacttcatccctgtggtgctgagcaccaggaccaggagccagagcgacctgaaggccaggaagcagaagaccagcagcagccagagcctggagcaccggctgaggaacagaaacctgctgctgcccaacaaggtgcagggcatcagtgacagccccaacggcttcctgcccaacaacctggaggagcccgcctgcctggagaacagcgagaagcccagcggcaagaggaagtgcaagaccaagcacatggccaccgtgtctgaggaggccaaggatgtggtgctgtactgcctgcagaaggacagtgaagatgtgaaccaccgggacaatgccggctacacagccctgcacgaggcctgcagccggggctggacagacatcctgaacatcctgctggagcacggggccaacgtgaactgcagcgcccaggacggcaccaggcctgtgcatgatgctgtggtgaatgacaacctggagaccatctggctgctgctgtcctatggagctgaccccaccctggccacctacagcggccagacagccatgaagctggccagcagtgacaccatgaagcgcttcctgagtgaccacctgagtgacctgcagggccgggcagagggggaccccggggtgtcctgggacttctacagcagctctgtgctggaggagaaggatggctttgcctgtgacctgctgcacaaccccccaggcagcagtgaccaggagggagatgaccccatggaggaggatgacttcatgtttgagctgagtgacaagcccctgctgccctgctacaacctgcaggtgtctgtgtcccggggcccctgcaactggttcctgttcagtgatgtgctgaagaggctgaagctgagcagccgcatcttccaggcccgcttcccccactttgagatcaccaccatgcccaaggccgagttctaccggcaggtggccagcagccagctgctgaccccagctgagaggcctgggggcctggatgacaggagccccccaggcagcagcgagaccgtggagctggtgcgctatgagccagacctgctgcggctgctgggcagcgaggtggagttccagagctgcaacagctag

SEQ ID NO: 145093 - DNA, 2226 bp, synthetic construct
  misc_feature 1..2226: note = Description of Artificial Sequence: Synthetic coding sequence
  source 1..2226: mol_type = other DNA
tgacccctgctgcctgcccccagcggcagcagcgccccaccccacccagccaagatgcccagcggcacagagcagcagacagagggcacctctgtgaccttcagccccctgaagagccccccccagctggagcgggagatggccagccccccagagtgcagcgagatgcccctggacctgagcagcaagagcaaccggcagaagctgcccctgcccaaccagaggaagaccccacccatgcctgtgctgacccctgtgcacaccagcagcaaggccctgctgagcacagtgctgagccgcagccagaggaccacccaggccgccggcggcaatgtgaccagctgcctgggcagcaccagcagcccctttgtgatcttccctgagatcgtgagaaatggagaccccagcacctgggtgaagaacagcacagccctgatcagcaccatccctggcacctacgtgggcgtggccaaccctgtgcctgccagcctgctgctgaacaaggaccccaacctgggcctgaacagagaccccaggcacctgcccaagcaggagcccatcagcatcatcgaccagggcgagcccaagggcaccggggccacctgtgggaagaagggcagccaggccggggctgagggccagcccagcacagtgaagcgctacaccccagcccgcatcgcccctggcctgcccggctgccagaccaaggagctgagcctgtggaagcccaccggccctgccaacatctacccccgctgcagcgtgaatggcaagcccaccagcacccaggtgctgcctgtgggctggagcccctaccaccaggccagcctgctgagcatcggcatcagcagcgctggccagctgacccccagccagggcgcccccatccggcccacctctgtggtgtctgagttcagcggcgtgcccagcctgagcagcagcgaggccgtgcacggcctgcctgagggccagcccaggcctgggggcagctttgtgcctgagcaggaccctgtgaccaagaacaagacctgcagaattgctgccaagccctatgaggagcaggtgaaccctgtgctgctgaccctgagcccccagacaggcaccctggccctgtctgtgcagcccagcggcggggacatccgcatgaaccagggccctgaggagagcgagagccacctgtgcagcgacagcacccccaagatggagggcccccagggcgcctgtggcctgaagctggccggggacaccaagcccaagaaccaggtgctggccacctacatgagccatgagctggtgctggccaccccccagaacctgcccaagatgcctgagctgcccctgctgccccatgacagccaccccaaggagctgatcctggatgtggtgcccagcagccggcggggcagcagcacagagcggccccagctgggcagccaggtggacctgggccgggtgaagatggagaaggtggatggagatgtggtgttcaacctggccacctgcttccgggcagatggcctgcctgtggccccccagaggggccaggccgaggtgcgggccaaggccggccaggcccgggtgaagcaggagagcgtgggcgtgtttgcctgcaagaacaagtggcagccagatgatgtgacagagagcctgccccccaagaagatgaagtgtgggaaggagaaggacagcgaggagcagcagctgcagccccaggccaaggctgtggtgcgcagcagccaccggcccaagtgcaggaagctgcccagcgacccccaggagagcaccaagaagagccccaggggggccagtgacagcggcaaggagcacaacggggtgcggggcaagcacaagcacaggaagcccaccaagccagagagccagagccctgggaagagagctgacagccatgaggagggcagcctggagaagaaggccaagagcagcttccgggacttcatccctgtggtgctgagcaccaggaccaggagccagagcgacctgaaggccaggaagcagaagaccagcagcagccagagcctggagcaccggctgaggaacagaaacctgctgctgcccaacaaggtgcagggcatcagtgacagccccaacggcttcctgcccaacaacctggaggagcccgcctgcctggagaacagcgagaagcccagcggcaagaggaagtgcaagaccaagcacatggccaccgtgtctgaggaggccaagtag

SEQ ID NO: 145094 - DNA, 4158 bp, synthetic construct
  misc_feature 1..4158: note = Description of Artificial Sequence: Synthetic coding sequence
  source 1..4158: mol_type = other DNA
accccagctgccatccccaccagcgcccccatcccagccagcttcagcctgagccgggtgtgcttccctgctgcccaggccccagccatgcagaaggtgcccctgtccttccagcccggcaccgtgctgacccccagccagcccctggtgtacatccccccacccagctgtggccagcccctgtctgtggccaccctgcccaccaccctgggcgtgagcagcaccctgaccctgcctgtgctgcccagctacctgcaggaccgctgcctgcccggggtgctggccagccctgagctgcggagctacccctatgccttctctgtggcccggcccctgaccagtgacagcaagctggtgtccctggaggtgaaccggctgccctgcaccagccccagcggcagcaccaccacccagcctgccccagatggagtgcccggccccctggccgacaccagcctggtgacagccagcgccaaggtgctgcccaccccccagcccctgctgcctgcccccagcggcagcagcgccccaccccacccagccaagatgcccagcggcacagagcagcagacagagggcacctctgtgaccttcagccccctgaagagccccccccagctggagcgggagatggccagccccccagagtgcagcgagatgcccctggacctgagcagcaagagcaaccggcagaagctgcccctgcccaaccagaggaagaccccacccatgcctgtgctgacccctgtgcacaccagcagcaaggccctgctgagcacagtgctgagccgcagccagaggaccacccaggccgccggcggcaatgtgaccagctgcctgggcagcaccagcagcccctttgtgatcttccctgagatcgtgagaaatggagaccccagcacctgggtgaagaacagcacagccctgatcagcaccatccctggcacctacgtgggcgtggccaaccctgtgcctgccagcctgctgctgaacaaggaccccaacctgggcctgaacagagaccccaggcacctgcccaagcaggagcccatcagcatcatcgaccagggcgagcccaagggcaccggggccacctgtgggaagaagggcagccaggccggggctgagggccagcccagcacagtgaagcgctacaccccagcccgcatcgcccctggcctgcccggctgccagaccaaggagctgagcctgtggaagcccaccggccctgccaacatctacccccgctgcagcgtgaatggcaagcccaccagcacccaggtgctgcctgtgggctggagcccctaccaccaggccagcctgctgagcatcggcatcagcagcgctggccagctgacccccagccagggcgcccccatccggcccacctctgtggtgtctgagttcagcggcgtgcccagcctgagcagcagcgaggccgtgcacggcctgcctgagggccagcccaggcctgggggcagctttgtgcctgagcaggaccctgtgaccaagaacaagacctgcagaattgctgccaagccctatgaggagcaggtgaaccctgtgctgctgaccctgagcccccagacaggcaccctggccctgtctgtgcagcccagcggcggggacatccgcatgaaccagggccctgaggagagcgagagccacctgtgcagcgacagcacccccaagatggagggcccccagggcgcctgtggcctgaagctggccggggacaccaagcccaagaaccaggtgctggccacctacatgagccatgagctggtgctggccaccccccagaacctgcccaagatgcctgagctgcccctgctgccccatgacagccaccccaaggagctgatcctggatgtggtgcccagcagccggcggggcagcagcacagagcggccccagctgggcagccaggtggacctgggccgggtgaagatggagaaggtggatggagatgtggtgttcaacctggccacctgcttccgggcagatggcctgcctgtggccccccagaggggccaggccgaggtgcgggccaaggccggccaggcccgggtgaagcaggagagcgtgggcgtgtttgcctgcaagaacaagtggcagccagatgatgtgacagagagcctgccccccaagaagatgaagtgtgggaaggagaaggacagcgaggagcagcagctgcagccccaggccaaggctgtggtgcgcagcagccaccggcccaagtgcaggaagctgcccagcgacccccaggagagcaccaagaagagccccaggggggccagtgacagcggcaaggagcacaacggggtgcggggcaagcacaagcacaggaagcccaccaagccagagagccagagccctgggaagagagctgacagccatgaggagggcagcctggagaagaaggccaagagcagcttccgggacttcatccctgtggtgctgagcaccaggaccaggagccagagcggcagcatctgcagcagctttgctggcatggctgacagcgacatgggcagccaggaggtgttccccacagaggaggaggaggaggtgacccccaccccagccaagaggaggaaggtgaggaagacccagagggacacccagtaccgcagccaccacgcccaggacaagagcctgctgagccagggccgccgccacctgtggagggcccgggagatgccctggaggacagaagctgcccggcagatgtgggacaccaatgaggaggaggaggaggaggaggaggagggcctgctgaagaggaagaagagaagacggcagaagagcaggaagtaccagacaggagagtacctgacagagcaggaggatgagcagaggaggaagggccgggctgacctgaaggccaggaagcagaagaccagcagcagccagagcctggagcaccggctgaggaacagaaacctgctgctgcccaacaaggtgcagggcatcagtgacagccccaacggcttcctgcccaacaacctggaggagcccgcctgcctggagaacagcgagaagcccagcggcaagaggaagtgcaagaccaagcacatggccaccgtgtctgaggaggccaagggcaagggccgctggagccagcagaagaccaggagccccaagagccccacccctgtgaagcccacagagccctgcacccccagcaagagccgcagcgccagcagcgaggaggccagcgagagccccacagcccggcagatccccccagaggcccggcggctcatcgtgaacaagaatgctggggagaccctgctgcagagagctgcccggctgggctacaaggatgtggtgctgtactgcctgcagaaggacagtgaagatgtgaaccaccgggacaatgccggctacacagccctgcacgaggcctgcagccggggctggacagacatcctgaacatcctgctggagcacggggccaacgtgaactgcagcgcccaggacggcaccaggcctgtgcatgatgctgtggtgaatgacaacctggagaccatctggctgctgctgtcctatggagctgaccccaccctggccacctacagcggccagacagccatgaagctggccagcagtgacaccatgaagcgcttcctgagtgaccacctgagtgacctgcagggccgggcagagggggaccccggggtgtcctgggacttctacagcagctctgtgctggaggagaaggatggctttgcctgtgacctgctgcacaaccccccaggcagcagtgaccaggagggagatgaccccatggaggaggatgacttcatgtttgagctgagtgacaagcccctgctgccctgctacaacctgcaggtgtctgtgtcccggggcccctgcaactggttcctgttcagtgatgtgctgaagaggctgaagctgagcagccgcatcttccaggcccgcttcccccactttgagatcaccaccatgcccaaggccgagttctaccggcaggtggccagcagccagctgctgaccccagctgagaggcctgggggcctggatgacaggagccccccaggcagcagcgagaccgtggagctggtgcgctatgagccagacctgctgcggctgctgggcagcgaggtggagttccagagctgcaacagctag

SEQ ID NO: 145095 - DNA, 5136 bp, synthetic construct
  misc_feature 1..5136: note = Description of Artificial Sequence: Synthetic coding sequence
  source 1..5136: mol_type = other DNA
atgatcagcacagcccccctgtacagcggcgtgcacaactggaccagcagtgaccgcatccgcatgtgtggcatcaatgaggagcggcgggcccccctgagtgatgaggagagcaccaccggggactgccagcacttcggcagccaggagttctgtgtgagcagcagcttcagcaaggtggagctgacagctgtgggcagcggcagcaatgcccggggagctgaccctgatggcagcgccacagagaagctgggccacaagtctgaggacaagccagatgacccccagcccaagatggactatgctggaaatgtggccgaggccgagggcttcctggtgcccctgagcagccctggagatggcctgaagctgcctgccagtgacagcgctgaggccagcaacagcagagctgactgctcctggacccccctgaacacccagatgagcaagcaggtggactgcagccctgctggggtgaaggccctggacagccggcagggcgtgggggagaagaacaccttcatcctggccaccctgggcactggagtgcctgtggagggcaccctgcccctggtgaccaccaacttcagccccctgcctgcccccatctgccccccagcccctggcagcgcctctgtgccccacagcgtgcctgatgccttccaggtgcccctgtctgtgcctgcccctgtgccccacagcggcctggtgcctgtgcaggtggccacctctgtgcctgcccccagcccccccctggcccctgtgcctgccctggccccagccccacccagcgtgcccaccctcatcagtgacagcaaccccctgtctgtgtctgcctctgtgctggtgcctgtgcctgccagcgccccacccagcggccctgtgcccctgagcgccccagccccagcccccctgtctgtgcctgtgtctgccccacccctggccctgatccaggcccctgtgccccccagcgcccccaccctggtgctggcccctgtgcccacccctgtgctggcccccatgcctgccagcaccccacctgctgccccagccccacccagcgtgcccatgcccacccccacccccagcagcggcccccccagcacccccaccctcatcccagcctttgcccccacccctgtgcctgcccccaccccagcccccatcttcaccccagcccccacccccatgcctgctgccaccccagctgccatccccaccagcgcccccatcccagccagcttcagcctgagccgggtgtgcttccctgctgcccaggccccagccatgcagaaggtgcccctgtccttccagcccggcaccgtgctgacccccagccagcccctggtgtacatccccccacccagctgtggccagcccctgtctgtggccaccctgcccaccaccctgggcgtgagcagcaccctgaccctgcctgtgctgcccagctacctgcaggaccgctgcctgcccggggtgctggccagccctgagctgcggagctacccctatgccttctctgtggcccggcccctgaccagtgacagcaagctggtgtccctggaggtgaaccggctgccctgcaccagccccagcggcagcaccaccacccagcctgccccagatggagtgcccggccccctggccgacaccagcctggtgacagccagcgccaaggtgctgcccaccccccagcccctgctgcctgcccccagcggcagcagcgccccaccccacccagccaagatgcccagcggcacagagcagcagacagagggcacctctgtgaccttcagccccctgaagagccccccccagctggagcgggagatggccagccccccagagtgcagcgagatgcccctggacctgagcagcaagagcaaccggcagaagctgcccctgcccaaccagaggaagaccccacccatgcctgtgctgacccctgtgcacaccagcagcaaggccctgctgagcacagtgctgagccgcagccagaggaccacccaggccgccggcggcaatgtgaccagctgcctgggcagcaccagcagcccctttgtgatcttccctgagatcgtgagaaatggagaccccagcacctgggtgaagaacagcacagccctgatcagcaccatccctggcacctacgtgggcgtggccaaccctgtgcctgccagcctgctgctgaacaaggaccccaacctgggcctgaacagagaccccaggcacctgcccaagcaggagcccatcagcatcatcgaccagggcgagcccaagggcaccggggccacctgtgggaagaagggcagccaggccggggctgagggccagcccagcacagtgaagcgctacaccccagcccgcatcgcccctggcctgcccggctgccagaccaaggagctgagcctgtggaagcccaccggccctgccaacatctacccccgctgcagcgtgaatggcaagcccaccagcacccaggtgctgcctgtgggctggagcccctaccaccaggccagcctgctgagcatcggcatcagcagcgctggccagctgacccccagccagggcgcccccatccggcccacctctgtggtgtctgagttcagcggcgtgcccagcctgagcagcagcgaggccgtgcacggcctgcctgagggccagcccaggcctgggggcagctttgtgcctgagcaggaccctgtgaccaagaacaagacctgcagaattgctgccaagccctatgaggagcaggtgaaccctgtgctgctgaccctgagcccccagacaggcaccctggccctgtctgtgcagcccagcggcggggacatccgcatgaaccagggccctgaggagagcgagagccacctgtgcagcgacagcacccccaagatggagggcccccagggcgcctgtggcctgaagctggccggggacaccaagcccaagaaccaggtgctggccacctacatgagccatgagctggtgctggccaccccccagaacctgcccaagatgcctgagctgcccctgctgccccatgacagccaccccaaggagctgatcctggatgtggtgcccagcagccggcggggcagcagcacagagcggccccagctgggcagccaggtggacctgggccgggtgaagatggagaaggtggatggagatgtggtgttcaacctggccacctgcttccgggcagatggcctgcctgtggccccccagaggggccaggccgaggtgcgggccaaggccggccaggcccgggtgaagcaggagagcgtgggcgtgtttgcctgcaagaacaagtggcagccagatgatgtgacagagagcctgccccccaagaagatgaagtgtgggaaggagaaggacagcgaggagcagcagctgcagccccaggccaaggctgtggtgcgcagcagccaccggcccaagtgcaggaagctgcccagcgacccccaggagagcaccaagaagagccccaggggggccagtgacagcggcaaggagcacaacggggtgcggggcaagcacaagcacaggaagcccaccaagccagagagccagagccctgggaagagagctgacagccatgaggagggcagcctggagaagaaggccaagagcagcttccgggacttcatccctgtggtgctgagcaccaggaccaggagccagagcggcagcatctgcagcagctttgctggcatggctgacagcgacatgggcagccaggaggtgttccccacagaggaggaggaggaggtgacccccaccccagccaagaggaggaaggtgaggaagacccagagggacacccagtaccgcagccaccacgcccaggacaagagcctgctgagccagggccgccgccacctgtggagggcccgggagatgccctggaggacagaagctgcccggcagatgtgggacaccaatgaggaggaggaggaggaggaggaggagggcctgctgaagaggaagaagagaagacggcagaagagcaggaagtaccagacaggagagtacctgacagagcaggaggatgagcagaggaggaagggccgggctgacctgaaggccaggaagcagaagaccagcagcagccagagcctggagcaccggctgaggaacagaaacctgctgctgcccaacaaggtgcagggcatcagtgacagccccaacggcttcctgcccaacaacctggaggagcccgcctgcctggagaacagcgagaagcccagcggcaagaggaagtgcaagaccaagcacatggccaccgtgtctgaggaggccaaggatgtggtgctgtactgcctgcagaaggacagtgaagatgtgaaccaccgggacaatgccggctacacagccctgcacgaggcctgcagccggggctggacagacatcctgaacatcctgctggagcacggggccaacgtgaactgcagcgcccaggacggcaccaggcctgtgcatgatgctgtggtgaatgacaacctggagaccatctggctgctgctgtcctatggagctgaccccaccctggccacctacagcggccagacagccatgaagctggccagcagtgacaccatgaagcgcttcctgagtgaccacctgagtgacctgcagggccgggcagagggggaccccggggtgtcctgggacttctacagcagctctgtgctggaggagaaggatggctttgcctgtgacctgctgcacaaccccccaggcagcagtgaccaggagggagatgaccccatggaggaggatgacttcatgtttgagctgagtgacaagcccctgctgccctgctacaacctgcaggtgtctgtgtcccggggcccctgcaactggttcctgttcagtgatgtgctgaagaggctgaagctgagcagccgcatcttccaggcccgcttcccccactttgagatcaccaccatgcccaaggccgagttctaccggcaggtggccagcagccagctgctgaccccagctgagaggcctgggggcctggatgacaggagccccccaggcagcagcgagaccgtggagctggtgcgctatgagccagacctgctgcggctgctgggcagcgaggtggagttccagagctgcaacagctag

SEQ ID NO: 145096 - DNA, 1260 bp, synthetic construct
  misc_feature 1..1260: note = Description of Artificial Sequence: Synthetic coding sequence
  source 1..1260: mol_type = other DNA
atgcccctgagtgacttcatcctggccctgaaggacaacccctactttggagctggcttcggcctggtgggcgtgggcacagccctggccctggccaggaagggcgtgcagctgggcctggtggccttccgccgccactacatgatcaccctggaggtgcctgcccgggacaggagctatgcctggctgctgtcctggctgaccaggcacagcaccaggacccagcacctgtctgtggagaccagctacctgcagcacgagagcggccgcatcagcaccaagtttgaatttgtgcccagccctggcaaccacttcatctggtaccggggcaagtggatccgggtggagaggagccgggagatgcagatgattgacctgcagacaggcaccccctgggagagcgtgaccttcaccgccctgggcacagacaggaaggtgttcttcaacatcctggaggaggcccgggagctggccctgcagcaggaggagggcaagacagtgatgtacacagctgtgggcagcgagtggaggcccttcggctaccccaggagaagaagacccctgaacagcgtggtgctgcagcagggcctggccgacagaattgtgagagatgtgcaggagttcatcgacaaccccaagtggtacacagaccggggcatcccctacagaagaggctacctgctgtatggccccccaggctgtgggaagagcagcttcatcacagccctggccggggagctggagcacagcatctgcctgctgagcctgacagacagcagcctgagtgatgaccggctgaaccacctgctgtctgtggccccccagcagagcctggtgctgctggaggatgtggatgctgccttcctgagccgggacctggccgtggagaaccctgtgaagtaccagggcctgggccgcctgaccttcagcggcctgctgaatgccctggatggagtggccagcacagaggcccgcatcgtgttcatgaccaccaaccacgtggaccggctggaccctgccctgatccggcccggccgggtggacctgaaggagtatgtgggctactgcagccactggcagctgacccagatgttccagcgcttctacccaggccaggcccccagcctggccgagaactttgctgagcacgtgctgcgggccaccaaccagatcagccctgcccaggtgcagggctacttcatgctgtacaagaatgaccctgtgggcgccatccacaatgctgagagcctgcggaggtag

SEQ ID NO: 145097 - DNA, 1260 bp, synthetic construct; identical to SEQ ID NO: 145096
  misc_feature 1..1260: note = Description of Artificial Sequence: Synthetic coding sequence
  source 1..1260: mol_type = other DNA

SEQ ID NO: 145098 - DNA, 1260 bp, synthetic construct; identical to SEQ ID NO: 145096
  misc_feature 1..1260: note = Description of Artificial Sequence: Synthetic coding sequence
  source 1..1260: mol_type = other DNA

SEQ ID NO: 145099 - DNA, 1260 bp, synthetic construct; identical to SEQ ID NO: 145096
  misc_feature 1..1260: note = Description of Artificial Sequence: Synthetic coding sequence
  source 1..1260: mol_type = other DNA

SEQ ID NO: 145100 - DNA, 1260 bp, synthetic construct; identical to SEQ ID NO: 145096
  misc_feature 1..1260: note = Description of Artificial Sequence: Synthetic coding sequence
  source 1..1260: mol_type = other DNA

SEQ ID NO: 145101 - DNA, 333 bp, synthetic construct
  misc_feature 1..333: note = Description of Artificial Sequence: Synthetic coding sequence
  source 1..333: mol_type = other DNA
atgcccctgagtgacttcatcctggccctgaaggacaacccctactttggagctggcttcggcctggtgggcgtgggcacagccctggccctggccaggaagggcgtgcagctgggcctggtggccttccgccgccactacatgatcaccctggaggtgcctgcccgggacaggagctatgcctggctgctgtcctggctgaccaggcacagcaccaggacccagcacctgtctgtggagaccagctacctgcagcacgagagcggccgcatcagcaccaagtttgaatttgtgcccagccctggcaaccacttcatctggtaccggggctag

SEQ ID NO: 145102 - DNA, 234 bp, synthetic construct
  misc_feature 1..234: note = Description of Artificial Sequence: Synthetic coding sequence
  source 1..234: mol_type = other DNA
atgcccctgagtgacttcatcctggccctgaaggacaacccctactttggagctggcttcggcctggtgggcgtgggcacagccctggccctggccaggaagggcgtgcagctgggcctggtggccttccgccgccactacatgatcaccctggaggtgcctgcccgggacaggagctatgcctggctgctgtcctggctgaccaggcacagcaccaggacccagcacctgtag

SEQ ID NO: 145103 - DNA, 621 bp, synthetic construct
  misc_feature 1..621: note = Description of Artificial Sequence: Synthetic coding sequence
  source 1..621: mol_type = other DNA
atgcccctgagtgacttcatcctggccctgaaggacaacccctactttggagctggcttcggcctggtgggcgtgggcacagccctggccctggccaggaagggcgtgcagctgggcctggtggccttccgccgccactacatgatcaccctggaggtgcctgcccgggacaggagctatgcctggctgctgtcctggctgaccaggcacagcaccaggacccagcacctgtctgtggagaccagctacctgcagcacgagagcggccgcatcagcaccaagtttgaatttgtgcccagccctggcaaccacttcatctggtaccggggcaagtggatccgggtggagaggagccgggagatgcagatgattgacctgcagacaggcaccccctgggagagcgtgaccttcaccgccctgggcacagacaggaaggtgttcttcaacatcctggaggaggcccgggagctggccctgcagcaggaggagggcaagacagtgatgtacacagctgtgggcagcgagtggaggcccttcggctaccccaggagaagaagacccctgaacagcgtggtgctgcagcagggcctggccgacagaattgtgagagatgtgcagtag

SEQ ID NO: 145104 - DNA, 1260 bp, synthetic construct; identical to SEQ ID NO: 145096
  misc_feature 1..1260: note = Description of Artificial Sequence: Synthetic coding sequence
  source 1..1260: mol_type = other DNA

SEQ ID NO: 145105 - DNA, 1260 bp, synthetic construct; identical to SEQ ID NO: 145096
  misc_feature 1..1260: note = Description of Artificial Sequence: Synthetic coding sequence
  source 1..1260: mol_type = other DNA

SEQ ID NO: 145106 - DNA, 621 bp, synthetic construct; identical to SEQ ID NO: 145103
  misc_feature 1..621: note = Description of Artificial Sequence: Synthetic coding sequence
  source 1..621: mol_type = other DNA

SEQ ID NO: 145107 - DNA, 1623 bp, synthetic construct
  misc_feature 1..1623: note = Description of Artificial Sequence: Synthetic coding sequence
  source 1..1623: mol_type = other DNA
atgtatgaaaatgaatgtgagtgccagctgctgctgaaggagatgctggagcggctgaacaaggaggctgatgaggccctgctgcacaacctgcggctgcagctggaggcccagttcctgcaggatgacatctctgctgccaaggacagacacaagaagaacctgctggaggtgcagacctacatcagcatcctgcagcagatcatccacaccaccccaccagccagcatcgtgaccagcggcatgagggaggagaagctgctgacagagcgggaggtggccgccctgcggagccagctggaggagggccgggaggtgctgagccacctgcaggcccagagggtggagctgcaggcccagaccaccaccctggagcaggccatcaagagcgcccatgaatgttatgatgatgagatccagctgtacaatgagcagatcgagaccctgaggaaggagattgaggagacagagcgggtgctggagaagagcagctatgactgccggcagctggccgtggcccagcagaccctgaagaatgagctggaccgctaccaccgcatcatcgagattgagggcaaccggctgaccagcgccttcatcgagacccccatccccctcttcacccagagccatggagtgtccctgagcactggaagtggcggcaaggacctgacccgggccctgcaggacatcacagctgccaagccccggcagaaggccctgcccaagaatgtgcccaggaggaaggagatcatcaccaaggacaagaccaacggggccctggaggatgcccccctgaagggcctggaggacaccaagctggtgcaggtggtgctgaaggaggagagcgagagcaagtttgaaagtgagagcaaggaggtgagccccctgacccaggagggcgccccagaagatgtgcctgatggcggccagatcagcaagggctttgggaagctgtacaggaaggtgaaggagaaggtgcgcagccccaaggagcctgagacccccacagagctgtacaccaaggagagacatgtgctggtgactggagatgccaactacgtggacccccgcttctacgtgagcagcatcacagccaagggcggcgtggccgtgtctgtggccgaggacagcgtgctgtatgatggccaggtggagcccagccctgagagccccaagccacccctggagaatggccaggtgggcctgcaggagaaggaggatggccagcccatcgaccagcagcccatcgacaaggagattgaaccagatggagctgagctggagggccctgaggagaagcgggagggggaggagagagatgaggagagcagaagaccctgtgccatggtgaccccaggagctgaggagcccagcatccctgagccccccaagccagctgctgaccaggatggagctgaggtgctgggcaccaggagccgcagcctgcctgagaagggcccccccaaggccctggcctacaagacagtggaggtggtggagagcattgagaagatcagcacagagagcatccagacctatgaggagacagctgtgattgtggagaccatgattggcaagaccaagagtgacaagaagaagtctggagagaagagcagctag

SEQ ID NO: 145108 - DNA, 1998 bp, synthetic construct
  misc_feature 1..1998: note = Description of Artificial Sequence: Synthetic coding sequence
  source 1..1998: mol_type = other DNA
atgtacagaagaagctatgtgttccagaccaggaaggagcagtatgaacatgctgatgaggccagcagagctgctgagcctgagaggcctgcagatgagggctgggccggggccaccagcctggccgccctgcagggcctgggggagcgggtggccgcccacgtgcagagggcccgggccctggagcagagacatgctggcctgcggcggcagctggatgccttccagaggctgggggagctggccggcccagaagatgccctggcccggcaggtggagagcaaccggcagagggtgcgggacctggaggccgagcgggcccggctggagcggcagggcacagaggcccagagggccctggatgagttccgcagcaaatatgaaaatgaatgtgagtgccagctgctgctgaaggagatgctggagcggctgaacaaggaggctgatgaggccctgctgcacaacctgcggctgcagctggaggcccagttcctgcaggatgacatctctgctgccaaggacagacacaagaagaacctgctggaggtgcagacctacatcagcatcctgcagcagatcatccacaccaccccaccagccagcatcgtgaccagcggcatgagggaggagaagctgctgacagagcgggaggtggccgccctgcggagccagctggaggagggccgggaggtgctgagccacctgcaggcccagagggtggagctgcaggcccagaccaccaccctggagcaggccatcaagagcgcccacgagtgctatgatgatgagatccagctgtacaatgagcagatcgagaccctgaggaaggagattgaggagacagagcgggtgctggagaagagcagctatgactgccggcagctggccgtggcccagcagaccctgaagaatgagctggaccgctaccaccgcatcattgaaattgagggcaaccggctgaccagcgccttcatcgagacccccatccccctcttcacccagagccacggcgtgtccctgagcacaggcagcggcggcaaggacctgacccgggccctgcaggacatcacagctgccaagccccggcagaaggccctgcccaagaatgtgcccaggaggaaggagatcatcaccaaggacaagaccaatggagccctggaggatgcccccctgaagggcctggaggacaccaagctggtgcaggtggtgctgaaggaggagagcgagagcaagtttgagagcgagagcaaggaggtgagccccctgacccaggagggcgccccagaagatgtgcctgatggcggccagatcagcaaaggatttgggaagctgtacaggaaggtgaaggagaaggtgcgcagccccaaggagcctgagacccccacagagctgtacaccaaggagcggcacgtgctggtgactggagatgccaactacgtggacccccgcttctacgtgagcagcatcacagccaagggcggcgtggccgtgtctgtggctgaagattctgtgctgtatgatggccaggtggagcccagccctgagagccccaagccacccctggagaatggccaggtgggcctgcaggagaaggaggatggccagcccatcgaccagcagcccatcgacaaggagattgaaccagatggagctgagctggagggccctgaggagaagcgggagggggaggagagagatgaggagagccggcggccctgtgccatggtgaccccaggagctgaggagcccagcatccctgagccccccaagccagctgctgaccaggatggagctgaggtgctgggcaccaggagccgcagcctgcctgagaagggcccccccaaggccctggcctacaagacagtggaggtggtggagagcattgagaagatcagcacagagagcatccagacctatgaggagacagctgtgattgtggagaccatgattggcaagaccaagagtgacaagaagaagagcggggagaagagcagctag

SEQ ID NO: 145109 - DNA, 1581 bp, synthetic construct
  misc_feature 1..1581: note = Description of Artificial Sequence: Synthetic coding sequence
  source 1..1581: mol_type = other DNA
atgctggagcggctgaacaaggaggctgatgaggccctgctgcacaacctgcggctgcagctggaggcccagttcctgcaggatgacatctctgctgccaaggacagacacaagaagaacctgctggaggtgcagacctacatcagcatcctgcagcagatcatccacaccaccccaccagccagcatcgtgaccagcggcatgagggaggagaagctgctgacagagcgggaggtggccgccctgcggagccagctggaggagggccgggaggtgctgagccacctgcaggcccagagggtggagctgcaggcccagaccaccaccctggagcaggccatcaagagcgcccatgaatgttatgatgatgagatccagctgtacaatgagcagatcgagaccctgaggaaggagattgaggagacagagcgggtgctggagaagagcagctatgactgccggcagctggccgtggcccagcagaccctgaagaatgagctggaccgctaccaccgcatcatcgagattgagggcaaccggctgaccagcgccttcatcgagacccccatccccctcttcacccagagccatggagtgtccctgagcactggaagtggcggcaaggacctgacccgggccctgcaggacatcacagctgccaagccccggcagaaggccctgcccaagaatgtgcccaggaggaaggagatcatcaccaaggacaagaccaacggggccctggaggatgcccccctgaagggcctggaggacaccaagctggtgcaggtggtgctgaaggaggagagcgagagcaagtttgaaagtgagagcaaggaggtgagccccctgacccaggagggcgccccagaagatgtgcctgatggcggccagatcagcaagggctttgggaagctgtacaggaaggtgaaggagaaggtgcgcagccccaaggagcctgagacccccacagagctgtacaccaaggagagacatgtgctggtgactggagatgccaactacgtggacccccgcttctacgtgagcagcatcacagccaagggcggcgtggccgtgtctgtggccgaggacagcgtgctgtatgatggccaggtggagcccagccctgagagccccaagccacccctggagaatggccaggtgggcctgcaggagaaggaggatggccagcccatcgaccagcagcccatcgacaaggagattgaaccagatggagctgagctggagggccctgaggagaagcgggagggggaggagagagatgaggagagcagaagaccctgtgccatggtgaccccaggagctgaggagcccagcatccctgagccccccaagccagctgctgaccaggatggagctgaggtgctgggcaccaggagccgcagcctgcctgagaagggcccccccaaggccctggcctacaagacagtggaggtggtggagagcattgagaagatcagcacagagagcatccagacctatgaggagacagctgtgattgtggagaccatgattggcaagaccaagagtgacaagaagaagtctggagagaagagcagctag

SEQ ID NO: 145110 - DNA, 1581 bp, synthetic construct; identical to SEQ ID NO: 145109
  misc_feature 1..1581: note = Description of Artificial Sequence: Synthetic coding sequence
  source 1..1581: mol_type = other DNA

SEQ ID NO: 145111 - DNA, 1248 bp, synthetic construct
  misc_feature 1..1248: note = Description of Artificial Sequence: Synthetic coding sequence
  source 1..1248: mol_type = other DNA
atgtctgagcggcgggtggtggtggacctgcccaccagcgccagcagctccatgcccctgcagaggagaagagccagcttccggggccccaggagcagcagcagcctggagagccccccagccagcaggaccaatgccatgagcggcctggtgcgggcccctggggtgtatgtgggcacagcccccagcggctgcatcggcggcctgggcgcccgggtgacccggcgggccctgggcatcagcagcgtcttcctgcagggcctgcggagcagcggcctggccaccgtgcctgcccctggcctggagcgggaccatggagctgtggaggacctgggcggctgcctggtggagtacatggccaaggtgcacgccctggagcaggtgtcccaggagctggagacccagctgaggatgcacctggagagcaaggccaccaggagcggcaactggggcgccctgcgggcctcctgggccagcagctgccagcaggtgggggaggccgtgctggagaatgcccggctgatgctgcagacagagaccatccaggccggggctgatgacttcaaggagagatatgaaaatgagcagcccttcaggaaggctgctgaggaggagatcaacagcctgtacaaggtgattgatgaggccaacctgaccaagatggacctggagagccagatcgagagcctgaaggaggagctgggcagcctgagcagaaattatgaagaagatgtgaagctgctgcacaagcagctggccggctgtgagctggagcagatggatgcccccatcggcaccggcctggatgacatcctggagaccatccgcatccagtgggagagagatgtggagaagaacagagtggaggccggggccctgctgcaggccaagcagcaggccgaggtggcccacatgagccagacccaggaggagaagctggccgccgccctgcgggtggagctgcacaacaccagctgccaggtgcagagcctgcaggccgagacagagagcctgcgggccctgaagaggggcctggagaacaccctgcatgatgccaagcactggcatgacatggagctgcagaacctgggcgctgtggtgggccgcctggaggccgagctgcgggagatccgggcagaggccgagcagcagcagcaggagcgggcccacctgctggccaggaagtgccagctgcagaaggatgtggccagctaccacgccctgctggaccgggaggagagcggctag

SEQ ID NO: 145112 - DNA, 1353 bp, synthetic construct
  misc_feature 1..1353: note = Description of Artificial Sequence: Synthetic coding sequence
  source 1..1353: mol_type = other DNA
atggagggcagcaagaccagcaacaacagcaccatgcaggtgtcctttgtgtgccagcgctgcagccagcccctgaagctggacaccagcttcaagatcctggacagagtgaccatccaggagctgacagcccccctgctgaccacagcccaggccaagccaggagagacccaggaggaggagaccaacagcggggaggagcccttcatcgagaccccccggcaggatggagtgagccgccgcttcatccccccagccaggatgatgagcacagaaagtgccaacagcttcaccctcatcggggaggccagtgatggcggcaccatggagaacctgagccggcggctgaaggtgactggagacctgtttgacatcatgagcggccagacagatgtggaccaccccctgtgtgaagaatgtacagacaccctgctggaccagctggacacccagctgaatgtgacagaaaatgaatgccagaactacaagcgctgcctggagatcctggagcagatgaatgaagatgattctgagcagctgcagatggagctgaaggagctggccctggaggaggagcggctcatccaggagctggaggatgtggagaagaacaggaagatcgtggccgagaacctggagaaggtgcaggccgaggccgagcggctggaccaggaggaggcccagtaccagcgggagtacagcgagttcaagaggcagcagctggagctggatgatgagctgaagtctgtggagaaccagatgagatatgcccagacccagctggacaagctgaagaagaccaacgtgttcaatgccaccttccacatctggcacagcggccagtttggcaccatcaacaacttccggctgggccgcctgcccagcgtgcctgtggagtggaatgagatcaatgctgcctggggccagacagtgctgctgctgcacgccctggccaacaagatgggcctgaagttccagcgctaccgcctggtgccctacggcaaccacagctacctggagagcctgacagacaagagcaaggagctgcccctgtactgcagcggcggcctgcgcttcttctgggacaacaagtttgaccacgccatggtggccttcctggactgtgtgcagcagttcaaggaggaggtggagaagggggagacccgcttctgcctgccctacaggatggatgtggagaagggcaagattgaggacaccggcggcagcggcggcagctacagcatcaagacccagttcaacagcgaggagcagtggaccaaggccctgaagttcatgctgaccaacctgaagtggggcctggcctgggtgagcagccagttctacaacaagtag

SEQ ID NO: 145113 - DNA, 840 bp, synthetic construct
  misc_feature 1..840: note = Description of Artificial Sequence: Synthetic coding sequence
  source 1..840: mol_type = other DNA
atggagggcagcaagaccagcaacaacagcaccatgcaggtgtcctttgtgtgccagcgctgcagccagcccctgaagctggacaccagcttcaagatcctggacagagtgaccatccaggagctgacagcccccctgctgaccacagcccaggccaagccaggagagacccaggaggaggagaccaacagcggggaggagcccttcatcgagaccccccggcaggatggagtgagccgccgcttcatccccccagcccggcgctgcctggagatcctggagcagatgaatgaagatgattctgagcagctgcagatggagctgaaggagctggccctggaggaggagcggctcatccaggagctggaggatgtggagaagaacaggaagatcgtggccgagaacctggagaaggtgcaggccgaggccgagcggctggaccaggaggaggcccagtaccagcgggagtacagcgagttcaagaggcagcagctggagctggatgatgagctgaagtctgtggagaaccagatgagatatgcccagacccagctggacaagctgaagaagaccaacgtgttcaatgccaccttccacatctggcacagcggccagtttggcaccatcaacaacttccggctgggccgcctgcccagcgtgcctgtggagtggaatgagatcaatgctgcctggggccagacagtgctgctgctgcacgccctggccaacaagatgggcctgaagttccagcgctaccgcctggtgccctacggcaaccacagctacctggagagcctgacagacaagagcaaggatggctgtggggagcggcaggactag

SEQ ID NO: 145114 - DNA, 1092 bp, synthetic construct
  misc_feature 1..1092: note = Description of Artificial Sequence: Synthetic coding sequence
  source 1..1092: mol_type = other DNA
atgatgagcacagagagcgccaacagcttcaccctgattggagaggccagtgatggcggcaccatggagaacctgagccggcggctgaaggtgactggagacctgtttgacatcatgagcggccagacagatgtggaccaccccctgtgtgaggagtgcacagacaccctgctggaccagctggacacccagctgaatgtgacagaaaatgaatgccagaactacaagcgctgcctggagatcctggagcagatgaatgaagatgacagcgagcagctgcagatggagctgaaggagctggccctggaggaggagcggctcatccaggagctggaggatgtggagaagaacaggaagatcgtggccgagaacctggagaaggtgcaggccgaggccgagcggctggaccaggaggaggcccagtaccagcgggagtacagcgagttcaagaggcagcagctggagctggatgatgagctgaagtctgtggagaaccagatgagatatgcccagacccagctggacaagctgaagaagaccaacgtgttcaatgccaccttccacatctggcacagcggccagtttggcaccatcaacaacttccggctgggccgcctgcccagcgtgcctgtggagtggaatgagatcaatgctgcctggggccagacagtgctgctgctgcacgccctggccaacaagatgggcctgaagttccagcgctaccgcctggtgccctacggcaaccacagctacctggagagcctgacagacaagagcaaggagctgcccctgtactgcagcggcggcctgcgcttcttctgggacaacaagtttgaccacgccatggtggccttcctggactgtgtgcagcagttcaaggaggaggtggagaagggggagacccgcttctgcctgccctacaggatggatgtggagaagggcaagattgaagatactggaggcagcggcggcagctacagcatcaagacccagttcaacagcgaggagcagtggaccaaggccctgaagttcatgctgaccaacctgaagtggggcctggcctgggtgagcagccagttctacaacaagtag

SEQ ID NO: 145115 - DNA, 5394 bp, synthetic construct
  misc_feature 1..5394: note = Description of Artificial Sequence: Synthetic coding sequence
  source 1..5394: mol_type = other DNA
atggagcagctgaccaccctgcccaggcctggggaccccggggccatggagccctgggccctgcccacctggcacagctggaccccaggccggggcggggagcccagcagcgctgcccccagcattgctgacaccccacctgctgccctgcagctgcaggagctgcggtctgaggagagcagcaagcccaagggagatggcagcagcaggcctgtgggcggcacagatcctgagggcgctgaggcctgcctgcccagcctgggccagcaggccagcagcagcggccctgcctgccagaggccagaagatgaggaggtggaggccttcctgaaggccaagctgaacatgagctttggagaccggcccaacctggagctgctgcgggccctgggggagctgcggcagagatgtgccatcctgaaggaggagaaccagatgctgaggaagagcagcttccctgagacagaggagaaggtgcggcggctgaagaggaagaatgctgagctggccgtcatcgccaagaggctggaggagcgggccaggaagctgcaggagaccaacctgcgggtggagggcccccagtggctgcacgtgcgggactttgaccggctgctgcgggagagccagcgggaggtgctgcggctgcagaggcagatcgccctgaggaaccagcgggagaccctgcccctgcccccatcctggcccccaggccctgccctgcaggcccgggccggggccccagcccctggggcccctggagaggccaccccccaggaggatgctgacaacctgcctgtgatcctgggggagcctgagaaggagcagagggtgcagcagctggagagcgagctgagcaagaagaggaagaagtgtgagagcctggagcaggaggccaggaagaagcagaggcgctgtgaggagctggagctgcagctgcggcaggcccagaatgaaaatgcccggctggtggaggagaacagccggctgagcggccgggccacagagaaggagcaggtggagtgggagaatgctgagctgcggggccagctgctgggcgtgacccaggagcgggacagcgccctgaggaagagccagggcctgcagagcaagctggagagcctggagcaggtgctgaagcacatgagggaggtggcccagaggcggcagcagctggaggtggagcacgagcaggcccggctgagcctgcgggagaagcaggaggaggtgcggcggctgcagcaggcccaggccgaggcccagcgggagcatgaaggagctgtgcagctgctggagagcaccctggacagcatgcaggcccgggtgcgggagctggaggagcagtgccgcagccagacagagcagttcagcctgctggcccaggagctgcaggccttccggctgcaccctggccccctggacctgctgaccagcgccctggactgtggcagcctgggggactgccccccaccaccctgctgctgcagcatcccccagccctgccggggcagcggccccaaggacctggacctgcccccaggcagccctggccgctgcacccccaagagcagcgagcccgccccagccaccctgactggagtgcccaggagaacagccaagaaggccgagagcctgagcaacagcagccacagcgagagcatccacaacagccccaagagctgccccaccccagaggtggacacagccagcgaggtggaggagctggaggccgacagcgtgtccctgctgcctgctgcccctgagggcagcagaggaggagcccgcatccaggtgttcctggcccgctacagctacaacccctttgagggccccaatgaaaatcctgaggccgagctgcccctgacagctggggagtacatctacatctacggcaacatggatgaagatggcttctttgaaggagagctgatggatggccggcggggcctggtgcccagcaactttgtggagcgggtgtctgatgatgacctgctgaccagcctgcccccagagctggccgacctgagccacagcagcggccctgagctgtccttcctgtctgtgggcggcggcggcagcagcagcggcggccagagctctgtgggccgcagccagcccaggcctgaggaggaggatgctggagatgagctgagcctgagccccagccctgagggcctgggggagcccccagctgtgccctacccccggcggctggtggtgctgaagcagctggcccacagcgtggtgctggcctgggagcccccacctgagcaggtggagctgcacggcttccacatctgtgtgaatggagagctgcggcaggccctgggccctggggccccacccaaggctgtgctggagaacctggacctgtgggccggccccctgcacatctctgtgcaggccctgaccagccggggcagcagtgaccccctgcgctgctgcctggccgtgggcgcccgggccggcgtggtgcccagccagctgcgggtgcaccggctgacagccaccagcgctgagatcacctgggtgcccggcaacagcaacctggcccacgccatctacctgaatggagaagaatgtcctccagccagccccagcacctactgggccaccttctgccacctgcggcccggcaccccctaccaggcccaggtggaggcccagctgcccccccagggcccctgggagcccggctgggagcggctggagcagagagctgccaccctgcagttcaccaccctgcctgctggccccccagatgcccccctggatgtgcagatcgagcccggccccagccctggcatcctgatcatctcctggctgcctgtgaccattgatgctgctggcaccagcaatggagtgcgggtgacaggctacgccatctatgcagatggccagaagatcatggaggtggccagccccacagctggctctgtgctggtggagctgagccagctgcagctgctgcaggtgtgccgggaggtggtggtgaggaccatgagcccccatggagagagcgctgacagcatcccagcccccatcaccccagccctggccccagccagcctgcctgcccgggtgtcctgccccagcccccaccccagccctgaggcccgggcccccctggccagcgccagccctggccctggggaccccagcagccccctgcagcacccagcccccctgggcacccaggagcccccaggggcccccccagccagccccagccgggagatggccaagggcagccatgaagatcctccagccccctgcagccaggaggaggccggggctgctgtgctgggcaccagcgaggagaggacagccagcaccagcaccctgggggagaaggaccccggccctgctgcccccagcctggccaagcaggaggccgagtggacagctggggaggcctgcccagccagcagcagcacccagggcgcccgggcccagcaggcccccaacacagagatgtgccagggcggggaccccggcagcggcctgcggcccagggctgagaaggaggacacagctgagctgggcgtgcacctggtgaacagcctggtggaccatggaagaaacagcgacctgagtgacatccaggaggaggaggaggaggaggaggaggaggaggaggaggagctgggcagcaggacctgcagcttccagaagcaggtggccggcaacagcatcagagaaaatggagccaagagccagcctgaccccttctgtgaaacagacagtgatgaggagatcctggagcagatcctggagctgcccctgcagcagttctgcagcaagaagctgttcagcatccctgaggaggaggaggaggaggaggaggatgaggaggaggagaagagcggggccggctgcagcagccgggaccccggccccccagagcccgccctgctgggcctgggctgtgacagcggccagcccaggaggcctggccagtgccccctgagccctgagagcagcagagctggggactgcctggaggacatgcctggcctggtgggcggcagcagcagaagaagaggaggcggcagccctgagaagccacccagcagaagaagacctccagacccccgggagcactgcagccggctgctgagcaacaacggcccccaggccagcggccgcctgggccccacccgggagcggggcggcctgcctgtgattgagggccccaggacaggcctggaggccagcggccggggccgcctgggccccagccgccgctgcagccggggccgggccctggagcccggcctggccagctgcctgagccccaagtgcctggagatcagcattgaatatgattctgaagatgagcaggaggccggcagcggcggcatcagcatcaccagcagctgctacccaggagatggagaggcctggggcacagccaccgtgggccggccccggggcccccccaaggccaacagcggccccaagccctacccccggctgcctgcctgggagaagggggagcctgagcggcggggccgcagcgccaccggccgggccaaggagcccctgagccgggccacagaaacaggagaggcccggggccaggacggcagcggccggcggggcccccagaagaggggcgtgcgggtgctgcggcccagcacagctgagctggtgcctgcccggagccccagcgagaccctggcctaccagcacctgcctgtgcgcatctttgtggccctgtttgattatgaccctgtgtccatgagccccaacccagatgctggggaggaggagctgcccttccgggagggccagatcctgaaggtgtttggagacaaggatgctgatggcttctaccagggcgagggcggcggccgcacaggctacatcccctgcaacatggtggccgaggtggccgtggacagccctgctggccggcagcagctgctgcagaggggctacctgagcccagacatcctgctggagggcagcggaaatggcccctttgtgtacagcacagcccacaccaccggccccccacccaagcccaggaggagcaagaaggccgagagcgagggccctgcccagccctgccccggcccccccaagctggtgcccagcgctgacctgaaggccccccacagcatggtggccgcctttgactacaacccccaggagagcagccccaacatggatgtggaggccgagctgcccttccgggctggagatgtgatcaccgtgtttggaggcatggatgatgatggcttctactatggagagctgaatggccagaggggcctggtgcccagcaacttcctggagggccctggccctgaggccggcggcctggaccgggagcccaggaccccccaggccgagagccagaggaccaggagaagaagagtgcagtgctag

SEQ ID NO: 145116 - DNA, 5574 bp, synthetic construct
  misc_feature 1..5574: note = Description of Artificial Sequence: Synthetic coding sequence
  source 1..5574: mol_type = other DNA
atggagcagctgaccaccctgcccaggcctggggaccccggggccatggagccctgggccctgcccacctggcacagctggaccccaggccggggcggggagcccagcagcgctgcccccagcattgctgacaccccacctgctgccctgcagctgcaggagctgcggtctgaggagagcagcaagcccaagggagatggcagcagcaggcctgtgggcggcacagatcctgagggcgctgaggcctgcctgcccagcctgggccagcaggccagcagcagcggccctgcctgccagaggccagaagatgaggaggtggaggccttcctgaaggccaagctgaacatgagctttggagaccggcccaacctggagctgctgcgggccctgggggagctgcggcagagatgtgccatcctgaaggaggagaaccagatgctgaggaagagcagcttccctgagacagaggagaaggtgcggcggctgaagaggaagaatgctgagctggccgtcatcgccaagaggctggaggagcgggccaggaagctgcaggagaccaacctgcgggtggtgtctgcccccctgccccggcccggcaccagcctggagctgtgcaggaaggccctggcccggcagagggcccgggacctgtctgaaacagccagcgccctgctggccaaggacaagcagattgctgccctgcagagagaatgtcgggagctgcaggcccggctgaccctggtgggcaaggagggcccccagtggctgcacgtgcgggactttgaccggctgctgcgggagagccagcgggaggtgctgcggctgcagaggcagatcgccctgaggaaccagcgggagaccctgcccctgcccccatcctggcccccaggccctgccctgcaggcccgggccggggccccagcccctggggcccctggagaggccaccccccaggaggatgctgacaacctgcctgtgatcctgggggagcctgagaaggagcagagggtgcagcagctggagagcgagctgagcaagaagaggaagaagtgtgagagcctggagcaggaggccaggaagaagcagaggcgctgtgaggagctggagctgcagctgcggcaggcccagaatgaaaatgcccggctggtggaggagaacagccggctgagcggccgggccacagagaaggagcaggtggagtgggagaatgctgagctgcggggccagctgctgggcgtgacccaggagcgggacagcgccctgaggaagagccagggcctgcagagcaagctggagagcctggagcaggtgctgaagcacatgagggaggtggcccagaggcggcagcagctggaggtggagcacgagcaggcccggctgagcctgcgggagaagcaggaggaggtgcggcggctgcagcaggcccaggccgaggcccagcgggagcatgaaggagctgtgcagctgctggagagcaccctggacagcatgcaggcccgggtgcgggagctggaggagcagtgccgcagccagacagagcagttcagcctgctggcccaggagctgcaggccttccggctgcaccctggccccctggacctgctgaccagcgccctggactgtggcagcctgggggactgccccccaccaccctgctgctgcagcatcccccagccctgccggggcagcggccccaaggacctggacctgcccccaggcagccctggccgctgcacccccaagagcagcgagcccgccccagccaccctgactggagtgcccaggagaacagccaagaaggccgagagcctgagcaacagcagccacagcgagagcatccacaacagccccaagagctgccccaccccagaggtggacacagccagcgaggtggaggagctggaggccgacagcgtgtccctgctgcctgctgcccctgagggcagcagaggaggagcccgcatccaggtgttcctggcccgctacagctacaacccctttgagggccccaatgaaaatcctgaggccgagctgcccctgacagctggggagtacatctacatctacggcaacatggatgaagatggcttctttgaaggagagctgatggatggccggcggggcctggtgcccagcaactttgtggagcgggtgtctgatgatgacctgctgaccagcctgcccccagagctggccgacctgagccacagcagcggccctgagctgtccttcctgtctgtgggcggcggcggcagcagcagcggcggccagagctctgtgggccgcagccagcccaggcctgaggaggaggatgctggagatgagctgagcctgagccccagccctgagggcctgggggagcccccagctgtgccctacccccggcggctggtggtgctgaagcagctggcccacagcgtggtgctggcctgggagcccccacctgagcaggtggagctgcacggcttccacatctgtgtgaatggagagctgcggcaggccctgggccctggggccccacccaaggctgtgctggagaacctggacctgtgggccggccccctgcacatctctgtgcaggccctgaccagccggggcagcagtgaccccctgcgctgctgcctggccgtgggcgcccgggccggcgtggtgcccagccagctgcgggtgcaccggctgacagccaccagcgctgagatcacctgggtgcccggcaacagcaacctggcccacgccatctacctgaatggagaagaatgtcctccagccagccccagcacctactgggccaccttctgccacctgcggcccggcaccccctaccaggcccaggtggaggcccagctgcccccccagggcccctgggagcccggctgggagcggctggagcagagagctgccaccctgcagttcaccaccctgcctgctggccccccagatgcccccctggatgtgcagatcgagcccggccccagccctggcatcctgatcatctcctggctgcctgtgaccattgatgctgctggcaccagcaatggagtgcgggtgacaggctacgccatctatgcagatggccagaagatcatggaggtggccagccccacagctggctctgtgctggtggagctgagccagctgcagctgctgcaggtgtgccgggaggtggtggtgaggaccatgagcccccatggagagagcgctgacagcatcccagcccccatcaccccagccctggccccagccagcctgcctgcccgggtgtcctgccccagcccccaccccagccctgaggcccgggcccccctggccagcgccagccctggccctggggaccccagcagccccctgcagcacccagcccccctgggcacccaggagcccccaggggcccccccagccagccccagccgggagatggccaagggcagccatgaagatcctccagccccctgcagccaggaggaggccggggctgctgtgctgggcaccagcgaggagaggacagccagcaccagcaccctgggggagaaggaccccggccctgctgcccccagcctggccaagcaggaggccgagtggacagctggggaggcctgcccagccagcagcagcacccagggcgcccgggcccagcaggcccccaacacagagatgtgccagggcggggaccccggcagcggcctgcggcccagggctgagaaggaggacacagctgagctgggcgtgcacctggtgaacagcctggtggaccatggaagaaacagcgacctgagtgacatccaggaggaggaggaggaggaggaggaggaggaggaggaggagctgggcagcaggacctgcagcttccagaagcaggtggccggcaacagcatcagagaaaatggagccaagagccagcctgaccccttctgtgaaacagacagtgatgaggagatcctggagcagatcctggagctgcccctgcagcagttctgcagcaagaagctgttcagcatccctgaggaggaggaggaggaggaggaggatgaggaggaggagaagagcggggccggctgcagcagccgggaccccggccccccagagcccgccctgctgggcctgggctgtgacagcggccagcccaggaggcctggccagtgccccctgagccctgagagcagcagagctggggactgcctggaggacatgcctggcctggtgggcggcagcagcagaagaagaggaggcggcagccctgagaagccacccagcagaagaagacctccagacccccgggagcactgcagccggctgctgagcaacaacggcccccaggccagcggccgcctgggccccacccgggagcggggcggcctgcctgtgattgagggccccaggacaggcctggaggccagcggccggggccgcctgggccccagccgccgctgcagccggggccgggccctggagcccggcctggccagctgcctgagccccaagtgcctggagatcagcattgaatatgattctgaagatgagcaggaggccggcagcggcggcatcagcatcaccagcagctgctacccaggagatggagaggcctggggcacagccaccgtgggccggccccggggcccccccaaggccaacagcggccccaagccctacccccggctgcctgcctgggagaagggggagcctgagcggcggggccgcagcgccaccggccgggccaaggagcccctgagccgggccacagaaacaggagaggcccggggccaggacggcagcggccggcggggcccccagaagaggggcgtgcgggtgctgcggcccagcacagctgagctggtgcctgcccggagccccagcgagaccctggcctaccagcacctgcctgtgcgcatctttgtggccctgtttgattatgaccctgtgtccatgagccccaacccagatgctggggaggaggagctgcccttccgggagggccagatcctgaaggtgtttggagacaaggatgctgatggcttctaccagggcgagggcggcggccgcacaggctacatcccctgcaacatggtggccgaggtggccgtggacagccctgctggccggcagcagctgctgcagaggggctacctgagcccagacatcctgctggagggcagcggaaatggcccctttgtgtacagcacagcccacaccaccggccccccacccaagcccaggaggagcaagaaggccgagagcgagggccctgcccagccctgccccggcccccccaagctggtgcccagcgctgacctgaaggccccccacagcatggtggccgcctttgactacaacccccaggagagcagccccaacatggatgtggaggccgagctgcccttccgggctggagatgtgatcaccgtgtttggaggcatggatgatgatggcttctactatggagagctgaatggccagaggggcctggtgcccagcaacttcctggagggccctggccctgaggccggcggcctggaccgggagcccaggaccccccaggccgagagccagaggaccaggagaagaagagtgcagtgctag

SEQ ID NO: 145117 - DNA, 5724 bp, synthetic construct
  misc_feature 1..5724: note = Description of Artificial Sequence: Synthetic coding sequence
  source 1..5724: mol_type = other DNA
atggagcagctgaccaccctgcccaggcctggggaccccggggccatggagccctgggccctgcccacctggcacagctggaccccaggccggggcggggagcccagcagcgctgcccccagcattgctgacaccccacctgctgccctgcagctgcaggagctgcggtctgaggagagcagcaagcccaagggagatggcagcagcaggcctgtgggcggcacagatcctgagggcgctgaggcctgcctgcccagcctgggccagcaggccagcagcagcggccctgcctgccagaggccagaagatgaggaggtggaggccttcctgaaggccaagctgaacatgagctttggagaccggcccaacctggagctgctgcgggccctgggggagctgcggcagagatgtgccatcctgaaggaggagaaccagatgctgaggaagagcagcttccctgagacagaggagaaggtgcggcggctgaagaggaagaatgctgagctggccgtcatcgccaagaggctggaggagcgggccaggaagctgcaggagaccaacctgcgggtggtgtctgcccccctgccccggcccggcaccagcctggagctgtgcaggaaggccctggcccggcagagggcccgggacctgtctgaaacagccagcgccctgctggccaaggacaagcagattgctgccctgcagagagaatgtcgggagctgcaggcccggctgaccctggtgggcaaggagggcccccagtggctgcacgtgcgggactttgaccggctgctgcgggagagccagcgggaggtgctgcggctgcagaggcagatcgccctgaggaaccagcgggagaccctgcccctgcccccatcctggcccccaggccctgccctgcaggcccgggccggggccccagcccctggggcccctggagaggccaccccccaggaggatgctgacaacctgcctgtgatcctgggggagcctgagaaggagcagagggtgcagcagctggagagcgagctgagcaagaagaggaagaagtgtgagagcctggagcaggaggccaggaagaagcagaggcgctgtgaggagctggagctgcagctgcggcaggcccagaatgaaaatgcccggctggtggaggagaacagccggctgagcggccgggccacagagaaggagcaggtggagtgggagaatgctgagctgcggggccagctgctgggcgtgacccaggagcgggacagcgccctgaggaagagccagggcctgcagagcaagctggagagcctggagcaggtgctgaagcacatgagggaggtggcccagaggcggcagcagctggaggtggagcacgagcaggcccggctgagcctgcgggagaagcaggaggaggtgcggcggctgcagcaggcccaggccgaggcccagcgggagcatgaaggagctgtgcagctgctggagagcaccctggacagcatgcaggcccgggtgcgggagctggaggagcagtgccgcagccagacagagcagttcagcctgctggcccaggagctgcaggccttccggctgcaccctggccccctggacctgctgaccagcgccctggactgtggcagcctgggggactgccccccaccaccctgctgctgcagcatcccccagccctgccggggcagcggccccaaggacctggacctgcccccaggcagccctggccgctgcacccccaagagcagcgagcccgccccagccaccctgactggagtgcccaggagaacagccaagaaggccgagagcctgagcaacagcagccacagcgagagcatccacaacagccccaagagctgccccaccccagaggtggacacagccagcgaggtggaggagctggaggccgacagcgtgtccctgctgcctgctgcccctgagggcagcagaggaggagcccgcatccaggtgttcctggcccgctacagctacaacccctttgagggccccaatgaaaatcctgaggccgagctgcccctgacagctggggagtacatctacatctacggcaacatggatgaagatggcttctttgaaggagagctgatggatggccggcggggcctggtgcccagcaactttgtggagcgggtgtctgatgatgacctgctgaccagcctgcccccagagctggccgacctgagccacagcagcggccctgagctgtccttcctgtctgtgggcggcggcggcagcagcagcggcggccagagctctgtgggccgcagccagcccaggcctgaggaggaggatgctggagatgagctgagcctgagccccagccctgagggcctgggggagcccccagctgtgccctacccccggcggctggtggtgctgaagcagctggcccacagcgtggtgctggcctgggagcccccacctgagcaggtggagctgcacggcttccacatctgtgtgaatggagagctgcggcaggccctgggccctggggccccacccaaggctgtgctggagaacctggacctgtgggccggccccctgcacatctctgtgcaggccctgaccagccggggcagcagtgaccccctgcgctgctgcctggccgtgggcgcccgggccggcgtggtgcccagccagctgcgggtgcaccggctgacagccaccagcgctgagatcacctgggtgcccggcaacagcaacctggcccacgccatctacctgaatggagaagaatgtcctccagccagccccagcacctactgggccaccttctgccacctgcggcccggcaccccctaccaggcccaggtggaggcccagctgcccccccagggcccctgggagcccggctgggagcggctggagcagagagctgccaccctgcagttcaccaccctgcctgctggccccccagatgcccccctggatgtgcagatcgagcccggccccagccctggcatcctgatcatctcctggctgcctgtgaccattgatgctgctggcaccagcaatggagtgcgggtgacaggctacgccatctatgcagatggccagaagatcatggaggtggccagccccacagctggctctgtgctggtggagctgagccagctgcagctgctgcaggtgtgccgggaggtggtggtgaggaccatgagcccccatggagagagcgctgacagcatcccagcccccatcaccccagccctggccccagccagcctgcctgcccgggtgtcctgccccagcccccaccccagccctgaggcccgggcccccctggccagcgccagccctggccctggggaccccagcagccccctgcagcacccagcccccctgggcacccaggagcccccaggggcccccccagccagccccagccgggagatggccaagggcagccatgaagatcctccagccccctgcagccaggaggaggccggggctgctgtgctgggcaccagcgaggagaggacagccagcaccagcaccctgggggagaaggaccccggccctgctgcccccagcctggccaagcaggaggccgagtggacagctggggaggcctgcccagccagcagcagcacccagggcgcccgggcccagcaggcccccaacacagagatgtgccagggcggggaccccggcagcggcctgcggcccagggctgagaaggaggacacagctgagctgggcgtgcacctggtgaacagcctggtggaccatggaagaaacagcgacctgagtgacatccaggaggaggaggaggaggaggaggaggaggaggaggaggagctgggcagcaggacctgcagcttccagaagcaggtggccggcaacagcatcagagaaaatggagccaagagccagcctgaccccttctgtgaaacagacagtgatgaggagatcctggagcagatcctggagctgcccctgcagcagttctgcagcaagaagctgttcagcatccctgaggaggaggaggaggaggaggaggatgaggaggaggagaagagcggggccggctgcagcagccgggaccccggccccccagagcccgccctgctgggcctgggctgtgacagcggccagcccaggaggcctggccagtgccccctgagccctgagagcagcagagctggggactgcctggaggacatgcctggcctggtgggcggcagcagcagaagaagaggaggcggcagccctgagaagccacccagcagaagaagacctccagacccccgggagcactgcagccggctgctgagcaacaacggcccccaggccagcggccgcctgggccccacccgggagcggggcggcctgcctgtgattgagggccccaggacaggcctggaggccagcggccggggccgcctgggccccagccgccgctgcagccggggccgggccctggagcccggcctggccagctgcctgagccccaagtgcctggagatcagcattgaatatgattctgaagatgagcaggaggccggcagcggcggcatcagcatcaccagcagctgctacccaggagatggagaggcctggggcacagccaccgtgggccggccccggggcccccccaaggccaacagcggccccaagccctacccccggctgcctgcctgggagaagggggagcctgagcggcggggccgcagcgccaccggccgggccaaggagcccctgagccgggccacagaaacaggagaggcccggggccaggacggcagcggccggcggggcccccagaagaggggcgtgcgggtgctgcggcccagcacagctgagctggtgcctgcccggagccccagcgagaccctggcctaccagcacctgcctgtgcgcatctttgtggccctgtttgattatgaccctgtgtccatgagccccaacccagatgctggggaggaggagctgcccttccgggagggccagatcctgaaggtgtttggagacaaggatgctgatggcttctaccagggcgagggcggcggccgcacaggctacatcccctgcaacatggtggccgaggtggccgtggacagccctgctggccggcagcagctgctgcagaggggctacctgagcccagacatcctgctggagggcagcggaaatggcccctttgtgtacagcacagcccacaccaccggccccccacccaagcccaggaggagcaagaaggccgagagcgagggccctgcccagccctgccccggcccccccaagctggtgcccagcgctgacctgaaggccccccacagcatggtggccgcctttgactacaacccccaggagagcagccccaacatggatgtggaggccgagctgcccttccgggctggagatgtgatcaccgtgtttggaggcatggatgatgatggcttctactatggagagctgaatggccagaggggcctggtgcccagcaacttcctggagggccctggccctgaggccggcggcctggaccgggagcccaggaccccccaggccgagagccaggactggggctgcaccacccagggcagccctggccccccaggcggcccctgcacccccagcagcggcagcgcccccagaattgagcggggggagccccagggccgctctgagaaggtgtggggcttcttcagcaagggcaagcagctgctgcggcggctgggcagcggcaagaaggagtag

SEQ ID NO: 145118 - DNA, 864 bp, synthetic construct
  misc_feature 1..864: note = Description of Artificial Sequence: Synthetic coding sequence
  source 1..864: mol_type = other DNA
atggtgaatgacccccctgtgcctgccctgctgtgggcccaggaggtgggccaggtgctggccggccgggcccggcggctgctgctgcagtttggagtgctcttctgcaccatcctgctgctgctgtgggtgtctgtgttcctgtatggcagcttctactacagctacatgcccaccgtgagccacctgagccctgtgcacttctactacagaacagactgtgacagcagcaccaccagcctgtgcagcttccctgtggccaacgtgtccctgaccaagggcggccgggacagagtgctgatgtatggccagccctacagagtgaccctggagctggagctgcctgagagccctgtgaaccaggacctgggcatgttcctggtgaccatcagctgctacacccggggcggccgcatcatcagcaccagcagccgctctgtgatgctgcactacagaagtgacctgctgcagatgctggacaccctggtgttcagcagcctgctgctgtttggatttgctgagcagaagcagctgctggaggtggagctgtatgctgactacagagaaaattcctatgtgcccaccaccggggccatcatcgagatccacagcaagaggatccagctgtatggagcctacctgcgcatccacgcccacttcaccggcctgcggctgaccagcgagaaggagaccatccctggcaggaagagcaatgaaggcagcctgctgatcagccagggcctgaaggcccggcgcagccagctgaggaaccagatgctgcagaggatggtgcgggccctgaagatcccccagggccagagggtgtcctgccccaggagaagaaaccagatcagcagcccctag

SEQ ID NO: 145119 - DNA, 1389 bp, synthetic construct
  misc_feature 1..1389: note = Description of Artificial Sequence: Synthetic coding sequence
  source 1..1389: mol_type = other DNA
atgagcacagagaaggtggaccagaaggaggaggccggggagaaggaggtgtgtggggaccagatcaagggccctgacaaggaggaggagcccccagctgctgccagccacggccagggctggaggcctgggggccgggccgccagaaatgcccggcctgagcccggggcccggcacccagccctgcctgccatggtgaatgacccccctgtgcctgccctgctgtgggcccaggaggtgggccaggtgctggccggccgggcccggcggctgctgctgcagtttggagtgctcttctgcaccatcctgctgctgctgtgggtgtctgtgttcctgtatggcagcttctactacagctacatgcccaccgtgagccacctgagccctgtgcacttctactacagaacagactgtgacagcagcaccaccagcctgtgcagcttccctgtggccaacgtgtccctgaccaagggcggccgggacagagtgctgatgtatggccagccctacagagtgaccctggagctggagctgcctgagagccctgtgaaccaggacctgggcatgttcctggtgaccatcagctgctacacccggggcggccgcatcatcagcaccagcagccgctctgtgatgctgcactacagaagtgacctgctgcagatgctggacaccctggtgttcagcagcctgctgctgtttggatttgctgagcagaagcagctgctggaggtggagctgtatgctgactacagagaaaattcctatgtgcccaccaccggggccatcatcgagatccacagcaagaggatccagctgtatggagcctacctgcgcatccacgcccacttcaccggcctgcgctacctgctgtacaacttccccatgacctgtgccttcatcggcgtggccagcaacttcaccttcctgtctgtgattgtgctcttctcctacatgcagtgggtgtggggcggcatctggcccaggcaccgcttcagcctgcaggtgaacatcaggaagagggacaacagcaggaaggaggtgcagaggcgcatcagcgcccaccagcccggccctgagggccaggaggagagcaccccccagagtgatgtgacagaagatggagagagccctgaggaccccagcggcacagagggccagctgtctgaggaggagaagccagaccagcagcccctgagcggggaggaggagctggagcctgaggccagtgatggcagcggctcctgggaggatgctgccctgctgacagaggccaacctgcctgccccagccccagccagcgccagcgcccctgtgctggagaccctgggcagcagcgagcctgctggaggagccctgcggcagaggcccacctgcagcagcagctag

SEQ ID NO: 145120 - DNA, 1197 bp, synthetic construct
  misc_feature 1..1197: note = Description of Artificial Sequence: Synthetic coding sequence
  source 1..1197: mol_type = other DNA
atggtgaatgacccccctgtgcctgccctgctgtgggcccaggaggtgggccaggtgctggccggccgggcccggcggctgctgctgcagtttggagtgctcttctgcaccatcctgctgctgctgtgggtgtctgtgttcctgtatggcagcttctactacagctacatgcccaccgtgagccacctgagccctgtgcacttctactacagaacagactgtgacagcagcaccaccagcctgtgcagcttccctgtggccaacgtgtccctgaccaagggcggccgggacagagtgctgatgtatggccagccctacagagtgaccctggagctggagctgcctgagagccctgtgaaccaggacctgggcatgttcctggtgaccatcagctgctacacccggggcggccgcatcatcagcaccagcagccgctctgtgatgctgcactacagaagtgacctgctgcagatgctggacaccctggtgttcagcagcctgctgctgtttggatttgctgagcagaagcagctgctggaggtggagctgtatgctgactacagagaaaattcctatgtgcccaccaccggggccatcatcgagatccacagcaagaggatccagctgtatggagcctacctgcgcatccacgcccacttcaccggcctgcgctacctgctgtacaacttccccatgacctgtgccttcatcggcgtggccagcaacttcaccttcctgtctgtgattgtgctcttctcctacatgcagtgggtgtggggcggcatctggcccaggcaccgcttcagcctgcaggtgaacatcaggaagagggacaacagcaggaaggaggtgcagaggcgcatcagcgcccaccagcccggccctgagggccaggaggagagcaccccccagagtgatgtgacagaagatggagagagccctgaggaccccagcggcacagagggccagctgtctgaggaggagaagccagaccagcagcccctgagcggggaggaggagctggagcctgaggccagtgatggcagcggctcctgggaggatgctgccctgctgacagaggccaacctgcctgccccagccccagccagcgccagcgcccctgtgctggagaccctgggcagcagcgagcctgctggaggagccctgcggcagaggcccacctgcagcagcagctag

SEQ ID NO: 145121 - DNA, 1197 bp, synthetic construct; identical to SEQ ID NO: 145120
  misc_feature 1..1197: note = Description of Artificial Sequence: Synthetic coding sequence
  source 1..1197: mol_type = other DNA

SEQ ID NO: 145122 - DNA, 1197 bp, synthetic construct; identical to SEQ ID NO: 145120
  misc_feature 1..1197: note = Description of Artificial Sequence: Synthetic coding sequence
  source 1..1197: mol_type = other DNA

SEQ ID NO: 145123 - DNA, 1389 bp, synthetic construct; identical to SEQ ID NO: 145119
  misc_feature 1..1389: note = Description of Artificial Sequence: Synthetic coding sequence
  source 1..1389: mol_type = other DNA

SEQ ID NO: 145124 - DNA, 672 bp, synthetic construct
  misc_feature 1..672: note = Description of Artificial Sequence: Synthetic coding sequence
  source 1..672: mol_type = other DNA
atggtgaatgacccccctgtgcctgccctgctgtgggcccaggaggtgggccaggtgctggccggccgggcccggcggctgctgctgcagtttggagtgctcttctgcaccatcctgctgctgctgtgggtgtctgtgttcctgtatggcagcttctactacagctacatgcccaccgtgagccacctgagccctgtgcacttctactacagaacagactgtgacagcagcaccaccagcctgtgcagcttccctgtggccaacgtgtccctgaccaagggcggccgggacagagtgctgatgtatggccagccctacagagtgaccctggagctggagctgcctgagagccctgtgaaccaggacctgggcatgttcctggtgaccatcagctgctacacccggggcggccgcatcatcagcaccagcagccgctctgtgatgctgcactacagaagtgacctgctgcagatgctggacaccctggtgttcagcagcctgctgctgtttggatttgctgagcagaagcagctgctggaggtggagctgtatgctgactacagagaaaattcctatgtgcccaccaccggggccatcatcgagatccacagcaagaggatccagctgtatggagcctacctgcgcatccacgcccacttcaccggcctgtag

SEQ ID NO: 145125 - DNA, 282 bp, synthetic construct
  misc_feature 1..282: note = Description of Artificial Sequence: Synthetic coding sequence
  source 1..282: mol_type = other DNA
atgagcacagagaaggtggaccagaaggaggaggccggggagaaggaggtgtgtggggaccagatcaagggccctgacaaggaggaggagcccccagctgctgccagccacggccagggctggaggcctgggggccgggccgccagaaatgcccggcctgagcccggggcccggcacccagccctgcctgccatggtgaatgacccccctgtgcctgccctgctgtgggcccaggaggtgggccaggtgctggccggccgggcccggcggctgctgctgtag

SEQ ID NO: 145126 - DNA, 681 bp, synthetic construct
  misc_feature 1..681: note = Description of Artificial Sequence: Synthetic coding sequence
  source 1..681: mol_type = other DNA
atgagcacagagaaggtggaccagaaggaggaggccggggagaaggaggtgtgtggggaccagatcaagggccctgacaaggaggaggagcccccagctgctgccagccacggccagggctggaggcctgggggccgggccgccagaaatgcccggcctgagcccggggcccggcacccagccctgcctgccatggtgaatgacccccctgtgcctgccctgctgtgggcccaggaggtgggccaggtgctggccggccgggcccggcggctgctgctgcagtttggagtgctcttctgcaccatcctgctgctgctgtgggtgtctgtgttcctgtatggcagcttctactacagctacatgcccaccgtgagccacctgagccctgtgcacttctactacagaacagactgtgacagcagcaccaccagcctgtgcagcttccctgtggccaacgtgtccctgaccaagggcggccgggacagagtgctgatgtatggccagccctacagagtgaccctggagctggagctgcctgagagccctgtgaaccaggacctgggcatgttcctggtgaccatcagctgctacacccggggcggccgcatcatcagcaccagcagccgctctgtgatgctgcactacagaagtgacctgctgcagatgctggacaccctgtag

SEQ ID NO: 145127 - DNA, 72 bp, synthetic construct
  misc_feature 1..72: note = Description of Artificial Sequence: Synthetic coding sequence
  source 1..72: mol_type = other DNA
atgagcacagagaaggtggaccagaaggaggaggccggggagaaggaggtgtgtggggaccagatcaagtag

SEQ ID NO: 145128 - DNA, 87 bp, synthetic construct
  misc_feature 1..87: note = Description of Artificial Sequence: Synthetic coding sequence
  source 1..87: mol_type = other DNA
atgagcacagagaaggtggaccagaaggaggaggccggggagaaggaggtgtgtggggaccagatcaagggccctgacaaggagtag

SEQ ID NO: 145129 - DNA, 372 bp, synthetic construct
  misc_feature 1..372: note = Description of Artificial Sequence: Synthetic coding sequence
  source 1..372: mol_type = other DNA
atgagcacagagaaggtggaccagaaggaggaggccggggagaaggaggtgtgtggggaccagatcaagggccctgacaaggaggaggagcccccagctgctgccagccacggccagggctggaggcctgggggccgggccgccagaaatgcccggcctgagcccggggcccggcacccagccctgcctgccatggtgaatgacccccctgtgcctgccctgctgtgggcccaggaggtgggccaggtgctggccggccgggcccggcggctgctgctgcagtttggagtgctcttctgcaccatcctgctgctgctgtgggtgtctgtgttcctgtatggcagcttctactacagctacatgcccacctag

SEQ ID NO: 145130 - DNA, 300 bp, synthetic construct
  misc_feature 1..300: note = Description of Artificial Sequence: Synthetic coding sequence
  source 1..300: mol_type = other DNA
atggtgaatgacccccctgtgcctgccctgctgtgggcccaggaggtgggccaggtgctggccggccgggcccggcggctgctgctgcagtttggagtgctcttctgcaccatcctgctgctgctgtgggtgtctgtgttcctgtatggcagcttctactacagctacatgcccaccgtgagccacctgagccctgtgcacttctactacagaacagactgtgacagcagcaccaccagcctgtgcagcttccctgtggccaacgtgtccctgaccaagggcggccgggacagagtgtag

SEQ ID NO: 145131 - DNA, 879 bp, synthetic construct
  misc_feature 1..879: note = Description of Artificial Sequence: Synthetic coding sequence
  source 1..879: mol_type = other DNA
atggagttccagcccaaccaggaggatgaagaagatgcccatgctggcatcatcggccgcttcctgggcctgcagagccatgaccaccaccccccccgggccaacagcaggaccaagctgctgtggcccaagcgggagagcctgctgcacgagggcctgcccaagaaccacaaggccgccaagcagaatgtgcggggccaggaggacaacaaggcctggaagctgaaggctgtggatgccttcaagagcgcccccctgtaccagaggcctggctactacagcgccccccagacccccctgagccccacccccatgttcttccccctggagcccagcgcccccagcaagctgcacagcgtgactggaattgacaccaaggacaagagcctgaagacagtgtcctctggggccaagaagagctttgagctgctgtctgagagtgatggagccctgatggagcaccctgaggtgtcccaggtgcggaggaagacagtggagttcaacctgacagacatgcctgagatccctgagaaccacctgaaggagcccctggagcagagccccaccaacatccacaccaccctgaaggaccacatggacccctactgggccctggagaacagatctgtgctgcacctgaaccagggccactgcatcgccctgtgccccaccccagccagcctggccctgagcctgcccttcctgcacaacttcctgggcttccaccactgccagagcaccctggacctgcggcctgccctggcctggggcatctacctggccaccttcaccggcatcctgggcaaatgttctggccccttcctgaccagcccctggtaccaccctgaggacttcctgggccctggagagggccgctag

SEQ ID NO: 145132 - DNA, 1497 bp, synthetic construct
  misc_feature 1..1497: note = Description of Artificial Sequence: Synthetic coding sequence
  source 1..1497: mol_type = other DNA
atgtttgagaagctgaccctgtactgtgacagctacatccagctgatccccatcagctttgtgctgggcttctacgtgaccctggtggtgacccgctggtggaaccagtatgagaacctgccctggccagaccggctgatgagcctggtgtctggctttgtggagggcaaggatgagcagggccgcctgctgcggaggaccctcatccgctatgccaacctgggcaatgtgctgatcctgcggtctgtgtccacagctgtgtacaagcgcttccccagcgcccagcacctggtgcaggccggcttcatgaccccagctgagcacaagcagctggagaagctgagcctgccccacaacatgttctgggtgccctgggtgtggtttgccaacctgtccatgaaggcctggctgggcggccgcatccgggaccccatcctgctgcagagcctgctgaatgagatgaacaccctgcggacccagtgtggccacctgtatgcctatgactggatcagcatccccctggtgtacacccaggtggtgacagtggccgtgtacagcttcttcctgacctgcctggtgggccggcagttcctgaacccagccaaggcctacccaggccacgagctggacctggtggtgcctgtgttcaccttcctgcagttcttcttctacgtgggctggctgaaggtgtccctgctggccgtggatgagatgcaccaggacctgcccaggatggagccagacatgtactggaacaagccagagccccagcccccctacacagctgccagcgcccagttccggcgggccagcttcatgggcagcaccttcaacatcagcctgaacaaggaggagatggagttccagcccaaccaggaggatgaggaggatgcccacgccggcatcatcggccgcttcctgggcctgcagagccatgaccaccaccccccccgggccaacagcaggaccaagctgctgtggcccaagcgggagagcctgctgcacgagggcctgcccaagaaccacaaggccgccaagcagaatgtgcggggccaggaggacaacaaggcctggaagctgaaggctgtggatgccttcaagagcgcccccctgtaccagaggcctggctactacagcgccccccagacccccctgagccccacccccatgttcttccccctggagcccagcgcccccagcaagctgcacagcgtgacaggcatcgacaccaaggacaagagcctgaagacagtgagcagcggggccaagaagagctttgagctgctgtctgagagtgatggagccctgatggagcaccctgaggtgtcccaggtgcggaggaagacagtggagttcaacctgacagacatgcctgagatccctgagaaccacctgaaggagcccctggagcagagccccaccaacatccacaccaccctgaaggaccacatggacccctactgggccctggagaacagagatgaggcccacagctag

SEQ ID NO: 145133 - DNA, 1758 bp, synthetic construct
  misc_feature 1..1758: note = Description of Artificial Sequence: Synthetic coding sequence
  source 1..1758: mol_type = other DNA
atgaccatcacctacaccagccaggtggccaatgcccggctgggcagcttcagccggctgctgctgtgctggaggggcagcatctacaagctgctgtatggagagttcctgatcttcctgctgtgctactacatcatccgcttcatctaccgcctggccctgacagaggagcagcagctgatgtttgagaagctgaccctgtactgtgacagctacatccagctgatccccatcagctttgtgctgggcttctacgtgaccctggtggtgacccgctggtggaaccagtatgagaacctgccctggccagaccggctgatgagcctggtgtctggctttgtggagggcaaggatgagcagggccgcctgctgcggaggaccctcatccgctatgccaacctgggcaatgtgctgatcctgcggtctgtgtccacagctgtgtacaagcgcttccccagcgcccagcacctggtgcaggccggcttcatgaccccagctgagcacaagcagctggagaagctgagcctgccccacaacatgttctgggtgccctgggtgtggtttgccaacctgtccatgaaggcctggctgggcggccgcatccgggaccccatcctgctgcagagcctgctgaatgagatgaacaccctgcggacccagtgtggccacctgtatgcctatgactggatcagcatccccctggtgtacacccaggtggtgacagtggccgtgtacagcttcttcctgacctgcctggtgggccggcagttcctgaacccagccaaggcctacccaggccacgagctggacctggtggtgcctgtgttcaccttcctgcagttcttcttctacgtgggctggctgaaggtggccgagcagctgatcaacccctttggagaagatgatgatgactttgagaccaactggatcgtggacaggaacctgcaggtgtccctgctggccgtggatgagatgcaccaggacctgcccaggatggagccagacatgtactggaacaagccagagccccagcccccctacacagctgccagcgcccagttcagaagagccagcttcatgggcagcaccttcaacatcagcctgaacaaggaggagatggagttccagcccaaccaggaggatgaagaagatgcccatgctggcatcatcggccgcttcctgggcctgcagagccatgaccaccaccccccccgggccaacagcaggaccaagctgctgtggcccaagcgggagagcctgctgcacgagggcctgcccaagaaccacaaggccgccaagcagaatgtgcggggccaggaggacaacaaggcctggaagctgaaggctgtggatgccttcaagagcgcccccctgtaccagaggcctggctactacagcgccccccagacccccctgagccccacccccatgttcttccccctggagcccagcgcccccagcaagctgcacagcgtgactggaattgacaccaaggacaagagcctgaagacagtgtcctctggggccaagaagagctttgagctgctgtctgagagtgatggagccctgatggagcaccctgaggtgtcccaggtgcggaggaagacagtggagttcaacctgacagacatgcctgagatccctgagaaccacctgaaggagcccctggagcagagccccaccaacatccacaccaccctgaaggaccacatggacccctactgggccctggagaacagagatgaggcccacagctag

SEQ ID NO: 145134 - DNA, 813 bp, synthetic construct
  misc_feature 1..813: note = Description of Artificial Sequence: Synthetic coding sequence
  source 1..813: mol_type = other DNA
atgaccatcacctacaccagccaggtggccaatgcccggctgggcagcttcagccggctgctgctgtgctggaggggcagcatctacaagctgctgtatggagagttcctgatcttcctgctgtgctactacatcatccgcttcatctaccgcctggccctgacagaggagcagcagctgatgtttgagaagctgaccctgtactgtgacagctacatccagctgatccccatcagctttgtgctgggcttctacgtgaccctggtggtgacccgctggtggaaccagtatgagaacctgccctggccagaccggctgatgagcctggtgtctggctttgtggagggcaaggatgagcagggccgcctgctgcggaggaccctcatccgctatgccaacctgggcaatgtgctgatcctgcggtctgtgtccacagctgtgtacaagcgcttccccagcgcccagcacctggtgcaggccggcttcatgaccccagctgagcacaagcagctggagaagctgagcctgccccacaacatgttctgggtgccctgggtgtggtttgccaacctgtccatgaaggcctggctgggcggccgcatccgggaccccatcctgctgcagagcctgctgaatgagatgaacaccctgcggacccagtgtggccacctgtatgcctatgactggatcagcatccccctggtgtacacccagcctgagcagagaggagatggagtgcctgcccagagcggcggccggggcggctgcagccgctggcaccactggcccctgcccaggcctgctgtgccctag

SEQ ID NO: 145135 - DNA, 1815 bp, synthetic construct
  misc_feature 1..1815: note = Description of Artificial Sequence: Synthetic coding sequence
  source 1..1815: mol_type = other DNA
atgtttgagaagctgaccctgtactgtgacagctacatccagctgatccccatcagctttgtgctgggcttctacgtgaccctggtggtgacccgctggtggaaccagtatgagaacctgccctggccagaccggctgatgagcctggtgtctggctttgtggagggcaaggatgagcagggccgcctgctgcggaggaccctcatccgctatgccaacctgggcaatgtgctgatcctgcggtctgtgtccacagctgtgtacaagcgcttccccagcgcccagcacctggtgcaggccggcttcatgaccccagctgagcacaagcagctggagaagctgagcctgccccacaacatgttctgggtgccctgggtgtggtttgccaacctgtccatgaaggcctggctgggcggccgcatccgggaccccatcctgctgcagagcctgctgaatgagatgaacaccctgcggacccagtgtggccacctgtatgcctatgactggatcagcatccccctggtgtacacccaggtggtgacagtggccgtgtacagcttcttcctgacctgcctggtgggccggcagttcctgaacccagccaaggcctacccaggccacgagctggacctggtggtgcctgtgttcaccttcctgcagttcttcttctacgtgggctggctgaaggtggccgagcagctgatcaacccctttggagaagatgatgatgactttgagaccaactggatcgtggacaggaacctgcaggtgtccctgctggccgtggatgagatgcaccaggacctgcccaggatggagccagacatgtactggaacaagccagagccccagcccccctacacagctgccagcgcccagttcagaagagccagcttcatgggcagcaccttcaacatcagcctgaacaaggaggagatggagttccagcccaaccaggaggatgaagaagatgcccatgctggcatcatcggccgcttcctgggcctgcagagccatgaccaccaccccccccgggccaacagcaggaccaagctgctgtggcccaagcgggagagcctgctgcacgagggcctgcccaagaaccacaaggccgccaagcagaatgtgcggggccaggaggacaacaaggcctggaagctgaaggctgtggatgccttcaagagcgcccccctgtaccagaggcctggctactacagcgccccccagacccccctgagccccacccccatgttcttccccctggagcccagcgcccccagcaagctgcacagcgtgactggaattgacaccaaggacaagagcctgaagacagtgtcctctggggccaagaagagctttgagctgctgtctgagagtgatggagccctgatggagcaccctgaggtgtcccaggtgcggaggaagacagtggagttcaacctgacagacatgcctgagatccctgagaaccacctgaaggagcccctggagcagagccccaccaacatccacaccaccctgaaggaccacatggacccctactgggccctggagaacagatctgtgctgcacctgaaccagggccactgcatcgccctgtgccccaccccagccagcctggccctgagcctgcccttcctgcacaacttcctgggcttccaccactgccagagcaccctggacctgcggcctgccctggcctggggcatctacctggccaccttcaccggcatcctgggcaaatgttctggccccttcctgaccagcccctggtaccaccctgaggacttcctgggccctggagagggccgctag

SEQ ID NO: 145136 - DNA, 1530 bp, synthetic construct
  misc_feature 1..1530: note = Description of Artificial Sequence: Synthetic coding sequence
  source 1..1530: mol_type = other DNA
atgacagtgacctacacagcccgggtggccaatgccaggtttggaggcttcagccagctgctgctgctgtggaggggcagcatctacaagctgctgtggagggagctgctgtgcttcctgggcttctacatggccctgtctgctgcctacagatttgtgctgacagagggccagaagcgctactttgagaagctggtgatctactgtgaccagtatgccagcctcatccctgtgtcctttgtgctgggcttctacgtgaccctggtggtgaaccgctggtggagccagtacctgtgcatgcccctgcctgatgccctgatgtgtgtggtggccggcaccgtgcacggcagagatgaccggggccgcctgtacagaaggaccctgatgagatatgccggcctgtctgctgtgctgatcctgcggtctgtgtccacagctgtgttcaagcgcttccccaccatcgaccacgtggtggaggccggcttcatgacccgggaggagaggaagaagtttgagaacctgaacagcagctacaacaagtactgggtgccctgtgtgtggttcagcaacctggccgcccaggcccggcgggagggccgcatccgggacaacagcgccctgaagctgctgctggaggagctgaatgtgttccggggcaaatgtggcatgctgttccactatgactggatctctgtgcccctggtgtacacccaggtggtgaccatcgccctgtacagctacttcctggcctgcctgattggccggcagttcctggaccctgcccagggctacaaggaccatgacctggacctgtgtgtgcccatcttcaccctgctgcagttcttcttctacgccggctggctgaaggtggccgagcagctgatcaacccctttggagaagatgatgatgactttgagaccaacttcctgattgacaggaacttccaggtgtccatgctggccgtggatgagatgtatgatgacctggccgtgctggagaaggacctgtactgggatgctgctgaggcccgggccccctacacagctgccaccgtcttccagctgcggcagcccagcttccagggcagcacctttgacatcaccctggccaaggaggacatgcagttccagaggctggatggcctggatggccccatgggagaggcccctggggacttcctgcagaggctgctgcctgctggggccggcatggtggccggcggccccctgggccggcggctgtccttcctgctgaggaagaacagctgtgtgtctgaggccagcactggagccagctgcagctgtgctgtggtgcctgagggcgccgccccagaatgttcctgtggggaccccctgctggaccccggcctgcctgagcctgaggcccctcctcctgctggccctgagcccctgaccctcatccctggccctgtggagcccttcagcatcgtgaccatgcctggcccccggggccctgccccaccctggctgcccagccccatcggggaggaggaggagaacctggcctag

SEQ ID NO: 145137 - DNA, 1530 bp, synthetic construct; identical to SEQ ID NO: 145136
  misc_feature 1..1530: note = Description of Artificial Sequence: Synthetic coding sequence
  source 1..1530: mol_type = other DNA

SEQ ID NO: 145138 - DNA, 1530 bp, synthetic construct; identical to SEQ ID NO: 145136
  misc_feature 1..1530: note = Description of Artificial Sequence: Synthetic coding sequence
  source 1..1530: mol_type = other DNA

SEQ ID NO: 145139 - DNA, 219 bp, synthetic construct
  misc_feature 1..219: note = Description of Artificial Sequence: Synthetic coding sequence
  source 1..219: mol_type = other DNA
atgttcctgatcagcagctctgtgcacggcagtgatgagcacggccgcctgctgcggaggaccctgatgagatatgtgaacctgaccagcctgctgatcttccgctctgtgtccacagctgtgtacaagcgcttccccaccatggaccacgtggtggaggccgagaggacaggcatgaagcccatcctgcccagcagctttgagatgcagagcttctag

SEQ ID NO: 145140 - DNA, 2007 bp, synthetic construct
  misc_feature 1..2007: note = Description of Artificial Sequence: Synthetic coding sequence
  source 1..2007: mol_type = other DNA
atgacagtgacctacagcagcaaggtggccaatgccaccttcttcggcttccaccggctgctgctgaagtggaggggcagcatctacaagctgctgtaccgggagttcatcgtgtttgctgtgctgtacacagccatcagcctggtgtaccgcctgctgctgactggagtgcagaagcgctactttgagaagctgagcatctactgtgacagatatgcagagcagatccctgtgacctttgtgctgggcttctacgtgaccctggtggtgaaccgctggtggaaccagtttgtgaacctgccctggccagaccggctgatgttcctgatcagcagctctgtgcacggcagtgatgagcacggccgcctgctgcggaggaccctgatgagatatgtgaacctgaccagcctgctgatcttccgctctgtgtccacagctgtgtacaagcgcttccccaccatggaccacgtggtggaggccggcttcatgaccacagatgagaggaagctgttcaaccacctgaagagcccccacctgaagtactgggtgcccttcatctggtttggaaacctggccaccaaggccagaaatgaaggccgcatccgggacagcgtggacctgcagagcctgatgacagagatgaaccgctaccgctcctggtgcagcctgctgtttggctatgactgggtgggcatccccctggtgtacacccaggtggtgaccctggccgtgtacaccttcttctttgcctgcctgattggccggcagttcctggaccccaccaagggctacgccggccatgacctggacctgtacatccccatcttcaccctgctgcagttcttcttctacgccggctggctgaaggtggccgagcagctgatcaacccctttggagaagatgatgatgactttgagaccaactggtgcatcgacaggaacctgcaggtgtccctgctggccgtggatgagatgcacatgagcctgcccaagatgaagaaggacatctactgggatgattctgctgcccggcccccctacaccctggccgctgctgactactgcatccccagcttcctgggcagcacagtgcagatgggcctgagcggcagtgacttcccagatgaggagtggctgtgggactatgagaagcacggccaccgccacagcatgatcagaagagtgaagcgcttcctgagcgcccacgagcaccccagcagcccccggcggcgcagctaccgccggcagaccagtgacagctccatgttcctgcccagagatgacctgagccctgcccgggacctgctggatgtgcccagcagaaatccaccccgggccagccccacctggaagaagagctgcttccctgagggcagccccaccctgcacttctccatgggagagctgagcaccatccgggagaccagccagaccagcaccctgcagagcctgaccccccagagctctgtgaggaccagccccatcaagatgcccctggtgcctgaggtgctgatcacagctgctgaggcccctgtgcccaccagcggcggctaccaccacgacagcgccaccagcatcctgagcagcgagttcaccggggtgcagcccagcaagacagagcagcagcagggccccatgggcagcatcctgagccccagcgagaaggagaccccacctgggggccccagcccccagacagtgtctgccagcgctgaggagaacatcttcaactgtgaggaggaccccggggacaccttcctgaagcgctggagcctgcccggcttcctgggcagcagccacaccagcctgggcaacctgagcccagaccccatgagcagccagcctgccctgctgattgacacagagaccagcagcgagatcagcggcatcaacatcgtggccggcagccgggtgtccagtgacatgctgtacctgatggagaacctggacaccaaggagacagacatcatcgagctgaacaaggagacagaggagagccccaagtag

SEQ ID NO: 145141 - DNA, 1197 bp, synthetic construct
  misc_feature 1..1197: note = Description of Artificial Sequence: Synthetic coding sequence
  source 1..1197: mol_type = other DNA
atgacagtgacctacagcagcaaggtggccaatgccaccttcttcggcttccaccggctgctgctgaagtggaggggcagcatctacaagctgctgtaccgggagttcatcgtgtttgctgtgctgtacacagccatcagcctggtgtaccgcctgctgctgactggagtgcagaagcgctactttgagaagctgagcatctactgtgacagatatgcagagcagatccctgtgacctttgtgctgggcttctacgtgaccctggtggtgaaccgctggtggaaccagtttgtgaacctgccctggccagaccggctgatgttcctgatcagcagctctgtgcacggcagtgatgagcacggccgcctgctgcggaggaccctgatgagatatgtgaacctgaccagcctgctgatcttccgctctgtgtccacagctgtgtacaagcgcttccccaccatggaccacgtggtggaggccggcttcatgaccacagatgagaggaagctgttcaaccacctgaagagcccccacctgaagtactgggtgcccttcatctggtttggaaacctggccaccaaggccagaaatgaaggccgcatccgggacagcgtggacctgcagagcctgatgacagagatgaaccgctaccgctcctggtgcagcctgctgtttggctatgactgggtgggcatccccctggtgtacacccaggtggtgaccctggccgtgtacaccttcttctttgcctgcctgattggccggcagttcctggaccccaccaagggctacgccggccatgacctggacctgtacatccccatcttcaccctgctgcagttcttcttctacgccggctggctgaaggtggccgagcagctgatcaacccctttggagaagatgatgatgactttgagaccaactggtgcatcgacaggaacctgcaggtgtccctgctggccgtggatgagatgcacatgagcctgcccaagatgaagaaggacatctactgggatgattctgctgcccggcccccctacaccctggccgctgctgactactgcatccccagcttcctgggcagcacagtgcagatgggcaagcagatgcccaagaatgagtggaagatggaggacatcaagatccccctgccccagccccagttccagtgtgccaagagtgaccccggcggctag

SEQ ID NO: 145142 - DNA, 219 bp, synthetic construct; identical to SEQ ID NO: 145139
  misc_feature 1..219: note = Description of Artificial Sequence: Synthetic coding sequence
  source 1..219: mol_type = other DNA

SEQ ID NO: 145143 - DNA, 1368 bp, synthetic construct
  misc_feature 1..1368: note = Description of Artificial Sequence: Synthetic coding sequence
  source 1..1368: mol_type = other DNA
atgaccacagatgagaggaagctgttcaaccacctgaagagcccccacctgaagtactgggtgcccttcatctggtttggaaacctggccaccaaggccagaaatgaaggccgcatccgggacagcgtggacctgcagagcctgatgacagagatgaaccgctaccgctcctggtgcagcctgctgtttggctatgactgggtgggcatccccctggtgtacacccaggtggccgagcagctgatcaacccctttggagaagatgatgatgactttgagaccaactggtgcatcgacaggaacctgcaggtgtccctgctggccgtggatgagatgcacatgagcctgcccaagatgaagaaggacatctactgggatgacagcgctgcccggcccccctacaccctggccgctgctgactactgcatccccagcttcctgggcagcacagtgcagatgggcctgagcggcagtgacttcccagatgaggagtggctgtgggactatgagaagcacggccaccgccacagcatgatccggcgggtgaagcgcttcctgagcgcccacgagcaccccagcagccccaggagaagaagctaccgccggcagaccagtgacagctccatgttcctgcccagagatgacctgagccctgcccgggacctgctggatgtgcccagcaggaaccccccccgggccagccccacctggaagaagagctgcttccctgagggcagccccaccctgcacttctccatgggagagctgagcaccatccgggagaccagccagaccagcaccctgcagagcctgaccccccagagctctgtgaggaccagccccatcaagatgcccctggtgcctgaggtgctgatcacagctgctgaggcccctgtgcccaccagcggcggctaccaccatgattctgccaccagcatcctgagcagcgagttcaccggggtgcagcccagcaagacagagcagcagcagggccccatgggcagcatcctgagccccagcgagaaggagaccccacctgggggccccagcccccagacagtgtctgccagcgctgaggagaacatcttcaactgtgaagaagatcctggggacaccttcctgaagcgctggagcctgcccggcttcctgggcagcagccacaccagcctgggcaacctgagcccagaccccatgagcagccagcctgccctgctgattgacacagagaccagcagcgagatcagcggcatcaacatcgtggccggcagccgggtgtccagtgacatgctgtacctgatggagaacctggacaccaaggagacagacatcatcgagctgaacaaggagacagaggagagccccaagtag

SEQ ID NO: 145144 - DNA, 219 bp, synthetic construct; identical to SEQ ID NO: 145139
  misc_feature 1..219: note = Description of Artificial Sequence: Synthetic coding sequence
  source 1..219: mol_type = other DNA

SEQ ID NO: 145145 - DNA, 1422 bp, synthetic construct
  misc_feature 1..1422: note = Description of Artificial Sequence: Synthetic coding sequence
  source 1..1422: mol_type = other DNA
atgacagtgtcctacaccctgaaggtggccgaggccaggtttggaggcttcagcggcctgctgctgcgctggaggggcagcatctacaagctgctgtacaaggagttcctgctgtttggagccctgtatgctgtgctgagcatcacctaccgcctgctgctgacccaggagcagcgctacgtgtatgcccaggtggcccgctactgcaacagatctgctgacctgatccccctgagctttgtgctgggcttctacgtgaccctggtggtgaaccgctggtggagccagtacaccagcatccccctgcctgaccagctgatgtgtgtgatcagcgcctctgtgcatggagtggaccagaggggccgcctgctgcggaggaccctcatccgctatgccaacctggcctctgtgctggtgctgcggtctgtgtccaccagggtgctgaagcgcttccccaccatggagcacgtggtggatgctggcttcatgagccaggaggagaggaagaagtttgagagcctgaagagtgacttcaacaagtactgggtgccctgtgtgtggttcaccaacctggccgcccaggccaggagagatggccgcatcagagatgacatcgccctgtgcctgctgctggaggagctgaacaagtaccgggccaagtgcagcatgctgttccactatgactggatcagcatccccctggtgtacacccaggtggtgaccatcgctgtgtacagcttctttgccctgagcctggtgggccggcagtttgtggagcctgaggccggggccgccaagccccagaagctgctgaagccaggccaggagcccgccccagccctgggggaccctgacatgtatgtgcccctgaccaccctgctgcagttcttcttctacgccggctggctgaaggtggccgagcagatcatcaacccctttggagaagatgatgatgactttgagaccaaccagctgattgacaggaacctgcaggtgtccctgctgtctgtggatgagatgtaccagaacctgcccccagctgagaaggaccagtactgggatgaggaccagccccagcccccctacacagtggccacagctgctgagagcctgcggcccagcttcctgggcagcaccttcaacctgaggatgtctgatgatcctgagcagagcctgcaggtggaggccagccctggcagcggccgcccagccccagctgcccagacccccctgctgggccgcttcctgggcgtgggcgcccccagccctgccatcagcctgaggaactttggccgggtgcggggcacccccaggcctccccacctgctgcgcttccgggcagaggagggcggggaccctgaggccgccgccagaattgaggaggagagcgctgagagcggagatgaggccctggagccctag

SEQ ID NO: 145146 - DNA, 294 bp, synthetic construct
  misc_feature 1..294: note = Description of Artificial Sequence: Synthetic coding sequence
  source 1..294: mol_type = other DNA
atgtacctgggcatcacccccagcgtgacctgcaacaacagcagcaagaatgagttcagcctcatcctggagaagaaccccctggtggagtttgtggaggagctgcctgctggccgcagcagcctgtgctactgcaacctgctgtgtggcatcatccggggggccctggagatggtgcacctggccgcagatgtgaccttcctgcaggaccggctgaagggggacagcgtgacagagatcggcatcaccttcctgaagaagagagatgagaagaagtaccggggcaagaagtag

SEQ ID NO: 145147 - DNA, 546 bp, synthetic construct
  misc_feature 1..546: note = Description of Artificial Sequence: Synthetic coding sequence
  source 1..546: mol_type = other DNA
atgagcaggcctgcccacagaagacctgagtaccacaagatcaacaaggacctgtttgtgctgacctatggagccctggtggcccagctgtgcaaggactatgagaaggatgaagatgtgaaccagtacctggacaagatgggctatggaattggcacccggctggtggaggacttcctggcccggagctgtgtgggccgctgccacagctacagcgagatcatcgacatcatcgcccaggtggccttcaagatgtacctgggcatcacccccagcgtgacctgcaacaacagcagcaagaatgagttcagcctcatcctggagaagaaccccctggtggagtttgtggaggagctgcctgctggccgcagcagcctgtgctactgcaacctgctgtgtggcatcatccggggggccctggagatggtgcacctggccgcagatgtgaccttcctgcaggaccggctgaagggggacagcgtgacagagatcggcatcaccttcctgaagaagagagatgagaagaagtaccggggcaagaagtag

SEQ ID NO: 145148 - DNA, 504 bp, synthetic construct
  misc_feature 1..504: note = Description of Artificial Sequence: Synthetic coding sequence
  source 1..504: mol_type = other DNA
aacaaggacctgtttgtgctgacctatggagccctggtggcccagctgtgcaaggactatgagaaggatgaagatgtgaaccagtacctggacaagatgggctatggaattggcacccggctggtggaggacttcctggcccggagctgtgtgggccgctgccacagctacagcgagatcatcgacatcatcgcccaggtggccttcaagatgtacctgggcatcacccccagcgtgacctgcaacaacagcagcaagaatgagttcagcctcatcctggagaagaaccccctggtggagtttgtggaggagctgcctgctggccgcagcagcctgtgctactgcaacctgctgtgtggcatcatccggggggccctggagatggtgcacctggccgcagatgtgaccttcctgcaggaccggctgaagggggacagcgtgacagagatcggcatcaccttcctgaagaagagagatgagaagaagtaccggggcaagaagtag

SEQ ID NO: 145149 - DNA, 1497 bp, synthetic construct
  misc_feature 1..1497: note = Description of Artificial Sequence: Synthetic coding sequence
  source 1..1497: mol_type = other DNA
atgaggcccccagcctgctggtggctgctggcccccccagccctgctggccctgctgacctgcagcctggccttcggcctggccagcgaggacaccaagaaggaggtgaagcagagccaggacctggagaagagcggcatcagcaggaagaatgacatcgacctgaagggcatcgtgtttgtgatccagagccagagcaacagcttccacgccaagagagctgagcagctgaagaagagcatcctgaagcaggccgctgacctgacccaggagctgcccagcgtgctgctgctgcaccagctggccaagcaggagggcgcctggaccatcctgcccctgctgccccacttctctgtgacctacagcaggaacagctcctggatcttcttctgtgaggaggagacccgcatccagatccccaagctgctggagaccctgcggcgctatgaccccagcaaggagtggttcctgggcaaggccctgcatgatgaggaggccaccatcatccaccactacgccttcagcgagaaccccaccgtcttcaagtacccagactttgctgctggctgggccctgagcatccccctggtgaacaagctgaccaagaggctgaagtctgagagcctgaagagtgacttcaccatcgacctgaagcatgaaattgccctgtacatctgggacaagggcggcggcccccccctgacccctgtgcctgagttctgcaccaatgatgtggacttctactgtgccaccaccttccacagcttcctgcccctgtgcaggaagcctgtgaagaagaaggacatctttgtggccgtgaagacctgcaagaagttccacggggaccgcatccccatcgtgaagcagacctgggagagccaggccagcctcatcgagtactacagcgactacacagagaacagcatccccaccgtggacctgggcatccccaacacagaccggggccactgtgggaagacctttgccatcctggagcgcttcctgaacagaagccaggacaagacagcctggctggtgattgtggatgatgacaccctcatcagcatcagccggctgcagcacctgctgagctgctatgacagcggggagcctgtgttcctgggggagagatatggctacggcctgggcaccggcggctacagctacatcactggaggcggcggcatggtgttcagccgggaggccgtgcggcggctgctggccagcaagtgccgctgctacagcaatgatgccccagatgacatggtgctgggcatgtgcttcagcggcctgggcatccctgtgacccacagccccctcttccaccaggcccggcctgtggactaccccaaggactacctgagccaccaggtgcccatctccttccacaagcactggaacatcgaccctgtgaaggtgtacttcacctggctggcccccagtgatgaggacaaggcccggcaggagacccagaagggcttccgggaggagctgtag

SEQ ID NO: 145150 - DNA, 1005 bp, synthetic construct
  misc_feature 1..1005: note = Description of Artificial Sequence: Synthetic coding sequence
  source 1..1005: mol_type = other DNA
atgcccaagaggcgggacatcctggccatcgtgctgattgtgctgccctggaccctgctgatcaccgtgtggcaccagagcaccctggcccccctgctggccgtgcacaaggatgagggcagtgacccccggcgggagaccccacctggagctgacccccgggagtactgcaccagtgaccgggacatcgtggaggtggtgaggacagaatatgtgtacacccggcccccaccctggagcgacaccctgcccaccatccacgtggtgacccccacctacagcaggcctgtgcagaaggccgagctgaccaggatggccaacaccctgctgcacgtgcccaacctgcactggctggtggtggaggatgcccccaggaggacccccctgacagcccggctgctgcgggacaccggcctgaactacacccacctgcacgtggagacccccaggaactacaagctgcggggagatgcccgggacccccgcatcccccggggcaccatgcagaggaacctggccctgcgctggctgcgggagaccttccccaggaacagcagccagcccggggtggtgtactttgctgatgatgacaacacctacagcctggagctgtttgaggagatgaggagcacccggcgggtgtctgtgtggcctgtggcctttgtgggcggcctgcgctatgaggccccccgggtgaatggagctgggaaggtggtgggctggaagacagtgtttgacccccaccggccctttgccatcgacatggccggctttgctgtgaacctgcggctcatcctgcagaggagccaggcctacttcaagctgcggggcgtgaagggcggctaccaggagagcagcctgctgcgggagctggtgaccctgaatgacctggagcccaaggccgccaactgcaccaagatcctggtgtggcacaccaggacagagaagcctgtgctggtgaatgaaggcaagaagggcttcacagaccccagcgtggagatctag

SEQ ID NO: 145151 - DNA, 1005 bp, synthetic construct; identical to SEQ ID NO: 145150
  misc_feature 1..1005: note = Description of Artificial Sequence: Synthetic coding sequence
  source 1..1005: mol_type = other DNA

SEQ ID NO: 145152 - DNA, 1005 bp, synthetic construct; identical to SEQ ID NO: 145150
  misc_feature 1..1005: note = Description of Artificial Sequence: Synthetic coding sequence
  source 1..1005: mol_type = other DNA

SEQ ID NO: 145153 - DNA, 1044 bp, synthetic construct
  misc_feature 1..1044: note = Description of Artificial Sequence: Synthetic coding sequence
  source 1..1044: mol_type = other DNA
atgggaaatgaggagccctgggtgcagcctgccctggagatgcccaagagaagagacatcctggccatcgtgctgattgtgctgccctggaccctgctgatcaccgtgtggcaccagagcaccctggcccccctgctggccgtgcacaaggatgagggcagtgacccccggcgggagaccccacctggagctgacccccgggagtactgcaccagtgaccgggacatcgtggaggtggtgaggacagaatatgtgtacacccggcccccaccctggagcgacaccctgcccaccatccacgtggtgacccccacctacagcaggcctgtgcagaaggccgagctgaccaggatggccaacaccctgctgcacgtgcccaacctgcactggctggtggtggaggatgcccccaggaggacccccctgacagcccggctgctgcgggacaccggcctgaactacacccacctgcacgtggagaccccaagaaactacaagctgcggggagatgcccgggacccccgcatcccccggggcaccatgcagaggaacctggccctgcgctggctgcgggagaccttccccaggaacagcagccagcccggggtggtgtactttgctgatgatgacaacacctacagcctggagctgtttgaggagatgaggagcaccaggagagtgtctgtgtggcctgtggcctttgtgggcggcctgcgctatgaggccccccgggtgaatggagctgggaaggtggtgggctggaagacagtgtttgacccccaccggccctttgccatcgacatggccggctttgctgtgaacctgcggctcatcctgcagaggagccaggcctacttcaagctgcggggcgtgaagggcggctaccaggagagcagcctgctgcgggagctggtgaccctgaatgacctggagcccaaggccgccaactgcaccaagatcctggtgtggcacaccaggacagagaagcctgtgctggtgaatgaaggcaagaagggcttcacagaccccagcgtggagatctag

SEQ ID NO: 145154 - DNA, 1008 bp, synthetic construct
  misc_feature 1..1008: note = Description of Artificial Sequence: Synthetic coding sequence
  source 1..1008: mol_type = other DNA
atgaagctgaagctgaagaatgtgttcctggcctacttcctggtgtccattgctggcctgctgtatgccctggtgcagctgggccagccctgtgactgcctgccccccctgcgggctgctgctgagcagctgcggcagaaggacctgcgcatcagccagctgcaggccgagctgcggcggcccccaccagccccagcccagcccccagagcctgaggccctgcccaccatctacgtggtgacccccacctacgcccggctggtgcagaaggccgagctggtgcggctgagccagaccctgagcctggtgccccggctgcactggctgctggtggaggatgctgagggccccacccccctggtgtctggcctgctggccgccagcggcctgctcttcacccacctggtggtgctgacccccaaggcccagaggctgcgggagggggagcccggctgggtgcacccccggggcgtggagcagaggaacaaggccctggactggctgcggggccggggcggcgctgtgggcggggagaaggaccccccacctcctggcacccagggcgtggtgtactttgctgatgatgacaacacctacagccgggagctgtttgaggagatgcgctggacccggggcgtgtctgtgtggcctgtgggcctggtgggcggcctgcgctttgagggcccccaggtgcaggacggccgggtggtgggcttccacacagcctgggagcccagccggcccttccctgtggacatggccggctttgctgtggccctgcccctgctgctggacaagcccaatgcccagtttgacagcacagccccccggggccacctggagagcagcctgctgagccacctggtggaccccaaggacctggagccccgggccgccaactgcaccagggtgctggtgtggcacaccaggacagagaagcccaagatgaagcaggaggagcagctgcagaggcagggccggggcagtgaccctgccatcgaggtgtag

SEQ ID NO: 145155 - DNA, 948 bp, synthetic construct
  misc_feature 1..948: note = Description of Artificial Sequence: Synthetic coding sequence
  source 1..948: mol_type = other DNA
atgaagctgaagctgaagaatgtgttcctggcctacttcctggtgtccattgctggcctgctgtatgccctggtgcagctgggccagccctgtgactgcctgccccccctgcgggctgctgctgagcagctgcggcagaaggacctgcgcatcagccagctgcaggccgagctgcggcggcccccaccagccccagcccagcccccagagcctgaggccctgcccaccatctacgtggtgacccccacctacgcccggctggtgcagaaggccgagctggtgcggctgagccagaccctgagcctggtgccccggctgcactggctgctggtggaggatgctgagggccccacccccctggtgtctggcctgctggccgccagcggcctgctcttcacccacctggtggtgctgacccccaaggcccagaggctgcgggagggggagcccggctgggtgcacccccggggcgtggagcagaggaacaaggccctggactggctgcggggccggggcggcgctgtgggcggggagaaggaccccccacctcctggcacccagggcgtggtgtactttgctgatgatgacaacacctacagccgggagctgtttgaggagatgcgctggacccggggcgtgtctgtgtggcctgtgggcctggtgggcggcctgcgctttgagggcccccaggtgcaggacggccgggtggtgggcttccacacagcctgggagcccagccggcccttccctgtggacatggccggctttgctgtggccctgcccctgctgctggacaagcccaatgcccagtttgacagcacagccccccggggccacctggagagcagcctgctgagccacctggtggaccccaaggacctggagccccgggccgccaactgcaccaggacagagagccgctgtgtgacccaggccggcgtgcagtag

SEQ ID NO: 145156 - DNA, 2997 bp, synthetic construct
  misc_feature 1..2997: note = Description of Artificial Sequence: Synthetic coding sequence
  source 1..2997: mol_type = other DNA
atgggcagcccccgggccgcccggccccccctgctgctgcggcctgtgaagctgctgcggcggcgcttccggctgctgctggccctggccgtggtgtctgtgggcctgtggaccctgtacctggagctggtggccagcgcccaggtgggcggcaaccccctgaacagaagatatggctcctggagggagctggccaaggccctggccagcaggaacatcccagctgtggacccccacctgcagttctaccacccccagaggctgagcctggaggaccatgacatcgaccagggcgtgagcagcaacagcagctacctgaagtggaacaagcctgtgccctggctgtctgagttccggggccgggccaacctgcacgtgtttgaggactggtgtggcagcagcatccagcagctgcggaggaacctgcacttccccctgtacccccacatccgcaccaccctgaggaagctggccgtgagccccaagtggaccaactacggcctgcgcatcttcggctacctgcaccccttcacagatggcaagatccagtttgccatcgccgcagatgacaatgctgagttctggctgagcctggatgaccaggtgtctggcctgcagctgctggcctctgtgggcaagacaggcaaggagtggacagcccctggagaatttgggaagttccgcagccagatcagcaagcctgtgtccctgagcgccagccaccgctactactttgaggtgctgcacaagcagaatgaggagggcacagaccacgtggaggtggcctggaggagaaatgaccccggggccaagttcaccatcatcgacagcctgagcctgagcctcttcaccaatgagaccttcctgcagatggatgaggtgggccacatcccccagacagctgccagccacgtggacagcagcaatgccctgcccagagatgagcagcccccagctgacatgctgcggccagacccccgggacaccctgtacagagtgcccctcatccccaagagccacctgcggcacgtgctgcctgactgcccctacaagcccagctacctggtggatggcctgcccctgcagcgctaccagggcctgcgctttgtgcacctgagctttgtgtacccaaatgactacacccggctgagccacatggagacccacaacaagtgcttctaccaggagaatgcctactaccaggaccgcttctccttccaggagtacatcaagattgaccagcctgagaagcagggcctggagcagcccggctttgaggagaacctgctggaggagagccagtatggagaggtggccgaggagaccccagccagcaacaaccagaatgccaggatgctggagggccggcagaccccagccagcaccctggagcaggatgccacagactaccgcctgcggagcctgaggaagctgctggcccagccccgggagggcctgctggcccccttcagcaagaggaacagcacagccagcttccctggccgcaccagccacatccctgtgcagcagcctgagaagaggaagcagaagcccagccctgagcccagccaggacagcccccacagcgacaagtggcccccaggccaccctgtgaagaacctgccccagatgaggggcccccggcccaggcctgctggggacagccccaggaagacccagtggctgaaccaggtggagagctacatcgccgagcagaggagaggagacaggatgaggccccaggcccctggccggggctggcacggggaggaggaggtggtggccgctgctggccaggagggccaggtggagggggaggaggagggggaggaggaggaggaggaggaggacatgtctgaggtgtttgaatatgtgcctgtgtttgatcctgtggtgaactgggaccagaccttcagcgccaggaacctggacttccaggccctgaggacagactggattgacctgagctgcaacaccagcggcaacctgctgctgcctgagcaggaggccctggaggtgaccagggtcttcctgaagaagctgaaccagaggagccggggccgctaccagctgcagagaattgtgaatgtggagaagaggcaggaccagctgcggggcggccgctacctgctggagctggagctgctggagcagggccagagggtggtgcggctgtctgaatatgtgtctgcccggggctggcagggcattgatcctgctggaggagaggaggtggaggccaggaacctgcagggcctggtgtgggacccccacaacagaagacggcaggtgctgaacacccgggcccaggagcccaagctgtgctggccccagggcttctcctggagccacagagctgtggtgcactttgtggtgcctgtgaagaaccaggcccgctgggtgcagcagttcatcaaggacatggagaacctcttccaggtgactggagacccccacttcaacatcgtcatcacagactacagcagcgaggacatggatgtggagatggccctgaagaggagcaagctgcggagctaccagtatgtgaagctgagcggcaactttgagaggtctgctggcctgcaggccggcatcgacctggtgaaggacccccacagcatcatcttcctgtgtgacctgcacatccacttccctgctggggtgattgatgccatcaggaagcactgtgtggagggcaagatggcctttgcccccatggtgatgaggctgcactgtggggccaccccccagtggccagagggctactgggaggtgaatggcttcggcctgctgggcatctacaagagtgacctggacagaattggaggcatgaacaccaaggagttccgggaccgctggggcggggaggactgggagctgctggaccgcatcctgcaggccggcctggatgtggagcggctgagcctgaggaacttcttccaccacttccacagcaagaggggcatgtggagccggcggcagatgaagaccctgtag

SEQ ID NO: 145157 - DNA, 306 bp, synthetic construct
  misc_feature 1..306: note = Description of Artificial Sequence: Synthetic coding sequence
  source 1..306: mol_type = other DNA
atgagccgctctgtggccctggccgtgctggccctgctgagcctgagcggcctggaggccatccagaggacccccaagatccaggtgtacagccgccacccagcagaaaatggcaagagcaacttcctgaactgctacgtgtctggcttccaccccagcgacatcgaggtggacctgctgaagaatggagagcgcatcgagaaggtggagcacagcgacctgtccttcagcaaggactggagcttctacctgctgtactacacagagttcacccccacagagaagatgtccatgcctgctgtgtag

SEQ ID NO: 145158 - DNA, 369 bp, synthetic construct
  misc_feature 1..369: note = Description of Artificial Sequence: Synthetic coding sequence
  source 1..369: mol_type = other DNA
atgagccgctctgtggccctggccgtgctggccctgctgagcctgagcggcctggaggccatccagaggacccccaagatccaggtgtacagccgccacccagcagaaaatggcaagagcaacttcctgaactgctacgtgtctggcttccaccccagcgacatcgaggtggacctgctgaagaatggagagcgcatcgagaaggtggagcacagcgacctgtccttcagcaaggactggagcttctacctgctgtactacacagagttcacccccacagagaaggatgaatatgcctgccgggtgaaccacgtgaccctgagccagcccaagatcgtgaagtggggcaagagctacatcctgctgtag

SEQ ID NO: 145159 - DNA, 360 bp, synthetic construct
  misc_feature 1..360: note = Description of Artificial Sequence: Synthetic coding sequence
  source 1..360: mol_type = other DNA
atgagccgctctgtggccctggccgtgctggccctgctgagcctgagcggcctggaggccatccagaggacccccaagatccaggtgtacagccgccacccagcagaaaatggcaagagcaacttcctgaactgctacgtgtctggcttccaccccagcgacatcgaggtggacctgctgaagaatggagagcgcatcgagaaggtggagcacagcgacctgtccttcagcaaggactggagcttctacctgctgtactacacagagttcacccccacagagaaggatgaatatgcctgccgggtgaaccacgtgaccctgagccagcccaagatcgtgaagtgggaccgggacatgtag

SEQ ID NO: 145160 - DNA, 369 bp, synthetic construct; identical to SEQ ID NO: 145158
  misc_feature 1..369: note = Description of Artificial Sequence: Synthetic coding sequence
  source 1..369: mol_type = other DNA

SEQ ID NO: 145161 - DNA, 360 bp, synthetic construct; identical to SEQ ID NO: 145159
  misc_feature 1..360: note = Description of Artificial Sequence: Synthetic coding sequence
  source 1..360: mol_type = other DNA

SEQ ID NO: 145162 - DNA, 360 bp, synthetic construct; identical to SEQ ID NO: 145159
  misc_feature 1..360: note = Description of Artificial Sequence: Synthetic coding sequence
  source 1..360: mol_type = other DNA

SEQ ID NO: 145163 - DNA, 1644 bp, synthetic construct
  misc_feature 1..1644: note = Description of Artificial Sequence: Synthetic coding sequence
  source 1..1644: mol_type = other DNA
atggacatcatctttggaagaaacaggaaggagcagctggagcctgtgcgggccaaggtgacaggcaagatcccagcctggctgcagggcaccctgctgagaaatggacctggcatgcacacagtgggggagagccgctacaaccactggtttgatggcctggccctgctgcacagcttcaccatcagagatggagaggtgtactaccgcagcaagtacctgcggagtgacacctacaacaccaacatcgaggccaaccgcatcgtggtgtctgaatttggcaccatggcctacccagacccctgcaagaacatcttcagcaaggccttctcctacctgagccacaccatcccagacttcacagacaactgcctgatcaacatcatgaagtgtggggaggacttctacgccaccagcgagaccaactacatcaggaagatcaacccccagaccctggagaccctggagaaggtggactacagaaaatatgtggccgtgaacctggccaccagccacccccactatgatgaggccggaaatgtgctgaacatgggcaccagcatcgtggagaagggcaagaccaagtatgtgatcttcaagatcccagccaccgtgcctgagggcaagaagcagggcaagagcccctggaagcacacagaggtgttctgcagcatccccagccgcagcctgctgagccccagctactaccacagctttggagtgacagaaaattatgtgatcttcctggagcagcccttccggctggacatcctgaagatggccacagcctacatccggaggatgtcctgggccagctgcctggccttccaccgggaggagaagacctacatccacatcatcgaccagaggacccggcagcctgtgcagaccaagttctacacagatgccatggtggtgttccaccacgtgaatgcctatgaagaagatggctgcatcgtgtttgatgtgattgcctatgaggacaacagcctgtaccagctgttctacctggccaacctgaaccaggacttcaaggagaacagccggctgacctctgtgcccaccctgcggagatttgctgtgcccctgcacgtggacaagaatgctgaggtgggcaccaacctgatcaaggtggccagcaccacagccacagccctgaaggaggaggatggccaggtgtactgccagcctgagttcctgtatgagggcctggagctgccccgggtgaactatgcccacaacgggaagcagtaccgctacgtgtttgccaccggggtgcagtggagccccatccccaccaagatcatcaagtatgacatcctgaccaagagcagcctgaagtggagagaagatgactgctggccagctgagcccctgtttgtgcctgcccctggggccaaggatgaagatgatggagtcatcctgagcgccatcgtgtccacagacccccagaagctgcccttcctgctgatcctggatgccaagagcttcacagagctggcccgggcctctgtggatgtggacatgcacatggacctgcacggcctcttcatcacagacatggactgggacaccaagaagcaggccgccagcgaggagcagagggaccgggccagtgactgccacggggcccccctgacctag

SEQ ID NO: 145164 - DNA, 1437 bp, synthetic construct
  misc_feature 1..1437: note = Description of Artificial Sequence: Synthetic coding sequence
  source 1..1437: mol_type = other DNA
atggctgctggcaacccagccccccagtgggcctgggatgcccacagctggggcgtgcagatccagcccctggtgcggcggccctgcccagccccccagctgcaccaccagaggcgggccttctcctacctgagccacaccatcccagacttcacagacaactgcctgatcaacatcatgaagtgtggggaggacttctacgccaccagcgagaccaactacatcaggaagatcaacccccagaccctggagaccctggagaaggtggactacagaaaatatgtggccgtgaacctggccaccagccacccccactatgatgaagctggaaatgtgctgaacatgggcaccagcatcgtggagaagggcaagaccaagtatgtgatcttcaagatcccagccaccgtgcctgagggcaagaagcagggcaagagcccctggaagcacacagaggtgttctgcagcatccccagccgcagcctgctgagccccagctactaccacagctttggagtgacagagaactacgtgatcttcctggagcagcccttccggctggacatcctgaagatggccacagcctacatccggaggatgtcctgggccagctgcctggccttccaccgggaggagaagacctacatccacatcatcgaccagaggacccggcagcctgtgcagaccaagttctacacagatgccatggtggtgttccaccacgtgaatgcctatgaggaggatggctgcatcgtgtttgatgtgattgcctatgaggacaacagcctgtaccagctgttctacctggccaacctgaaccaggacttcaaggagaacagccggctgacctctgtgcccaccctgcggagatttgctgtgcccctgcacgtggacaagaatgctgaggtgggcaccaacctgatcaaggtggccagcaccacagccacagccctgaaggaggaggatggccaggtgtactgccagcctgagttcctgtatgagggcctggagctgccccgggtgaactatgcccacaacgggaagcagtaccgctacgtgtttgccactggagtgcagtggagccccatccccaccaagatcatcaagtatgacatcctgaccaagagcagcctgaagtggagagaagatgactgctggccagctgagcccctgtttgtgcctgcccctggggccaaggatgaagatgatggagtcatcctgagcgccatcgtgtccacagacccccagaagctgcccttcctgctgatcctggatgccaagagcttcacagagctggcccgggcctctgtggatgtggacatgcacatggacctgcacggcctcttcatcacagacatggactgggacaccaagaagcaggccgccagcgaggagcagagggaccgggccagtgactgccacggggcccccctgacctag

SEQ ID NO: 145165 - DNA, 1740 bp, synthetic construct
  misc_feature 1..1740: note = Description of Artificial Sequence: Synthetic coding sequence
  source 1..1740: mol_type = other DNA
atgttcttccgggtcttcctgcacttcatccgcagccacagcgccacagctgtggacttcctgcctgtgatggtgcaccggctgcctgtgttcaagcgctacatgggcaacaccccccagaagaaggctgtgtttggccagtgccggggcctgccctgtgtggcccccctgctgaccaccgtggaggaggccccccggggcatcagcgcccgggtgtggggccacttccccaagtggctgaatggcagcctgctgagaattggccctgggaagtttgaatttgggaaggacaagtacaaccactggtttgatggcatggccctgctgcaccagttcaggatggccaagggcaccgtgacctaccgcagcaagttcctgcagagcgacacctacaaggccaacagcgccaagaaccgcatcgtcatcagcgagtttggcaccctggccctgcctgacccctgcaagaatgtgtttgagcgcttcatgagcagatttgagctgcccgggaaggccgccgccatgacagacaacaccaacgtgaactacgtgcgctacaagggggactactacctgtgcacagagaccaacttcatgaacaaggtggacatcgagaccctggagaagacagagaaggtggactggagcaagttcatcgctgtgaatggagccacagcccacccccactatgacctggatggaacagcctacaacatgggcaacagctttggcccctacggcttctcctacaaggtgatccgggtgcccccagagaaggtggacctgggggagaccatccacggcgtgcaggtgatctgcagcatcgccagcacagagaagggcaagcccagctactaccacagctttggcatgaccaggaactacatcatcttcatcgagcagcccctgaagatgaacctgtggaagatcgccaccagcaagatccggggcaaggccttcagtgatggcatctcctgggagccccagtgcaacacccgcttccacgtggtggagaagaggacaggccagctgctgcccggccgctactacagcaagccctttgtgaccttccaccagatcaatgcctttgaggaccagggctgtgtgatcatcgacctgtgctgccaggacaatggaagaaccctggaggtgtaccagctgcagaacctgaggaaggccggggagggcctggaccaggtgcacaacagcgctgccaagagcttccccaggagatttgtgctgcccctgaatgtgtccctgaatgcccctgagggggacaacctgagccccctgagctacaccagcgccagcgctgtgaagcaggctgatggcaccatctggtgcagccatgagaacctgcaccaggaggacctggagaaggagggcggcatcgagttcccccagatctactatgaccgcttcagcggcaagaagtaccacttcttctacggctgcggcttccgccacctggtgggggacagcctcatcaaggtggatgtggtgaacaagaccctgaaggtgtggagagaagatggcttctaccccagcgagcctgtgtttgtgcctgcccctggcaccaatgaggaggatggaggagtcatcctgtctgtggtgatcacccccaaccagaatgaaagcaacttcatcctggtgctggatgccaagaactttgaggagctgggccgggcagaggtgcctgtgcagatgccctacggcttccacggcaccttcatccccatctag

SEQ ID NO: 145166 - DNA, 1638 bp, synthetic construct
  misc_feature 1..1638: note = Description of Artificial Sequence: Synthetic coding sequence
  source 1..1638: mol_type = other DNA
atgggcaacaccccccagaagaaggctgtgtttggccagtgccggggcctgccctgtgtggcccccctgctgaccaccgtggaggaggccccccggggcatcagcgcccgggtgtggggccacttccccaagtggctgaatggcagcctgctgagaattggccctgggaagtttgaatttgggaaggacaagtacaaccactggtttgatggcatggccctgctgcaccagttcaggatggccaagggcaccgtgacctaccgcagcaagttcctgcagagcgacacctacaaggccaacagcgccaagaaccgcatcgtcatcagcgagtttggcaccctggccctgcctgacccctgcaagaatgtgtttgagcgcttcatgagcagatttgagctgcccgggaaggccgccgccatgacagacaacaccaacgtgaactacgtgcgctacaagggggactactacctgtgcacagagaccaacttcatgaacaaggtggacatcgagaccctggagaagacagagaaggtggactggagcaagttcatcgctgtgaatggagccacagcccacccccactatgacctggatggaacagcctacaacatgggcaacagctttggcccctacggcttctcctacaaggtgatccgggtgcccccagagaaggtggacctgggggagaccatccacggcgtgcaggtgatctgcagcatcgccagcacagagaagggcaagcccagctactaccacagctttggcatgaccaggaactacatcatcttcatcgagcagcccctgaagatgaacctgtggaagatcgccaccagcaagatccggggcaaggccttcagtgatggcatctcctgggagccccagtgcaacacccgcttccacgtggtggagaagaggacaggccagctgctgcccggccgctactacagcaagccctttgtgaccttccaccagatcaatgcctttgaggaccagggctgtgtgatcatcgacctgtgctgccaggacaatggaagaaccctggaggtgtaccagctgcagaacctgaggaaggccggggagggcctggaccaggtgcacaacagcgctgccaagagcttccccaggagatttgtgctgcccctgaatgtgtccctgaatgcccctgagggggacaacctgagccccctgagctacaccagcgccagcgctgtgaagcaggctgatggcaccatctggtgcagccatgagaacctgcaccaggaggacctggagaaggagggcggcatcgagttcccccagatctactatgaccgcttcagcggcaagaagtaccacttcttctacggctgcggcttccgccacctggtgggggacagcctcatcaaggtggatgtggtgaacaagaccctgaaggtgtggagagaagatggcttctaccccagcgagcctgtgtttgtgcctgcccctggcaccaatgaggaggatggaggagtcatcctgtctgtggtgatcacccccaaccagaatgaaagcaacttcatcctggtgctggatgccaagaactttgaggagctgggccgggcagaggtgcctgtgcagatgccctacggcttccacggcaccttcatccccatctag

SEQ ID NO: 145167 - DNA, 1638 bp, synthetic construct; identical to SEQ ID NO: 145166
  misc_feature 1..1638: note = Description of Artificial Sequence: Synthetic coding sequence
  source 1..1638: mol_type = other DNA

SEQ ID NO: 145168 - DNA, 1620 bp, synthetic construct
  misc_feature 1..1620: note = Description of Artificial Sequence: Synthetic coding sequence
  source 1..1620: mol_type = other DNA
atgggcaacaccccccagaagaaggctgtgtttggccagtgccggggcctgccctgtgtggcccccctgctgaccaccgtggaggaggccccccggggcatcagcgcccgggtgtggggccacttccccaagtggctgaatggcagcctgctgagaattggccctgggaagtttgaatttgggaaggacaagtacaaccactggtttgatggcatggccctgctgcaccagttcaggatggccaagggcaccgtgacctaccgcagcaagttcctgcagagcgacacctacaaggccaacagcgccaagaaccgcatcgtcatcagcgagtttggcaccctggccctgcctgacccctgcaagaatgtgtttgagcgcttcatgagcagatttgagctgcccgggaaggccgccgccatgacagacaacaccaacgtgaactacgtgcgctacaagggggactactacctgtgcacagagaccaacttcatgaacaaggtggacatcgagaccctggagaagacagagaaggtggactggagcaagttcatcgctgtgaatggagccacagcccacccccactatgacctggatggaacagcctacaacatgggcaacagctttggcccctacggcttctcctacaaggtgatccgggtgcccccagagaaggtggacctgggggagaccatccacggcgtgcaggtgatctgcagcatcgccagcacagagaagggcaagcccagctactaccacagctttggcatgaccaggaactacatcatcttcatcgagcagcccctgaagatgaacctgtggaagatcgccaccagcaagatccggggcaaggccttcagtgatggcatctcctgggagccccagtgcaacacccgcttccacgtggtggagaagaggacaggccagctgctgcccggccgctactacagcaagccctttgtgaccttccaccagatcaatgcctttgaggaccagggctgtgtgatcatcgacctgtgctgccaggacaatggaagaaccctggaggtgtaccagctgcagaacctgaggaaggccggggagggcctggaccaggtgcacaacagcgctgccaagagcttccccaggagatttgtgctgcccctgaatgtgtccctgaatgcccctgagggggacaacctgagccccctgagctacaccagcgccagcgctgtgaagcaggctgatggcaccatctggtgcagccatgagaacctgcaccaggaggacctggagaaggagggcggcatcgagttcccccagatctactatgaccgcttcagcggcaagaagtaccacttcttctacggctgcggcttccgccacctggtgggggacagcctcatcaaggtggatgtggtgtggagagaagatggcttctaccccagcgagcctgtgtttgtgcctgcccctggcaccaatgaggaggatggaggagtcatcctgtctgtggtgatcacccccaaccagaatgaaagcaacttcatcctggtgctggatgccaagaactttgaggagctgggccgggcagaggtgcctgtgcagatgccctacggcttccacggcaccttcatccccatctag

SEQ ID NO: 145169 - DNA, 1638 bp, synthetic construct; identical to SEQ ID NO: 145166
  misc_feature 1..1638: note = Description of Artificial Sequence: Synthetic coding sequence
  source 1..1638: mol_type = other DNA

SEQ ID NO: 145170 - DNA, 1221 bp, synthetic construct
  misc_feature 1..1221: note = Description of Artificial Sequence: Synthetic coding sequence
  source 1..1221: mol_type = other DNA
atgcctcctgtgggcggcaagaaggccaagaagggcatcctggagcggctgaatgctggggagatcgtgattggagatggcggctttgtgtttgccctggagaagaggggctacgtgaaggccggcccctggaccccagaggccgctgtggagcaccctgaggccgtgcggcagctgcaccgggagttcctgcgggccggcagcaatgtgatgcagaccttcaccttctacgccagcgaggacaagctggagaacagaggcaactacgtgctggagaagatcagcggccaggaggtgaatgaggccgcctgtgacatcgcccggcaggtggctgatgaaggagatgccctggtggccggcggcgtgtcccagacccccagctacctgagctgcaagtcagaaacagaggtgaagaaggtgttcctgcagcagctggaggtgttcatgaagaagaatgtggacttcctgattgctgagtactttgaacatgtggaggaggccgtgtgggccgtggagaccctgattgccagcggcaagcctgtggccgccaccatgtgcatcggccctgagggggacctgcacggcgtgcccccaggagaatgtgctgtgcggctggtgaaggccggggccagcatcattggagtgaactgccactttgaccccaccatcagcctgaagacagtgaagctgatgaaggagggcctggaggccgcccggctgaaggcccacctgatgagccagcccctggcctaccacaccccagactgcaacaagcagggcttcatcgacctgcctgagttccccttcggcctggagccccgggtggccacccgctgggacatccagaagtatgcccgggaggcctacaacctgggcgtgcgctacatcggcggctgctgcggctttgagccctaccacatccgggccatcgccgaggagctggcccctgagcggggcttcctgcccccagccagcgagaagcacggctcctggggcagcggcctggacatgcacaccaagccctgggtgcgggcccgggccaggaaggagtactgggagaacctgagaattgccagcggccggccctacaaccccagcatgagcaagccagatggctggggcgtgaccaagggcacagctgagctgatgcagcagaaggaggccaccacagagcagcagctgaaggagctgtttgagaagcagaagttcaagagccagtag

SEQ ID NO: 145171 - DNA, 612 bp, synthetic construct
  misc_feature 1..612: note = Description of Artificial Sequence: Synthetic coding sequence
  source 1..612: mol_type = other DNA
atgcctcctgtgggcggcaagaaggccaagaagggcatcctggagcggctgaatgctggggagatcgtgattggagatggcggctttgtgtttgccctggagaagaggggctacgtgaaggccggcccctggaccccagaggccgctgtggagcaccctgaggccggggccagcatcatcggcgtgaactgccactttgaccccaccatcagcctgaagacagtgaagctgatgaaggagggcctggaggccgcccggctgaaggcccacctgatgagccagcccctggcctaccacaccccagactgcaacaagcagggcttcatcgacctgcctgagttccccttcggcctggagcctgagctgcccccagatggcatcttcaagaacaccccagagcggcccaccacctggggcagcggcaccctggccggggctgtggacctgagccccaccaccagcggccagctgcagaggtcctggccccagaagggggccttctgccaccagctgcagaagaacatggctgctggggaggtggtgtggacctgcacccccaaccctggcctggagcagggccctggcaggaacacaggccgcatcttcggctag

SEQ ID NO: 145172 - DNA, 1092 bp, synthetic construct
  misc_feature 1..1092: note = Description of Artificial Sequence: Synthetic coding sequence
  source 1..1092: mol_type = other DNA
atggccccagctggccggcctggggccaagaagggcatcctggagcggctggagagcggggaggtggtgattggagatggcagcttcctgatcaccctggagaagaggggctacgtgaaggccggcctgtggaccccagaggccgtcatcgagcacccagatgctgtgcggcagctgcacatggagttcctgcgggccggcagcaatgtgatgcagaccttcaccttcagcgccagcgaggacaacatggagagcaagtgggaggatgtgaatgctgctgcctgtgacctggcccgggaggtggccgggaaaggagatgccctggtggccggcggcatctgccagaccagcatctacaagtaccagaaggatgaggcccgcatcaagaagctgttccggcagcagctggaggtgtttgcctggaagaatgtggacttcctgattgctgagtactttgagcacgtggaggaggccgtgtgggccgtggaggtgctgaaggagagtgacaggcctgtggccgtgaccatgtgcatcggccctgagggggacatgcatgacatcaccccaggagaatgtgctgtgcggctggtgaaggccggggccagcatcgtgggcgtgaactgccgcttcggccctgacaccagcctgaagaccatggagctgatgaaggagggcctggagtgggccggcctgaaggcccacctgatggtgcagcccctgggcttccacgccccagactgtgggaaggagggctttgtggacctgcctgagtaccccttcggcctggagagccgggtggccacccgctgggacatccagaagtatgcccgggaggcctacaacctgggcgtgcgctacatcggcggctgctgcggctttgagccctaccacatccgggccatcgccgaggagctggcccctgagcggggcttcctgcccccagccagcgagaagcacggctcctggggcagcggcctggacatgcacaccaagccctggatccgggcccgggcccggcgggagtactgggagaacctgctgcctgccagcggccggcccttctgccccagcctgagcaagccagacttctag

SEQ ID NO: 145173 - DNA, 900 bp, synthetic construct
  misc_feature 1..900: note = Description of Artificial Sequence: Synthetic coding sequence
  source 1..900: mol_type = other DNA
atggccccagctggccggcctggggccaagaagggcatcctggagcggctggagagcggggaggtggtgattggagatggcagcttcctgatcaccctggagaagaggggctacgtgaaggccggcctgtggaccccagaggccgtcatcgagcacccagatgctgtgcggcagctgcacatggagttcctgcgggccggcagcaatgtgatgcagaccttcaccttcagcgccagcgaggacaacatggagagcaagtactttgagcacgtggaggaggccgtgtgggccgtggaggtgctgaaggagagtgacaggcctgtggccgtgaccatgtgcatcggccctgagggggacatgcatgacatcaccccaggagaatgtgctgtgcggctggtgaaggccggggccagcatcgtgggcgtgaactgccgcttcggccctgacaccagcctgaagaccatggagctgatgaaggagggcctggagtgggccggcctgaaggcccacctgatggtgcagcccctgggcttccacgccccagactgtgggaaggagggctttgtggacctgcctgagtaccccttcggcctggagagccgggtggccacccgctgggacatccagaagtatgcccgggaggcctacaacctgggcgtgcgctacatcggcggctgctgcggctttgagccctaccacatccgggccatcgccgaggagctggcccctgagcggggcttcctgcccccagccagcgagaagcacggctcctggggcagcggcctggacatgcacaccaagccctggatccgggcccgggcccggcgggagtactgggagaacctgctgcctgccagcggccggcccttctgccccagcctgagcaagccagacttctag

SEQ ID NO: 145174 - DNA, 639 bp, synthetic construct
  misc_feature 1..639: note = Description of Artificial Sequence: Synthetic coding sequence
  source 1..639: mol_type = other DNA
atgatcattggaggcatcgaccacagcctgtacacaggcagcctgtggtacacccccatcagaagagagtggtactatgaggtgatcatcgtgcgggtggagatcaatggccaggacctgaagatggactgcaaggagtacaactatgacaagagcatcgtggacagcggcaccaccaacctgcggctgcccaagaaggtgtttgaggccgctgtgaagagcatcaaggccgccagcagcacagagaagttcccagatggcttctggctgggggagcagctggtgtgctggcaggccggcaccaccccctggaacatcttccctgtgatcagcctgtacctgatgggagaggtgaccaaccagagcttccgcatcaccatcctgccccagcagtacctgcgctggaagatgtggccccggcccaagaccaccgtgacctgccacctgaccgtcatccacggccactgctacggcagctgctaccacggcggcctgctgctgagcctcatcggcccagaaaatgagctggccctgctgagcgccctggccatgtgcaccatgagcagcggccggcagcgctggaaggcctgccacctgggccacggccgcctgtggctgcagcacagcacagacagatag

SEQ ID NO: 145175 - DNA, 1506 bp, synthetic construct
  misc_feature 1..1506: note = Description of Artificial Sequence: Synthetic coding sequence
  source 1..1506: mol_type = other DNA
atggcccaggccctgccctggctgctgctgtggatgggcgctggggtgctgcctgcccacggcacccagcacggcatccggctgcccctgcggagcggcctgggcggggcccccctgggcctgcggctgccccgggagacagatgaggagcctgaggagcccggccggcggggcagctttgtggagatggtggacaacctgcggggcaagagcggccagggctactacgtggagatgacagtgggcagccccccccagaccctgaacatcctggtggacaccggcagcagcaactttgctgtgggcgccgccccccaccccttcctgcaccgctactaccagaggcagctgagcagcacctacagagacctgaggaagggcgtgtatgtgccctacacccagggcaagtgggagggggagctgggcacagacctggtgtccatcccccacggccccaacgtgacagtgcgggccaacattgctgccatcacagaaagtgacaagttcttcatcaatggcagcaactgggagggcatcctgggcctggcctatgcagaaattgcccggccagatgacagcctggagcccttctttgacagcctggtgaagcagacccacgtgcccaacctcttcagcctgcagctgtgtggggccggcttccccctgaaccagagcgaggtgctggcctctgtgggcggctccatgatcattggaggcatcgaccacagcctgtacacaggcagcctgtggtacacccccatcagaagagagtggtactatgaggtgatcatcgtgcgggtggagatcaatggccaggacctgaagatggactgcaaggagtacaactatgacaagagcatcgtggacagcggcaccaccaacctgcggctgcccaagaaggtgtttgaggccgctgtgaagagcatcaaggccgccagcagcacagagaagttcccagatggcttctggctgggggagcagctggtgtgctggcaggccggcaccaccccctggaacatcttccctgtgatcagcctgtacctgatgggagaggtgaccaaccagagcttccgcatcaccatcctgccccagcagtacctgcggcctgtggaggatgtggccaccagccaggatgactgctacaagtttgccatcagccagagcagcacaggcaccgtgatgggcgccgtcatcatggagggcttctacgtggtgtttgaccgggccaggaagagaattggatttgctgtgtctgcctgccacgtgcatgatgagttcagaacagctgctgtggagggcccctttgtgaccctggacatggaggactgtggctacaacatcccccagacagatgagagcaccctgatgaccatcgcctacgtgatggccgccatctgtgccctcttcatgctgcccctgtgcctgatggtgtgccagtggtgctgcctgcgctgcctgcggcagcagcatgatgactttgctgatgacatcagcctgctgaagtag

SEQ ID NO: 145176 - DNA, 1299 bp, synthetic construct
  misc_feature 1..1299: note = Description of Artificial Sequence: Synthetic coding sequence
  source 1..1299: mol_type = other DNA
atggcccaggccctgccctggctgctgctgtggatgggcgctggggtgctgcctgcccacggcacccagcacggcatccggctgcccctgcggagcggcctgggcggggcccccctgggcctgcggctgccccgggagacagatgaggagcctgaggagcccggccggcggggcagctttgtggagatggtggacaacctgcggggcaagagcggccagggctactacgtggagatgacagtgggcagccccccccagaccctgaacatcctggtggacaccggcagcagcaactttgctgtgggcgccgccccccaccccttcctgcaccgctactaccagaggcagctgagcagcacctacagagacctgaggaagggcgtgtatgtgccctacacccagggcaagtgggagggggagctgggcacagacctgctgtgtggggccggcttccccctgaaccagagcgaggtgctggcctctgtgggcggctccatgatcatcggcggcatcgaccacagcctgtacacaggcagcctgtggtacacccccatccggcgggagtggtactatgaagtcatcatcgtgcgggtggagatcaatggccaggacctgaagatggactgcaaggagtacaactatgacaagagcatcgtggacagcggcaccaccaacctgcggctgcccaagaaggtgtttgaagctgctgtgaagagcatcaaggccgccagcagcacagagaagttcccagatggcttctggctgggggagcagctggtgtgctggcaggccggcaccaccccctggaacatcttccctgtgatcagcctgtacctgatgggagaggtgaccaaccagagcttccgcatcaccatcctgccccagcagtacctgcggcctgtggaggatgtggccaccagccaggatgactgctacaagtttgccatcagccagagcagcactggaacagtgatgggcgctgtgatcatggagggcttctacgtggtgtttgaccgggccaggaagagaattggatttgctgtgtctgcctgccacgtgcatgatgagttcagaacagctgctgtggagggcccctttgtgaccctggacatggaggactgtggctacaacatcccccagacagatgagagcaccctgatgaccatcgcctacgtgatggccgccatctgtgccctcttcatgctgcccctgtgcctgatggtgtgccagtggtgctgcctgcgctgcctgcggcagcagcatgatgactttgctgatgacatcagcctgctgaagtag

SEQ ID NO: 145177 - DNA, 1374 bp, synthetic construct
  misc_feature 1..1374: note = Description of Artificial Sequence: Synthetic coding sequence
  source 1..1374: mol_type = other DNA
atggcccaggccctgccctggctgctgctgtggatgggcgctggggtgctgcctgcccacggcacccagcacggcatccggctgcccctgcggagcggcctgggcggggcccccctgggcctgcggctgccccgggagacagatgaggagcctgaggagcccggccggcggggcagctttgtggagatggtggacaacctgcggggcaagagcggccagggctactacgtggagatgacagtgggcagccccccccagaccctgaacatcctggtggacaccggcagcagcaactttgctgtgggcgccgccccccaccccttcctgcaccgctactaccagaggcagctgagcagcacctacagagacctgaggaagggcgtgtatgtgccctacacccagggcaagtgggagggggagctgggcacagacctgcctgatgacagcctggagcccttctttgacagcctggtgaagcagacccacgtgcccaacctcttcagcctgcagctgtgtggggccggcttccccctgaaccagagcgaggtgctggcctctgtgggcggctccatgatcattggaggcatcgaccacagcctgtacacaggcagcctgtggtacacccccatcagaagagagtggtactatgaggtgatcatcgtgcgggtggagatcaatggccaggacctgaagatggactgcaaggagtacaactatgacaagagcatcgtggacagcggcaccaccaacctgcggctgcccaagaaggtgtttgaggccgctgtgaagagcatcaaggccgccagcagcacagagaagttcccagatggcttctggctgggggagcagctggtgtgctggcaggccggcaccaccccctggaacatcttccctgtgatcagcctgtacctgatgggagaggtgaccaaccagagcttccgcatcaccatcctgccccagcagtacctgcggcctgtggaggatgtggccaccagccaggatgactgctacaagtttgccatcagccagagcagcacaggcaccgtgatgggcgccgtcatcatggagggcttctacgtggtgtttgaccgggccaggaagagaattggatttgctgtgtctgcctgccacgtgcatgatgagttcagaacagctgctgtggagggcccctttgtgaccctggacatggaggactgtggctacaacatcccccagacagatgagagcaccctgatgaccatcgcctacgtgatggccgccatctgtgccctcttcatgctgcccctgtgcctgatggtgtgccagtggtgctgcctgcgctgcctgcggcagcagcatgatgactttgctgatgacatcagcctgctgaagtag

SEQ ID NO: 145178 - DNA, 1431 bp, synthetic construct
  misc_feature 1..1431: note = Description of Artificial Sequence: Synthetic coding sequence
  source 1..1431: mol_type = other DNA
atggcccaggccctgccctggctgctgctgtggatgggcgctggggtgctgcctgcccacggcacccagcacggcatccggctgcccctgcggagcggcctgggcggggcccccctgggcctgcggctgccccgggagacagatgaggagcctgaggagcccggccggcggggcagctttgtggagatggtggacaacctgcggggcaagagcggccagggctactacgtggagatgacagtgggcagccccccccagaccctgaacatcctggtggacaccggcagcagcaactttgctgtgggcgccgccccccaccccttcctgcaccgctactaccagaggcagctgagcagcacctacagagacctgaggaagggcgtgtatgtgccctacacccagggcaagtgggagggggagctgggcacagacctggtgtccatcccccacggccccaacgtgacagtgcgggccaacattgctgccatcacagaaagtgacaagttcttcatcaatggcagcaactgggagggcatcctgggcctggcctatgcagaaattgcccggctgtgtggggccggcttccccctgaaccagagcgaggtgctggcctctgtgggcggctccatgatcatcggcggcatcgaccacagcctgtacacaggcagcctgtggtacacccccatccggcgggagtggtactatgaagtcatcatcgtgcgggtggagatcaatggccaggacctgaagatggactgcaaggagtacaactatgacaagagcatcgtggacagcggcaccaccaacctgcggctgcccaagaaggtgtttgaagctgctgtgaagagcatcaaggccgccagcagcacagagaagttcccagatggcttctggctgggggagcagctggtgtgctggcaggccggcaccaccccctggaacatcttccctgtgatcagcctgtacctgatgggagaggtgaccaaccagagcttccgcatcaccatcctgccccagcagtacctgcggcctgtggaggatgtggccaccagccaggatgactgctacaagtttgccatcagccagagcagcactggaacagtgatgggcgctgtgatcatggagggcttctacgtggtgtttgaccgggccaggaagagaattggatttgctgtgtctgcctgccacgtgcatgatgagttcagaacagctgctgtggagggcccctttgtgaccctggacatggaggactgtggctacaacatcccccagacagatgagagcaccctgatgaccatcgcctacgtgatggccgccatctgtgccctcttcatgctgcccctgtgcctgatggtgtgccagtggtgctgcctgcgctgcctgcggcagcagcatgatgactttgctgatgacatcagcctgctgaagtag

SEQ ID NO: 145179 - DNA, 1131 bp, synthetic construct
  misc_feature 1..1131: note = Description of Artificial Sequence: Synthetic coding sequence
  source 1..1131: mol_type = other DNA
atggtgcccttcatctacctgcaggcccacttcaccctgtgcagcggctggagcagcacctacagagacctgaggaagggcgtgtatgtgccctacacccagggcaagtgggagggggagctgggcacagacctggtgtccatcccccacggccccaacgtgacagtgcgggccaacattgctgccatcacagaaagtgacaagttcttcatcaatggcagcaactgggagggcatcctgggcctggcctatgcagaaattgcccggctgtgtggggccggcttccccctgaaccagagcgaggtgctggcctctgtgggcggctccatgatcatcggcggcatcgaccacagcctgtacacaggcagcctgtggtacacccccatccggcgggagtggtactatgaagtcatcatcgtgcgggtggagatcaatggccaggacctgaagatggactgcaaggagtacaactatgacaagagcatcgtggacagcggcaccaccaacctgcggctgcccaagaaggtgtttgaagctgctgtgaagagcatcaaggccgccagcagcacagagaagttcccagatggcttctggctgggggagcagctggtgtgctggcaggccggcaccaccccctggaacatcttccctgtgatcagcctgtacctgatgggagaggtgaccaaccagagcttccgcatcaccatcctgccccagcagtacctgcggcctgtggaggatgtggccaccagccaggatgactgctacaagtttgccatcagccagagcagcactggaacagtgatgggcgctgtgatcatggagggcttctacgtggtgtttgaccgggccaggaagagaattggatttgctgtgtctgcctgccacgtgcatgatgagttcagaacagctgctgtggagggcccctttgtgaccctggacatggaggactgtggctacaacatcccccagacagatgagagcaccctgatgaccatcgcctacgtgatggccgccatctgtgccctcttcatgctgcccctgtgcctgatggtgtgccagtggtgctgcctgcgctgcctgcggcagcagcatgatgactttgctgatgacatcagcctgctgaagtag

SEQ ID NO: 145180 - DNA, 1191 bp, synthetic construct
  misc_feature 1..1191: note = Description of Artificial Sequence: Synthetic coding sequence
  source 1..1191: mol_type = other DNA
atgggcgccctggcccgggccctgctgctgcccctgctggcccagtggctgctgcgggccgcccctgagctggccccagcccccttcaccctgcccctgcgggtggccgccgccaccaacagagtggtggcccccaccccaggccctggcaccccagctgagagacatgctgatggcctggccctggccctggagcccgccctggccagccctgctggggccgccaacttcctggccatggtggacaacctgcagggcgacagcggccggggctactacctggagatgctgattggcaccccaccccagaagctgcagatcctggtggacaccggcagcagcaactttgctgtggccggcaccccccacagctacatcgacacctactttgacacagagaggagcagcacctaccgcagcaaaggatttgatgtgacagtgaagtacacccagggctcctggacaggctttgtgggggaggacctggtgaccatccccaagggcttcaacaccagcttcctggtgaacatcgccaccatctttgaaagtgagaacttcttcctgcccggcatcaagtggaatggcatcctgggcctggcctatgccaccctggccaagcccagcagcagcctggagaccttctttgacagcctggtgacccaggccaacatccccaacgtgttctccatgcagatgtgtggggccggcctgcctgtggccggcagcggcaccaatggaggcagcctggtgctgggcggcatcgagcccagcctgtacaagggggacatctggtacacccccatcaaggaggagtggtactaccagatcgagatcctgaagctggagattggaggccagagcctgaacctggactgccgggagtacaatgctgacaaggccatcgtggacagcggcaccaccctgctgcggctgccccagaaggtgtttgatgctgtggtggaggccgtggcccgggccagcctcatccctgagttcagtgatggcttctggacaggcagccagctggcctgctggaccaacagcgagaccccctggagctacttccccaagatcagcatctacctgagagatgagaacagcagccgctccttccgcatcaccatcctgccccagaagctgcaggtgctgcagtgcctgaagtttcctggcctgagccagcagaggatgtag

SEQ ID NO: 145181 - DNA, 1557 bp, synthetic construct
  misc_feature 1..1557: note = Description of Artificial Sequence: Synthetic coding sequence
  source 1..1557: mol_type = other DNA
atgggcgccctggcccgggccctgctgctgcccctgctggcccagtggctgctgcgggccgcccctgagctggccccagcccccttcaccctgcccctgcgggtggccgccgccaccaacagagtggtggcccccaccccaggccctggcaccccagctgagagacatgctgatggcctggccctggccctggagcccgccctggccagccctgctggggccgccaacttcctggccatggtggacaacctgcagggcgacagcggccggggctactacctggagatgctgattggcaccccaccccagaagctgcagatcctggtggacaccggcagcagcaactttgctgtggccggcaccccccacagctacatcgacacctactttgacacagagaggagcagcacctaccgcagcaaaggatttgatgtgacagtgaagtacacccagggctcctggacaggctttgtgggggaggacctggtgaccatccccaagggcttcaacaccagcttcctggtgaacatcgccaccatctttgaaagtgagaacttcttcctgcccggcatcaagtggaatggcatcctgggcctggcctatgccaccctggccaagcccagcagcagcctggagaccttctttgacagcctggtgacccaggccaacatccccaacgtgttctccatgcagatgtgtggggccggcctgcctgtggccggcagcggcaccaatggaggcagcctggtgctgggcggcatcgagcccagcctgtacaagggggacatctggtacacccccatcaaggaggagtggtactaccagatcgagatcctgaagctggagattggaggccagagcctgaacctggactgccgggagtacaatgctgacaaggccatcgtggacagcggcaccaccctgctgcggctgccccagaaggtgtttgatgctgtggtggaggccgtggcccgggccagcctcatccctgagttcagtgatggcttctggacaggcagccagctggcctgctggaccaacagcgagaccccctggagctacttccccaagatcagcatctacctgagagatgagaacagcagccgctccttccgcatcaccatcctgccccagctgtacatccagcccatgatgggcgccggcctgaactatgagtgctaccgcttcggcatcagccccagcaccaatgccctggtgattggagccaccgtgatggagggcttctacgtgatctttgaccgggcccagaagagggtgggctttgctgccagcccctgtgccgagattgctggagctgctgtgtctgagatcagcggccccttcagcacagaagatgtggccagcaactgtgtgcctgcccagagcctgtctgagcccatcctgtggatcgtgtcctatgccctgatgtctgtgtgtggggccatcctgctggtgctgattgtgctgctgctgctgcccttccgctgccagaggcggccccgggaccctgaggtggtgaatgatgagagcagcctggtgcgccaccgctggaagtag

SEQ ID NO: 145182 - DNA, 1407 bp, synthetic construct
  misc_feature 1..1407: note = Description of Artificial Sequence: Synthetic coding sequence
  source 1..1407: mol_type = other DNA
atgggcgccctggcccgggccctgctgctgcccctgctggcccagtggctgctgcgggccgcccctgagctggccccagcccccttcaccctgcccctgcgggtggccgccgccaccaacagagtggtggcccccaccccaggccctggcaccccagctgagagacatgctgatggcctggccctggccctggagcccgccctggccagccctgctggggccgccaacttcctggccatggtggacaacctgcagggcgacagcggccggggctactacctggagatgctgattggcaccccaccccagaagctgcagatcctggtggacaccggcagcagcaactttgctgtggccggcaccccccacagctacatcgacacctactttgacacagagaggagcagcacctaccgcagcaaaggatttgatgtgacagtgaagtacacccagggctcctggacaggctttgtgggggaggacctggtgaccatccccaagggcttcaacaccagcttcctggtgaacatcgccaccatctttgaaagtgagaacttcttcctgcccggcatcaagtggaatggcatcctgggcctggcctatgccaccctggccaagcccagcagcagcctggagaccttctttgacagcctggtgacccaggccaacatccccaacgtgttctccatgcagatgtgtggggccggcctgcctgtggccggcagcggcaccaatggaggcagcctggtgctgggcggcatcgagcccagcctgtacaagggggacatctggtacacccccatcaaggaggagtggtactaccagatcgagatcctgaagctggagattggaggccagagcctgaacctggactgccgggagtacaatgctgacaaggccatcgtggacagcggcaccaccctgctgcggctgccccagaaggtgtttgatgctgtggtggaggccgtggcccgggccagcctgctgtacatccagcccatgatgggcgccggcctgaactatgagtgctaccgcttcggcatcagccccagcaccaatgccctggtgattggagccaccgtgatggagggcttctacgtgatctttgaccgggcccagaagagggtgggctttgctgccagcccctgtgccgagattgctggagctgctgtgtctgagatcagcggccccttcagcacagaagatgtggccagcaactgtgtgcctgcccagagcctgtctgagcccatcctgtggatcgtgtcctatgccctgatgtctgtgtgtggggccatcctgctggtgctgattgtgctgctgctgctgcccttccgctgccagaggcggccccgggaccctgaggtggtgaatgatgagagcagcctggtgcgccaccgctggaagtag

SEQ ID NO: 145183 - DNA, 1272 bp, synthetic construct
  misc_feature 1..1272: note = Description of Artificial Sequence: Synthetic coding sequence
  source 1..1272: mol_type = other DNA
atgctgattggcaccccaccccagaagctgcagatcctggtggacaccggcagcagcaactttgctgtggccggcaccccccacagctacatcgacacctactttgacacagagaggagcagcacctaccgcagcaagggctttgatgtgacagtgaagtacacccagggctcctggacaggctttgtgggggaggacctggtgaccatccccaagggcttcaacaccagcttcctggtgaacatcgccaccatctttgaaagtgagaacttcttcctgcccggcatcaagtggaatggcatcctgggcctggcctatgccaccctggccaagcccagcagcagcctggagaccttctttgacagcctggtgacccaggccaacatccccaacgtgttctccatgcagatgtgtggggccggcctgcctgtggccggcagcggcaccaacggcggcagcctggtgctgggcggcatcgagcccagcctgtacaagggggacatctggtacacccccatcaaggaggagtggtactaccagatcgagatcctgaagctggagatcggcggccagagcctgaacctggactgccgggagtacaatgctgacaaggccatcgtggacagcggcaccaccctgctgcggctgccccagaaggtgtttgatgctgtggtggaggccgtggcccgggccagcctcatccctgagttcagtgatggcttctggacaggcagccagctggcctgctggaccaacagcgagaccccctggagctacttccccaagatcagcatctacctgagagatgagaacagcagccgctccttccgcatcaccatcctgccccagctgtacatccagcccatgatgggcgccggcctgaactatgagtgctacagatttggcatcagccccagcaccaatgccctggtgattggagccaccgtgatggagggcttctacgtgatctttgaccgggcccagaagagggtgggctttgctgccagcccctgtgccgagattgctggagctgctgtgtctgagatcagcggccccttcagcacagaagatgtggccagcaactgtgtgcctgcccagagcctgtctgagcccatcctgtggatcgtgtcctatgccctgatgtctgtgtgtggggccatcctgctggtgctgattgtgctgctgctgctgcccttccgctgccagaggcggccccgggaccctgaggtggtgaatgatgagagcagcctggtgcgccaccgctggaagtag

SEQ ID NO: 145184 - DNA, 576 bp, synthetic construct
  misc_feature 1..576: note = Description of Artificial Sequence: Synthetic coding sequence
  source 1..576: mol_type = other DNA
atgcccaggagcctgtggctgggctgcagcagcctggccgacagcatgcccagcctgcgctgcctgtacaaccctggcactggagccctgacagccttccagaacagcagcgagcgggaggactgcaacaacggggagccccccaggaagatcatccctgagaagaacagcctgcggcagacctacaacagctgtgcccggctgtgcctgaaccaggagaccgtgtgcctggccagcacagccatgaagacagagaactgtgtggccaagaccaagctggccaacggcaccagctccatgattgtgcccaagcagaggaagctgagcgccagctatgagaaggagaaggagctgtgtgtgaagtactttgagcagtggagcgagagtgaccaggtggagtttgtggagcacctgatcagccagatgtgccactaccagcacggccacatcaacagctacctgaagcccatgctgcagagggacttcatcacagccctgcctgcccggggcctggaccacatcgccgagaacatcctgagctacctggatgccaagagcctgtgtgccgctgagtag

SEQ ID NO: 145185 - DNA, 1818 bp, synthetic construct
  misc_feature 1..1818: note = Description of Artificial Sequence: Synthetic coding sequence
  source 1..1818: mol_type = other DNA
atggaccctgctgaggccgtgctgcaggagaaggccctgaagttcatgtgcagcatgcccaggagcctgtggctgggctgcagcagcctggccgacagcatgcccagcctgcgctgcctgtacaaccctggcactggagccctgacagccttccagaacagcagcgagcgggaggactgcaacaacggggagccccccaggaagatcatccctgagaagaacagcctgcggcagacctacaacagctgtgcccggctgtgcctgaaccaggagaccgtgtgcctggccagcacagccatgaagacagagaactgtgtggccaagaccaagctggccaacggcaccagctccatgattgtgcccaagcagaggaagctgagcgccagctatgagaaggagaaggagctgtgtgtgaagtactttgagcagtggagcgagagtgaccaggtggagtttgtggagcacctgatcagccagatgtgccactaccagcacggccacatcaacagctacctgaagcccatgctgcagagggacttcatcacagccctgcctgcccggggcctggaccacatcgccgagaacatcctgagctacctggatgccaagagcctgtgtgccgctgagctggtgtgcaaggagtggtacagagtgaccagtgatggcatgctgtggaagaagctgattgaaagaatggtgaggacagacagcctgtggaggggcctggccgagcggcggggctggggccagtacctgttcaagaacaagcccccagatggaaatgccccacccaacagcttctaccgggccctgtaccccaagatcatccaggacatcgagaccatcgagagcaactggaggtgtggccgccacagcctgcagaggatccactgccgctctgagaccagcaagggcgtgtactgcctgcagtatgatgaccagaagatcgtgtctggcctgcgggacaacaccatcaagatctgggacaagaacaccctggagtgcaagaggatcctgaccggccacactggatctgtgctgtgcctgcagtatgatgagagggtcatcatcaccggcagcagtgacagcacagtgcgggtgtgggatgtgaacacaggagagatgctgaacaccctcatccaccactgtgaggccgtgctgcacctgcgcttcaacaacggcatgatggtgacctgcagcaaggacaggagcattgctgtgtgggacatggccagccccacagacatcaccctgcggcgggtgctggtgggccacagagctgctgtgaatgtggtggactttgatgacaagtacatcgtgtctgccagcggggacaggaccatcaaggtgtggaacaccagcacctgtgaatttgtgaggaccctgaatggccacaagaggggcatcgcctgcctgcagtacagagaccggctggtggtgtctggcagcagtgacaacaccatccggctgtgggacattgaatgtggggcctgcctgcgggtgctggagggccacgaggagctggtgcgctgcatccgctttgacaacaagagaattgtgtctggggcctatgatggcaagatcaaggtgtgggacctggtggccgccctggacccccgggccccagctggcaccctgtgcctgcggaccctggtggagcacagcggccgggtcttccggctgcagtttgatgagttccagatcgtgagcagcagccatgatgacaccatcctgatctgggacttcctgaatgaccctgctgcccaggccgagccccccaggagccccagcaggacctacacctacatcagcaggtag

SEQ ID NO: 145186 - DNA, 1695 bp, synthetic construct
  misc_feature 1..1695: note = Description of Artificial Sequence: Synthetic coding sequence
  source 1..1695: mol_type = other DNA
atgtgcagcatgcccaggagcctgtggctgggctgcagcagcctggccgacagcatgcccagcctgcgctgcctgtacaaccctggcaccggggccctgacagccttccagacctacaacagctgtgcccggctgtgcctgaaccaggagaccgtgtgcctggccagcacagccatgaagacagagaactgtgtggccaagaccaagctggccaacggcaccagctccatgattgtgcccaagcagaggaagctgagcgccagctatgagaaggagaaggagctgtgtgtgaagtactttgagcagtggagcgagagtgaccaggtggagtttgtggagcacctgatcagccagatgtgccactaccagcacggccacatcaacagctacctgaagcccatgctgcagagggacttcatcacagccctgcctgcccggggcctggaccacatcgccgagaacatcctgagctacctggatgccaagagcctgtgtgccgctgagctggtgtgcaaggagtggtacagagtgaccagtgatggcatgctgtggaagaagctgattgaaagaatggtgaggacagacagcctgtggaggggcctggccgagcggcggggctggggccagtacctgttcaagaacaagcccccagatggaaatgccccacccaacagcttctaccgggccctgtaccccaagatcatccaggacatcgagaccatcgagagcaactggaggtgtggccgccacagcctgcagaggatccactgccgctctgagaccagcaaaggagtgtactgcctgcagtatgatgaccagaagatcgtgtctggcctgcgggacaacaccatcaagatctgggacaagaacaccctggagtgcaagaggatcctgaccggccacacaggctctgtgctgtgcctgcagtatgatgagagggtcatcatcaccggcagcagtgacagcacagtgcgggtgtgggatgtgaacacaggagagatgctgaacaccctcatccaccactgtgaggccgtgctgcacctgcgcttcaacaacggcatgatggtgacctgcagcaaggacaggagcattgctgtgtgggacatggccagccccacagacatcaccctgcggcgggtgctggtgggccacagagctgctgtgaatgtggtggactttgatgacaagtacatcgtgtctgccagcggggacaggaccatcaaggtgtggaacaccagcacctgtgaatttgtgaggaccctgaatggccacaagaggggcatcgcctgcctgcagtacagagaccggctggtggtgtctggcagcagtgacaacaccatccggctgtgggacattgaatgtggggcctgcctgcgggtgctggagggccacgaggagctggtgcgctgcatccgctttgacaacaagagaattgtgtctggggcctatgatggcaagatcaaggtgtgggacctggtggccgccctggacccccgggccccagctggcaccctgtgcctgcggaccctggtggagcacagcggccgggtcttccggctgcagtttgatgagttccagatcgtgagcagcagccatgatgacaccatcctgatctgggacttcctgaatgaccctgctgcccaggccgagcccccaagaagccccagcaggacctacacctacatcagcaggtag

SEQ ID NO: 145187 - DNA, 1710 bp, synthetic construct
  misc_feature 1..1710: note = Description of Artificial Sequence: Synthetic coding sequence
  source 1..1710: mol_type = other DNA
atggaccctgctgaggccgtgctgcaggagaaggccctgaagttcatgaacagcagcgagcgggaggactgcaacaacggggagccccccaggaagatcatccctgagaagaacagcctgcggcagacctacaacagctgtgcccggctgtgcctgaaccaggagaccgtgtgcctggccagcacagccatgaagacagagaactgtgtggccaagaccaagctggccaacggcaccagctccatgattgtgcccaagcagaggaagctgagcgccagctatgagaaggagaaggagctgtgtgtgaagtactttgagcagtggagcgagagtgaccaggtggagtttgtggagcacctgatcagccagatgtgccactaccagcacggccacatcaacagctacctgaagcccatgctgcagagggacttcatcacagccctgcctgcccggggcctggaccacatcgccgagaacatcctgagctacctggatgccaagagcctgtgtgccgctgagctggtgtgcaaggagtggtacagagtgaccagtgatggcatgctgtggaagaagctgattgaaagaatggtgaggacagacagcctgtggaggggcctggccgagcggcggggctggggccagtacctgttcaagaacaagcccccagatggaaatgccccacccaacagcttctaccgggccctgtaccccaagatcatccaggacatcgagaccatcgagagcaactggaggtgtggccgccacagcctgcagaggatccactgccgctctgagaccagcaagggcgtgtactgcctgcagtatgatgaccagaagatcgtgtctggcctgcgggacaacaccatcaagatctgggacaagaacaccctggagtgcaagaggatcctgaccggccacactggatctgtgctgtgcctgcagtatgatgagagggtcatcatcaccggcagcagtgacagcacagtgcgggtgtgggatgtgaacacaggagagatgctgaacaccctcatccaccactgtgaggccgtgctgcacctgcgcttcaacaacggcatgatggtgacctgcagcaaggacaggagcattgctgtgtgggacatggccagccccacagacatcaccctgcggcgggtgctggtgggccacagagctgctgtgaatgtggtggactttgatgacaagtacatcgtgtctgccagcggggacaggaccatcaaggtgtggaacaccagcacctgtgaatttgtgaggaccctgaatggccacaagaggggcatcgcctgcctgcagtacagagaccggctggtggtgtctggcagcagtgacaacaccatccggctgtgggacattgaatgtggggcctgcctgcgggtgctggagggccacgaggagctggtgcgctgcatccgctttgacaacaagagaattgtgtctggggcctatgatggcaagatcaaggtgtgggacctggtggccgccctggacccccgggccccagctggcaccctgtgcctgcggaccctggtggagcacagcggccgggtcttccggctgcagtttgatgagttccagatcgtgagcagcagccatgatgacaccatcctgatctgggacttcctgaatgaccctgctgcccaggccgagccccccaggagccccagcaggacctacacctacatcagcaggtag

SEQ ID NO: 145188 - DNA, 126 bp, synthetic construct
  misc_feature 1..126: note = Description of Artificial Sequence: Synthetic coding sequence
  source 1..126: mol_type = other DNA
atggaccctgctgaggccgtgctgcaggagaaggccctgaagttcatgacctacaacagctgtgcccggctgtgcctgaaccaggagaccgtgtgcctggccagcacagccatgaagacagaatag

SEQ ID NO: 145189 - DNA, 327 bp, synthetic construct
  misc_feature 1..327: note = Description of Artificial Sequence: Synthetic coding sequence
  source 1..327: mol_type = other DNA
atggtgaccctgctgcccatcgagggccaggagatccacttctttgagatcctggagagtgaatgtgtgctgtacacaggctggattgagcgggccagcggcagcagcatctacccagaggccaaggcccggctgcccctggaggccctgctgggcagcaacaaggagcccatgctgcccaaggagaccgtgctgagcctgaagcgctacaacctgggcagcagcgccatgaagagaaatgtgcccggccacgtgctgcagaggcccagctacctgacccgcatccaggtgaccctgctgtgcaacagcagcgctgaggccctgtag

SEQ ID NO: 145190 - DNA, 1521 bp, synthetic construct
  misc_feature 1..1521: note = Description of Artificial Sequence: Synthetic coding sequence
  source 1..1521: mol_type = other DNA
atggagcagctggatgtgttcatcagcatcaagcccaagcccaagcagcccagcaagagcgtcatcgtgaagtctgtggagagaaatgccctgaacatgtatgaggccaggaagtgcctgctgggcctggagagcagcggcgtgaccatcgccaccagccccagccctgccagctgcccagctggcctggcctgccccagcctggacatcctggccagcgctggcctgggcctgaccggcctgggcctgctgggccccaccaccctgagcctgaacaccagcaccacccccaacagcctgctgaatgccctgaacagctctgtgagccccctgcagagccccagcagcggcacccccagccccaccctgtgggccccacccctggccaacaccagcagcgccaccggcttcagcgccatcccccacctgatgatccccagcacagcccaggccaccctgaccaacatcctgctgtctggagtgcccacctacggccacacagcccccagccccccacctggcctgacccctgtggatgtgcacatcaacagcatgcagacagagggcaagaagatctctgctgccctgaatggacatgcccagagcccagacatcaagtatggagccatcagcaccagcagcctgggggagaaggtgctgagcgccaaccacggggaccccagcatccagaccagcggcagcgagcagaccagccccaagagcagccccacagagggctgcaatgatgcctttgtggaggtgggcatgcccaggagccccagccacagcggaaatgctggggacctgaagcagatgatgtgccccagcaaggtgtcctgtgccaagaggcagacagtggagctgctgcagggcaccaagaacagccacctgcacagcacagaccggctgctgagtgaccctgagctgagcgccacagagagccccctggccgacaagaaggcccctggcagcgagagagctgctgagagagctgctgctgcccagcagaacagcgagcgggcccacctggcccccaggagcagctatgtgaacatgcaggcctttgattatgagcagaagaagctgctggccaccaaggccatgctgaagaagcctgtggtgacagaggtgaggacccccaccaacacctggagcggcctgggcttcagcaagtccatgcctgctgagaccatcaaggagctgcggcgggccaaccacgtgtcctacaagcccaccatgaccaccacctatgagggcagctccatgagcctgagccgcagcaacagccgggagcacctgggcggcggcagcgagagtgacaactggagggacagaaatggcatcggccctggcagccacagcgagtttgctgccagcatcggcagccccaagaggaagcagaacaagagcagcgagcgctgtgtgctgtgcaccctgctgggcatcccccggctggagtgtgtgtacctgggctggagcatcacagactgtggcctgagtgacttcaagtgcctggtgtag

SEQ ID NO: 145191 - DNA, 2925 bp, synthetic construct
  misc_feature 1..2925: note = Description of Artificial Sequence: Synthetic coding sequence
  source 1..2925: mol_type = other DNA
atggccgcccagggcgagcccggctacctggccgcccagagcgaccccggcagcaacagcgagaggagcacagacagccctgtgcccggctctgaagatgacctggtggccggggccaccctgcacagccctgagtggagcgaggagcgcttccgggtggacaggaagaagctggaggccatgctgcaggccgctgctgagggcaagggccgcagcggggaggacttcttccagaagatcatggaggagaccaacacccagatcgcctggcccagcaagctgaagatcggggccaagagcaagaaggacccccacatcaaggtgtctgggaagaaggaggatgtgaaggaggccaaggagatgatcatgtctgtgctggacaccaagagcaacagagtgaccctgaagatggatgtgagccacacagagcacagccacgtgattggcaagggcggcaacaacatcaagaaggtgatggaggagaccggctgccacatccacttcccagacagcaacagaaacaaccaggccgagaagagcaaccaggtgtccattgctggccagcctgctggggtggagagcgcccgggtgcgcatccgggagctgctgcccctggtgctgatgtttgagctgcccatcgccggcatcctgcagcctgtgcctgaccccaacagccccagcatccagcacatcagccagacctacaacatctctgtgtccttcaagcagaggagcaggatgtacggggccaccgtgattgtgcggggcagccagaacaacaccagcgctgtgaaggagggcacagccatgctgctggagcacctggccggcagcctggccagcgccatccctgtgtccacccagctggacattgctgcccagcaccacctgttcatgatgggcagaaatggcagcaacatcaagcacatcatgcagaggactggagcccagatccacttcccagaccccagcaacccccagaagaagagcacagtgtacctgcagggcaccatcgagagcgtgtgcctggcccggcagtacctgatgggctgcctgcccctggtgctgatgtttgacatgaaggaggagattgaggtggacccccagttcatcgcccagctgatggagcagctggatgtgttcatcagcatcaagcccaagcccaagcagcccagcaagagcgtcatcgtgaagtctgtggagagaaatgccctgaacatgtatgaggccaggaagtgcctgctgggcctggagagcagcggcgtgaccatcgccaccagccccagccctgccagctgcccagctggcctggcctgccccagcctggacatcctggccagcgctggcctgggcctgaccggcctgggcctgctgggccccaccaccctgagcctgaacaccagcaccacccccaacagcctgctgaatgccctgaacagctctgtgagccccctgcagagccccagcagcggcacccccagccccaccctgtgggccccacccctggccaacaccagcagcgccaccggcttcagcgccatcccccacctgatgatccccagcacagcccaggccaccctgaccaacatcctgctgtctggagtgcccacctacggccacacagcccccagccccccacctggcctgacccctgtggatgtgcacatcaacagcatgcagacagagggcaagaagatctctgctgccctgaatggacatgcccagagcccagacatcaagtatggagccatcagcaccagcagcctgggggagaaggtgctgagcgccaaccacggggaccccagcatccagaccagcggcagcgagcagaccagccccaagagcagccccacagagggctgcaatgatgcctttgtggaggtgggcatgcccaggagccccagccacagcggaaatgctggggacctgaagcagatgatgtgccccagcaaggtgtcctgtgccaagaggcagacagtggagctgctgcagggcaccaagaacagccacctgcacagcacagaccggctgctgagtgaccctgagctgagcgccacagagagccccctggccgacaagaaggcccctggcagcgagagagctgctgagagagctgctgctgcccagcagaacagcgagcgggcccacctggcccccaggagcagctatgtgaacatgcaggcctttgattatgagcagaagaagctgctggccaccaaggccatgctgaagaagcctgtggtgacagaggtgaggacccccaccaacacctggagcggcctgggcttcagcaagtccatgcctgctgagaccatcaaggagctgcggcgggccaaccacgtgtcctacaagcccaccatgaccaccacctatgagggcagctccatgagcctgagccgcagcaacagccgggagcacctgggcggcggcagcgagagtgacaactggagggacagaaatggcatcggccctggcagccacagcgagtttgctgccagcatcggcagccccaagaggaagcagaacaagagcacagagcactacctgagcagcagcaactacatggactgcatcagcagcctgaccggcagcaatggctgcaacctgaacagcagcttcaagggcagtgacctgcctgagctgttcagcaagctgggcctgggcaagtacacagatgtgttccagcagcaggagattgacctgcagaccttcctgaccctgacagaccaggacctgaaggagctgggcatcaccaccttcggggcccggaggaagatgctgctggccatcagcgagctgaacaagaacagaaggaagctgtttgagagccccaatgcccggaccagcttcctggagggcggggccagcggccgcctgccccggcagtaccacagcgacatcgcctctgtgtctggccgctggtag

SEQ ID NO: 145192 - DNA, 2928 bp, synthetic construct
  misc_feature 1..2928: note = Description of Artificial Sequence: Synthetic coding sequence
  source 1..2928: mol_type = other DNA
atggctgctgaggaggtgctgcagacagtggaccactacaagacagaaattgagcggctgaccaaggagctgacagagaccacccatgagaagatccaggccgcagaatatggcctggtggtgctggaggagaagctgaccctgaagcagcagtatgatgagctggaggccgagtatgacagcctgaagcaggagctggagcagctgaaggaggccttcggccagagcttcagcatccacaggaaggtggctgaagatggagagacccgggaggagaccctgctgcaggagagcgccagcaaggaggcctactacctgggcaagatcctggagatgcagaatgagctgaagcagagcagagctgtggtgaccaacgtgcaggctgaaaatgaaaggctgacagctgtggtgcaggacctgaaggagaacaatgagatggtggagctgcagaggatccgcatgaaggatgagatccgggagtacaagttccgggaggcccggctgctgcaggactacacagagctggaggaggagaacatcaccctgcagaagctggtgtccaccctgaagcagaaccaggtggagtatgagggcctgaagcatgagatcaagagatttgaggaggagaccgtgctgctgaacagccagctggaggatgccatccggctgaaggagattgctgagcaccagctggaggaggccctggagaccctgaagaatgaaagagagcagaagaacaacctgaggaaggagctgagccagtacatcagcctgaatgacaaccacatcagcatctctgtggatggcctgaagtttgctgaagatggcagcgagcccaacaatgatgacaagatgaatggccacatccacggccccctggtgaagctgaatggagactaccgcacccccaccctgaggaaaggagagagcctgaaccctgtgtctgacctcttcagcgagctgaacatcagcgagatccagaagctgaagcagcagctgatgcaggtggagcgggagaaggccatcctgctggccaacctgcaggagagccagacccagctggagcacaccaagggggccctgacagagcagcacgagcgggtgcaccggctgacagagcacgtgaatgccatgaggggcctgcagagcagcaaggagctgaaggccgagctggatggagagaagggccgggacagcggggaggaggcccatgactatgaggtggacatcaatggcctggagatcctggagtgcaagtacagagtggccgtgacagaggtgattgacctgaaggccgagatcaaggccctgaaggagaagtacaacaagtctgtggagaactacacagatgagaaggccaagtatgagagcaagatccagatgtatgatgagcaggtgaccagcctggagaagaccaccaaggagagcggggagaagatggcccacatggagaaggagctgcagaagatgaccagcatcgccaatgaaaaccacagcaccctgaacacagcccaggatgagctggtgaccttcagcgaggagctggcccagctgtaccaccacgtgtgcctgtgcaacaatgagacccccaacagagtgatgctggactactaccggcagagccgggtgaccaggagcggcagcctgaagggcccagatgacccccggggcctgctgagcccccggctggccaggagaggagtgagcagccctgtggagaccaggaccagcagcgagcctgtggccaaggagagcacagaggccagcaaggagcccagccccaccaagacccccaccatcagccctgtgatcacagccccacccagcagccctgtgctggacaccagtgacatcaggaaggagcccatgaacatctacaacctgaatgccatcatccgggaccagatcaagcacctgcagaaggctgtggacaggagcctgcagctgagccggcagagagctgctgcccgggagctggcccccatgattgacaaggacaaggaggccctgatggaggagatcctgaagctgaagagcctgctgagcaccaagcgggagcagatcgccaccctgcgggctgtgctgaaggccaacaagcagacagctgaggtggccctggccaacctgaagaacaagtatgaaaatgagaaggccatggtgacagagaccatgaccaagctgagaaatgagctgaaggccctgaaggaggatgctgccaccttcagcagcctgcgggccatgtttgccacccgctgtgatgaatatgtgacccagctggatgagatgcagaggcagctggccgctgctgaagatgagaagaagaccctgaacaccctgctgaggatggccatccagcagaagctggccctgacccagaggctggaggacctggagtttgaccacgagcagagcagaagaagcaagggcaagctgggcaagagcaagattggcagccccaaggtgtctggagaggcctctgtgacagtgcccaccatcgacacctacctgctgcacagccagggcccccagacccccaacatccgggtgagcagcggcacccagaggaagaggcagttcagccccagcctgtgtgaccagagccggcccaggaccagcggggccagctacctgcagaacctgctgcgggtgcccccagaccccaccagcacagagagcttcctgctgaagggcccccccagcatgtctgagttcatccagggccaccggctgagcaaggagaagaggctgactgtggcccccccagactgccagcagcctgctgcctctgtgcccccccagtgcagccagctggccggccggcaggactgccccaccgtgtccccagacacagccctgcctgaggagcagccccacagcagcagccagtgtgcccccctgcactgcctgagcaagccaccccacccctag

SEQ ID NO: 145193 - DNA, 2484 bp, synthetic construct
  misc_feature 1..2484: note = Description of Artificial Sequence: Synthetic coding sequence
  source 1..2484: mol_type = other DNA
atggctgctgaggaggtgctgcagacagtggaccactacaagacagaaattgagcggctgaccaaggagctgacagagaccacccatgagaagatccaggccgcagaatatggcctggtggtgctggaggagaagctgaccctgaagcagcagtatgatgagctggaggccgagtatgacagcctgaagcaggagctggagcagctgaaggaggccttcggccagagcttcagcatccacaggaaggtggctgaagatggagagacccgggaggagaccctgctgcaggagagcgccagcaaggaggcctactacctgggcaagatcctggagatgcagaatgagctgaagcagagcagagctgtggtgaccaacgtgcaggctgaaaatgaaaggctgacagctgtggtgcaggacctgaaggagaacaatgagatggtggagctgcagaggatccgcatgaaggatgagatccgggagtacaagttccgggaggcccggctgctgcaggactacacagagctggaggaggagaacatcaccctgcagaagctggtgtccaccctgaagcagaaccaggtggagtatgagggcctgaagcatgagatcaagagatttgaggaggagaccgtgctgctgaacagccagctggaggatgccatccggctgaaggagattgctgagcaccagctggaggaggccctggagaccctgaagaatgaaagagagcagaagaacaacctgaggaaggagctgagccagtacatcagcctgaatgacaaccacatcagcatctctgtggatggcctgaagtttgctgaagatggcagcgagcccaacaatgatgacaagatgaatggccacatccacggccccctggtgaagctgaatggagactaccgcacccccaccctgaggaaaggagagagcctgaaccctgtgtctgacctcttcagcgagctgaacatcagcgagatccagaagctgaagcagcagctgatgcaggtggagcgggagaaggccatcctgctggccaacctgcaggagagccagacccagctggagcacaccaagggggccctgacagagcagcacgagcgggtgcaccggctgacagagcacgtgaatgccatgaggggcctgcagagcagcaaggagctgaaggccgagctggatggagagaagggccgggacagcggggaggaggcccatgactatgaggtggacatcaatggcctggagatcctggagtgcaagtacagagtggccgtgacagaggtgattgacctgaaggccgagatcaaggccctgaaggagaagtacaacaagtctgtggagaactacacagatgagaaggccaagtatgagagcaagatccagatgtatgatgagcaggtgaccagcctggagaagaccaccaaggagagcggggagaagatggcccacatggagaaggagctgcagaagatgaccagcatcgccaatgaaaaccacagcaccctgaacacagcccaggatgagctggtgaccttcagcgaggagctggcccagctgtaccaccacgtgtgcctgtgcaacaatgagacccccaacagagtgatgctggactactaccggcagagccgggtgaccaggagcggcagcctgaagggcccagatgacccccggggcctgctgagcccccggctggccaggagaggagtgagcagccctgtggagaccaggaccagcagcgagcctgtggccaaggagagcacagaggccagcaaggagcccagccccaccaagacccccaccatcagccctgtgatcacagccccacccagcagccctgtgctggacaccagtgacatcaggaaggagcccatgaacatctacaacctgaatgccatcatccgggaccagatcaagcacctgcagaaggctgtggacaggagcctgcagctgagccggcagagagctgctgcccgggagctggcccccatgattgacaaggacaaggaggccctgatggaggagatcctgaagctgaagagcctgctgagcaccaagcgggagcagatcgccaccctgcgggctgtgctgaaggccaacaagcagacagctgaggtggccctggccaacctgaagaacaagtatgaaaatgagaaggccatggtgacagagaccatgaccaagctgagaaatgagctgaaggccctgaaggaggatgctgccaccttcagcagcctgcgggccatgtttgccacccgctgtgatgaatatgtgacccagctggatgagatgcagaggcagctggccgctgctgaagatgagaagaagaccctgaacaccctgctgaggatggccatccagcagaagctggccctgacccagaggctggaggacctggagtttgaccacgagcagagcagaagaagcaagggcaagctgggcaagagcaagattggcagccccaagaccatcttcaccttccccctgtag

SEQ ID NO: 145194 - DNA, 2508 bp, synthetic construct
  misc_feature 1..2508: note = Description of Artificial Sequence: Synthetic coding sequence
  source 1..2508: mol_type = other DNA
atggctgctgaggaggtgctgcagacagtggaccactacaagacagaaattgagcggctgaccaaggagctgacagagaccacccatgagaagatccaggccgcagaatatggcctggtggtgctggaggagaagctgaccctgaagcagcagtatgatgagctggaggccgagtatgacagcctgaagcaggagctggagcagctgaaggaggccttcggccagagcttcagcatccacaggaaggtggctgaagatggagagacccgggaggagaccctgctgcaggagagcgccagcaaggaggcctactacctgggcaagatcctggagatgcagaatgagctgaagcagagcagagctgtggtgaccaacgtgcaggctgaaaatgaaaggctgacagctgtggtgcaggacctgaaggagaacaatgagatggtggagctgcagaggatccgcatgaaggatgagatccgggagtacaagttccgggaggcccggctgctgcaggactacacagagctggaggaggagaacatcaccctgcagaagctggtgtccaccctgaagcagaaccaggtggagtatgagggcctgaagcatgagatcaagagatttgaggaggagaccgtgctgctgaacagccagctggaggatgccatccggctgaaggagattgctgagcaccagctggaggaggccctggagaccctgaagaatgaaagagagcagaagaacaacctgaggaaggagctgagccagtacatcagcctgaatgacaaccacatcagcatctctgtggatggcctgaagtttgctgaagatggcagcgagcccaacaatgatgacaagatgaatggccacatccacggccccctggtgaagctgaatggagactaccgcacccccaccctgaggaaaggagagagcctgaaccctgtgtctgacctcttcagcgagctgaacatcagcgagatccagaagctgaagcagcagctgatgcaggtggagcgggagaaggccatcctgctggccaacctgcaggagagccagacccagctggagcacaccaagggggccctgacagagcagcacgagcgggtgcaccggctgacagagcacgtgaatgccatgaggggcctgcagagcagcaaggagctgaaggccgagctggatggagagaagggccgggacagcggggaggaggcccatgactatgaggtggacatcaatggcctggagatcctggagtgcaagtacagagtggccgtgacagaggtgattgacctgaaggccgagatcaaggccctgaaggagaagtacaacaagtctgtggagaactacacagatgagaaggccaagtatgagagcaagatccagatgtatgatgagcaggtgaccagcctggagaagaccaccaaggagagcggggagaagatggcccacatggagaaggagctgcagaagatgaccagcatcgccaatgaaaaccacagcaccctgaacacagcccaggatgagctggtgaccttcagcgaggagctggcccagctgtaccaccacgtgtgcctgtgcaacaatgagacccccaacagagtgatgctggactactaccggcagagccgggtgaccaggagcggcagcctgaagggcccagatgacccccggggcctgctgagcccccggctggccaggagaggagtgagcagccctgtggagaccaggaccagcagcgagcctgtggccaaggagagcacagaggccagcaaggagcccagccccaccaagacccccaccatcagccctgtgatcacagccccacccagcagccctgtgctggacaccagtgacatcaggaaggagcccatgaacatctacaacctgaatgccatcatccgggaccagatcaagcacctgcagaaggctgtggacaggagcctgcagctgagccggcagagagctgctgcccgggagctggcccccatgattgacaaggacaaggaggccctgatggaggagatcctgaagctgaagagcctgctgagcaccaagcgggagcagatcgccaccctgcgggctgtgctgaaggccaacaagcagacagctgaggtggccctggccaacctgaagaacaagtatgaaaatgagaaggccatggtgacagagaccatgaccaagctgagaaatgagctgaaggccctgaaggaggatgctgccaccttcagcagcctgcgggccatgtttgccacccgctgtgatgaatatgtgacccagctggatgagatgcagaggcagctggccgctgctgaagatgagaagaagaccctgaacaccctgctgaggatggccatccagcagaagctggccctgacccagaggctggaggacctggagtttgaccacgagcagagcagaagaagcaagggcaagctgggcaagagcaagattggcagccccaagatcgtgagcagcctgctgcccccctaccgccacagcgcccacaactag

SEQ ID NO: 145195 - DNA, 2568 bp, synthetic construct
  misc_feature 1..2568: note = Description of Artificial Sequence: Synthetic coding sequence
  source 1..2568: mol_type = other DNA
atgtctgcccccagcgaggaggaggagtatgcccggctggtgatggaggcccagcctgagtggctgcgggcagaggtgaagaggctgagccatgagctggccgagaccacccgggagaagatccaggccgcagaatatggcctggccgtgctggaggagaagcaccagctgaagctgcagtttgaggagctggaggtggactatgaggccatccgctctgagatggagcagctgaaggaggccttcggccaggcccacaccaaccacaagaaggtggccgcagatggagagagccgggaggagagcctcatccaggagagcgccagcaaggagcagtactacgtgaggaaggtgctggagctgcagacagagctgaagcagctgagaaatgtgctgaccaacacccagagtgaaaatgaaaggctggcctctgtggcccaggagctgaaggagatcaaccagaatgtggagatccagaggggccgcctgagagatgacatcaaggagtacaagttccgggaggcccggctgctgcaggactacagcgagctggaggaggagaacatcagcctgcagaagcaggtgtctgtgctgcggcagaaccaggtggagtttgagggcctgaagcatgagatcaagaggctggaggaggagacagagtacctgaacagccagctggaggatgccatccggctgaaggagatcagcgagcggcagctggaggaggccctggagaccctgaagacagagcgggagcagaagaacagcctgaggaaggagctgagccactacatgagcatcaatgacagcttctacaccagccacctgcacgtgtccctggatggcctgaagttcagtgatgatgctgctgagcccaacaatgatgctgaggccctggtgaatggatttgaacatggaggcctggccaagctgcccctggacaacaagaccagcacccccaagaaggagggcctggccccacccagccccagcctggtgtctgacctgctgtctgagctgaacatcagcgagatccagaagctgaagcagcagctgatgcagatggagcgggagaaggccggcctgctggccaccctgcaggacacccagaagcagctggagcacacccggggcagcctgtctgagcagcaggagaaggtgacccggctgacagagaacctgagcgccctgcggcggctgcaggccagcaaggagcggcagacagccctggacaatgagaaggaccgggacagccatgaagatggagactactatgaggtggacatcaatggacctgagatcctggcctgcaagtaccacgtggccgtggccgaggccggggagctgcgggagcagctgaaggccctgcggagcacccatgaggcccgggaggcccagcacgccgaggagaagggccgctatgaggccgagggccaggccctgacagagaaggtgtccctgctggagaaggccagccggcaggaccgggagctgctggcccggctggagaaggagctgaagaaggtgtctgatgtggccggggagacccagggcagcctgtctgtggcccaggatgagctggtgaccttcagcgaggagctggccaacctgtaccaccacgtgtgcatgtgcaacaatgagacccccaacagagtgatgctggactactaccgggagggccagggcggggccggccgcaccagccctgggggccgcaccagccctgaggcccggggccgccgcagccccatcctgctgcccaagggcctgctggcccctgaggccggccgggcagatggcggcaccggggacagcagccccagccctggcagcagcctgcccagccccctgagtgacccccggcgggagcccatgaacatctacaacctgattgccatcatccgggaccagatcaagcacctgcaggccgctgtggacaggaccacagagctgagccggcagagaattgccagccaggagctgggccctgctgtggacaaggacaaggaggccctgatggaggagatcctgaagctgaagagcctgctgagcaccaagcgggagcagatcaccaccctgaggacagtgctgaaggccaacaagcagacagctgaggtggccctggccaacctgaagagcaaatatgaaaatgagaaggccatggtgacagagaccatgatgaagctgagaaatgagctgaaggccctgaaggaggatgctgccaccttcagcagcctgcgggccatgtttgccacccgctgtgatgagtacatcacccagctggatgagatgcagaggcagctggccgctgctgaagatgagaagaagaccctgaacagcctgctgaggatggccatccagcagaagctggccctgacccagaggctggagctgctggagctggaccacgagcagacccggcggggccgggccaaggccgcccccaagaccaagccagccaccccatctgtgagccacacctgtgcctgtgccagtgacagagctgagggcaccggcctggccaaccaggtgttctgcagcgagaagcacagcatctactgtgactag

SEQ ID NO: 145196 - DNA, 2475 bp, synthetic construct
  misc_feature 1..2475: note = Description of Artificial Sequence: Synthetic coding sequence
  source 1..2475: mol_type = other DNA
atgtctgcccccagcgaggaggaggagtatgcccggctggtgatggaggcccagcctgagtggctgcgggcagaggtgaagaggctgagccatgagctggccgagaccacccgggagaagatccaggccgcagaatatggcctggccgtgctggaggagaagcaccagctgaagctgcagtttgaggagctggaggtggactatgaggccatccgctctgagatggagcagctgaaggaggccttcggccaggcccacaccaaccacaagaaggtggccgcagatggagagagccgggaggagagcctcatccaggagagcgccagcaaggagcagtactacgtgaggaaggtgctggagctgcagacagagctgaagcagctgagaaatgtgctgaccaacacccagagtgaaaatgaaaggctggcctctgtggcccaggagctgaaggagatcaaccagaatgtggagatccagaggggccgcctgagagatgacatcaaggagtacaagttccgggaggcccggctgctgcaggactacagcgagctggaggaggagaacatcagcctgcagaagcaggtgtctgtgctgcggcagaaccaggtggagtttgagggcctgaagcatgagatcaagaggctggaggaggagacagagtacctgaacagccagctggaggatgccatccggctgaaggagatcagcgagcggcagctggaggaggccctggagaccctgaagacagagcgggagcagaagaacagcctgaggaaggagctgagccactacatgagcatcaatgacagcttctacaccagccacctgcacgtgtccctggatggcctgaagttcagtgatgatgctgctgagcccaacaatgatgctgaggccctggtgaatggatttgaacatggaggcctggccaagctgcccctggacaacaagaccagcacccccaagaaggagggcctggccccacccagccccagcctggtgtctgacctgctgtctgagctgaacatcagcgagatccagaagctgaagcagcagctgatgcagatggagcgggagaaggccggcctgctggccaccctgcaggacacccagaagcagctggagcacacccggggcagcctgtctgagcagcaggagaaggtgacccggctgacagagaacctgagcgccctgcggcggctgcaggccagcaaggagcggcagacagccctggacaatgagaaggaccgggacagccatgaagatggagactactatgaggtggacatcaatggacctgagatcctggcctgcaagtaccacgtggccgtggccgaggccggggagctgcgggagcagctgaaggccctgcggagcacccatgaggcccgggaggcccagcacgccgaggagaagggccgctatgaggccgagggccaggccctgacagagaaggtgtccctgctggagaaggccagccggcaggaccgggagctgctggcccggctggagaaggagctgaagaaggtgtctgatgtggccggggagacccagggcagcctgtctgtggcccaggatgagctggtgaccttcagcgaggagctggccaacctgtaccaccacgtgtgcatgtgcaacaatgagacccccaacagagtgatgctggactactaccgggagggccagggcggggccggccgcaccagccctgggggccgcaccagccctgaggcccggggccgccgcagccccatcctgctgcccaagggcctgctggcccctgaggccggccgggcagatggcggcaccggggacagcagccccagccctggcagcagcctgcccagccccctgagtgacccccggcgggagcccatgaacatctacaacctgattgccatcatccgggaccagatcaagcacctgcaggccgctgtggacaggaccacagagctgagccggcagagaattgccagccaggagctgggccctgctgtggacaaggacaaggaggccctgatggaggagatcctgaagctgaagagcctgctgagcaccaagcgggagcagatcaccaccctgaggacagtgctgaaggccaacaagcagacagctgaggtggccctggccaacctgaagagcaaatatgaaaatgagaaggccatggtgacagagaccatgatgaagctgagaaatgagctgaaggccctgaaggaggatgctgccaccttcagcagcctgcgggccatgtttgccacccgctgtgatgagtacatcacccagctggatgagatgcagaggcagctggccgctgctgaagatgagaagaagaccctgaacagcctgctgaggatggccatccagcagaagctggccctgacccagaggctggagctgctggagctggaccacgagcagacccggcggggccgggccaaggccgcccccaagaccaagccagccacccccagcctgtag

SEQ ID NO: 145197 - DNA, 1107 bp, synthetic construct
  misc_feature 1..1107: note = Description of Artificial Sequence: Synthetic coding sequence
  source 1..1107: mol_type = other DNA
atgtggcccctgtggaggctggtgtccctgctggccctgagccaggccctgccctttgagcagaggggcttctgggacttcaccctggatgatggccccttcatgatgaatgatgaggaggccagcggggctgacaccagcggcgtgctggaccctgacagcgtgacccccacctacagcgccatgtgccccttcggctgccactgccacctgcgggtggtgcagtgcagcgacctgggcctgaagtctgtgcccaaggagatcagcccagacaccaccctgctggacctgcagaacaatgacatcagcgagctgaggaaggatgacttcaagggcctgcagcacctgtatgccctggtgctggtgaacaacaagatcagcaagatccacgagaaggccttcagccccctgaggaagctgcagaagctgtacatcagcaagaaccacctggtggagatcccccccaacctgcccagcagcctggtggagctgcgcatccatgacaaccgcatcaggaaggtgcccaagggcgtcttcagcggcctgaggaacatgaactgcatcgagatgggcggcaaccccctggagaacagcggctttgagcccggggcctttgatggcctgaagctgaactacctgcgcatcagcgaggccaagctgaccggcatccccaaggacctgcctgagaccctgaatgagctgcacctggaccacaacaagatccaggccatcgagctggaggacctgctgcgctacagcaagctgtaccgcctgggcctgggccacaaccagatccgcatgattgaaaatggcagcctgtccttcctgcccaccctgcgggagctgcacctggacaacaacaagctggcccgggtgcccagcggcctgcctgacctgaagctgctgcaggtggtgtacctgcacagcaacaacatcaccaaggtgggcgtgaatgacttctgccccatgggctttggagtgaagagggcctactacaacggcatcagcctcttcaacaaccctgtgccctactgggaggtgcagcctgccaccttccgctgtgtgacagaccggctggccatccagtttggaaactacaagaagtag

SEQ ID NO: 145198 - DNA, 924 bp, synthetic construct
  misc_feature 1..924: note = Description of Artificial Sequence: Synthetic coding sequence
  source 1..924: mol_type = other DNA
atgtgccccttcggctgccactgccacctgcgggtggtgcagtgcagcgacctgggcctgaagtctgtgcccaaggagatcagcccagacaccaccctgctggacctgcagaacaatgacatcagcgagctgaggaaggatgacttcaagggcctgcagcacctgtatgccctggtgctggtgaacaacaagatcagcaagatccacgagaaggccttcagccccctgaggaagctgcagaagctgtacatcagcaagaaccacctggtggagatcccccccaacctgcccagcagcctggtggagctgcgcatccatgacaaccgcatcaggaaggtgcccaagggcgtcttcagcggcctgaggaacatgaactgcatcgagatgggcggcaaccccctggagaacagcggctttgagcccggggcctttgatggcctgaagctgaactacctgcgcatcagcgaggccaagctgaccggcatccccaaggacctgcctgagaccctgaatgagctgcacctggaccacaacaagatccaggccatcgagctggaggacctgctgcgctacagcaagctgtaccgcctgggcctgggccacaaccagatccgcatgattgaaaatggcagcctgtccttcctgcccaccctgcgggagctgcacctggacaacaacaagctggcccgggtgcccagcggcctgcctgacctgaagctgctgcaggtggtgtacctgcacagcaacaacatcaccaaggtgggcgtgaatgacttctgccccatgggcttcggcgtgaagagggcctactacaacggcatcagcctcttcaacaaccctgtgccctactgggaggtgcagcctgccaccttccgctgtgtgacagaccggctggccatccagtttggaaactacaagaagtag

SEQ ID NO: 145199 - DNA, 924 bp, synthetic construct; identical to SEQ ID NO: 145198
  misc_feature 1..924: note = Description of Artificial Sequence: Synthetic coding sequence
  source 1..924: mol_type = other DNA

SEQ ID NO: 145200 - DNA, 717 bp, synthetic construct
  misc_feature 1..717: note = Description of Artificial Sequence: Synthetic coding sequence
  source 1..717: mol_type = other DNA
atgtggcccctgtggaggctggtgtccctgctggccctgagccaggccctgccctttgagcagaggggcttctgggacttcaccctggatgatggccccttcatgatgaatgatgaggaggccagcggggctgacaccagcggcgtgctggaccctgacagcgtgacccccacctacagcgccatgtgccccttcggctgccactgccacctgcgggtggtgcagtgcagcgacctgggcctgaagtctgtgcccaaggagatcagcccagacaccaccctgctggacctgcagaacaatgacatcagcgagctgaggaaggatgacttcaagggcctgcagcacctgtatgtgcgctcctgggaggagcctgctggcctgcagcagagagctggggtgcgggccctggtgctggtgaacaacaagatcagcaagatccacgagaaggccttcagccccctgaggaagctgcagaagctgtacatcagcaagaaccacctggtggagatcccccccaacctgcccagcagcctggtggagctgcgcatccatgacaaccgcatcaggaaggtgcccaagggcgtcttcagcggcctgaggaacatgaactgcatcgagatgggcggcaaccccctggagaacagcggctttgagcccggggcctttgatggcctgaagctgaactacctgcgcatcagcgaggccaagctgacctag

SEQ ID NO: 145201 - DNA, 1257 bp, synthetic construct
  misc_feature 1..1257: note = Description of Artificial Sequence: Synthetic coding sequence
  source 1..1257: mol_type = other DNA
atgatccagctgacagccacccctgtgtctgccctggtggatgagcctgtgcacatccgggccaccggcctcatccccttccagatggtgtccttccaggccagcctggaggatgaaaatggagacatgttctacagccaggcccactaccgggccaatgaatttggagaggtggacctgaaccacgccagcagcctgggcggggactacatgggcgtgcaccccatgggcctcttctggagcctgaagccagagaagctgctgacccggctgctgaagagagatgtgatgaaccggcccttccaggtgcaggtgaagctgtatgacctggagctgattgtgaacaacaaggtggccagcgcccccaaggccagcctgaccctggagcgctggtacgtggcccctggggtgacccgcatcaaggtgcgggagggccgcctgcggggggccctcttcctgcccccaggagagggcctcttccctggggtcatcgacctgtttggaggcctgggcggcctgctggagttccgggccagcctgctggccagccggggctttgccagcctggccctggcctaccacaactatgaggacctgcccaggaagccagaggtgacagacctggagtactttgaggaggccgccaacttcctgctgcggcaccccaaggtgtttggaagtggagtgggcgtggtgtctgtgtgccagggcgtgcagatcggcctgtccatggccatctacctgaagcaggtgacagccaccgtgctgatcaatggcaccaacttccccttcggcatcccccaggtgtaccacggccagatccaccagcccctgccccacagcgcccagctgatcagcaccaatgccctgggcctgctggagctgtaccgcacctttgagaccacccaggtgggcgccagccagtacctgttccccatcgaggaggcccagggccagttcctgttcatcgtgggggagggggacaagaccatcaacagcaaggcccatgctgagcaggccatcggccagctgaagagacatggcaagaacaactggaccctgctgagctacccaggggccggccacctgattgagcccccctacagccccctgtgctgtgccagcaccacccatgacctgcggctgcactggggcggggaggtgatcccccacgccgccgcccaggagcacgcctggaaggagatccagcgcttcctgaggaagcacctgatcccagatgtgaccagccagctgtag

SEQ ID NO: 145202 - DNA, 1257 bp, synthetic construct; identical to SEQ ID NO: 145201
  misc_feature 1..1257: note = Description of Artificial Sequence: Synthetic coding sequence
  source 1..1257: mol_type = other DNA

SEQ ID NO: 145203 - DNA, 891 bp, synthetic construct
  misc_feature 1..891: note = Description of Artificial Sequence: Synthetic coding sequence
  source 1..891: mol_type = other DNA
atgaatgctgagcctgagaggaagtttggagtggtggtggtgggcgtgggccgggccggctctgtgaggatgagggacctgaggaacccccaccccagcagcgccttcctgaacctgattggatttgtgtccagaagagagctgggcagcattgatggagtgcagcagatcagcctggaggatgccctgagcagccaggaggtggaggtggcctacatctgcagcgagagcagcagccatgaggactacatccggcagttcctgaatgctgggaagcacgtgctggtggagtaccccatgaccctgagcctggccgccgcccaggagctgtgggagctggccgagcagaagggcaaggtgctgcacgaggagcacgtggagctgctgatggaggagtttgccttcctgaagaaggaggtggtgggcaaggacctgctgaagggcagcctgctcttcaccgctggccccctggaggaggagcgcttcggcttccctgccttcagcggcatcagccggctgacctggctggtgtccctgtttggagagctgagcctggtgtctgccaccctggaggagaggaaagaagaccagtacatgaagatgacagtgtgcctggagacagagaagaagagccccctgtcctggattgaggagaagggccctggcctgaagaggaaccgctacctgtccttccacttcaagagcggcagcctggagaatgtgcccaacgtgggcgtgaacaagaacatcttcctgaaggaccagaacatctttgtgcagaagctgctgggccagttcagcgagaaggagctggccgctgagaagaagaggatcctgcactgcctgggcctggccgaggagatccagaagtactgctgcagcaggaagtag

SEQ ID NO: 145204 - DNA, 891 bp, synthetic construct; identical to SEQ ID NO: 145203
  misc_feature 1..891: note = Description of Artificial Sequence: Synthetic coding sequence
  source 1..891: mol_type = other DNA

SEQ ID NO: 145205 - DNA, 309 bp, synthetic construct
  misc_feature 1..309: note = Description of Artificial Sequence: Synthetic coding sequence
  source 1..309: mol_type = other DNA
atgaatgctgagcctgagaggaagtttggagtggtggtggtgggcgtgggccgggccggctctgtgaggatgagggacctgaggaacccccaccccagcagcgccttcctgaacctgattggatttgtgtccagaagagagctgggcagcattgatggagtgcagcagatcagcctggaggatgccctgagcagccaggaggtggaggtggcctacatctgcagcgagagcagcagccatgaggactacatccggcagttcctgaatgctgggaagcacgtgctggtggagtaccccatgaccctgtag

SEQ ID NO: 145206 - DNA, 621 bp, synthetic construct
  misc_feature 1..621: note = Description of Artificial Sequence: Synthetic coding sequence
  source 1..621: mol_type = other DNA
atggctgtgaagaagatcgccatctttggagccaccggccagacaggcctgaccaccctggcccaggccgtgcaggccggctatgaggtgacagtgctggtgcgggacagcagccggctgcccagcgagggccccaggcctgcccacgtggtggtgggagatgtgctgcaggccgcagatgtggacaagacagtggccggccaggatgctgtgattgtgctgctgggcaccagaaatgacctgagccccaccaccgtgatgtctgagggcgccaggaacatcgtggccgccatgaaggcccatggagtggacaaggtggtggcctgcaccagcgccttcctgctgtgggaccccaccaaggtgcccccccggctgcaggccgtgacagatgaccacatccgcatgcacaaggtgctgcgggagagcggcctgaagtatgtggccgtgatgccaccccacatcggggaccagcccctgaccggggcctacacagtgaccctggatggccggggccccagcagggtcatcagcaagcatgacctgggccacttcatgctgcgctgcctgaccacagatgaatatgatggccacagcacctaccccagccaccagtaccagtag

SEQ ID NO: 145207 - DNA, 399 bp, synthetic construct
  misc_feature 1..399: note = Description of Artificial Sequence: Synthetic coding sequence
  source 1..399: mol_type = other DNA
atgggcagcctgatgctgctgtttgtggagaccaccaggaacagcagcgcctgcatcttccctgtgatcctgaatgagctgagcagcacagtggagaccatcacccacttccctgaggtgacagatggagaatgtgtgttccccttccactacaagaatggcacctactatgactgcatcaagagcaaggcccggcacaagtggtgcagcctgaacaagacctatgagggctactggaagttctgcagcgcagaagattttgccaactgtgtgttccccttctggtacagaagactcatctactgggagtgcacagatgatggagaggccttcggcaagaagtggtgcagcctgaccaagaacttcaacaaggaccgcatctggaagtactgtgagtag

SEQ ID NO: 145208 - DNA, 429 bp, synthetic construct
  misc_feature 1..429: note = Description of Artificial Sequence: Synthetic coding sequence
  source 1..429: mol_type = other DNA
atggctgctgctgctgagggcgtgctggccaccaggagtgatgagcccgccagagatgatgctgctgtggagacagctgaggaggccaaggagcctgctgaggccgacatcacagagctgtgccgggacatgttcagcaagatggccacctacctgactggagagctgacagccaccagcgaggactacaagctgctggagaacatgaacaagctgaccagcctgaagtacctggagatgaaggacatcgccatcaacatcagcaggaacctgaaggacctgaaccagaagtatgccggcctgcagccctacctggaccagatcaacgtgattgaggagcaggtggccgccctggagcaggccgcctacaagctggatgcctacagcaagaagctggaggccaagtacaagaagctggagaagaggtag

SEQ ID NO: 145209 - DNA, 225 bp, synthetic construct
  misc_feature 1..225: note = Description of Artificial Sequence: Synthetic coding sequence
  source 1..225: mol_type = other DNA
atgaacaagctgaccagcctgaagtacctggagatgaaggacatcgccatcaacatcagcaggaacctgaaggacctgaaccagaagtatgccggcctgcagccctacctggaccagatcaacgtgattgaggagcaggtggccgccctggagcaggccgcctacaagctggatgcctacagcaagaagctggaggccaagtacaagaagctggagaagaggtag

SEQ ID NO: 145210 - DNA, 225 bp, synthetic construct; identical to SEQ ID NO: 145209
  misc_feature 1..225: note = Description of Artificial Sequence: Synthetic coding sequence
  source 1..225: mol_type = other DNA

SEQ ID NO: 145211 - DNA, 300 bp, synthetic construct
  misc_feature 1..300: note = Description of Artificial Sequence: Synthetic coding sequence
  source 1..300: mol_type = other DNA
atgttcagcaagatggccacctacctgaccggggagctgacagccaccagcgaggactacaagctgctggagaacatgaacaagctgaccagcctgaagtacctggagatgaaggacatcgccatcaacatcagcaggaacctgaaggacctgaaccagaagtatgccggcctgcagccctacctggaccagatcaacgtcatcgaggagcaggtggccgccctggagcaggccgcctacaagctggatgcctacagcaagaagctggaggccaagtacaagaagctggagaagaggtag

SEQ ID NO: 145212 - DNA, 609 bp, synthetic construct
  misc_feature 1..609: note = Description of Artificial Sequence: Synthetic coding sequence
  source 1..609: mol_type = other DNA
atggccagccagggcagaagaagaagacccctgcggcggcctgagaccgtggtgcctggagaggccacagaaacagattctgagaggtctgccagcagcagcgaggaggaggagctgtacctgggccccagcggccccacccggggccggcccaccggcctgcgggtggccggggaggccgctgagacagattctgagcctgagcctgagcctgagcccacagctgccccccgggacctgccccccctggtggtgcagcgggagagcgctgaggaggcctggggcacagaggaggccccagccccagccccagcccggagcctgctgcagctgcggctggccgagagccaggcccggctggaccatgatgtggccgctgctgtgtctggagtgtacagaagagctggaagagatgtggccgccctggccagccggctggccgccgcccaggccgccggcctggccgccgcccacagcgtgcggctggcccggggggacctgtgtgccctggccgagcggctggacatcgtggccggctgccgcctgctgcctgacatccggggcgtgcccggcacagagcctgagaaggaccccggcccccgggcctag

SEQ ID NO: 145213 - DNA, 1632 bp, synthetic construct
  misc_feature 1..1632: note = Description of Artificial Sequence: Synthetic coding sequence
  source 1..1632: mol_type = other DNA
atggcccacgcccacatccagggcggccggcgggccaagagcagatttgtggtgtgcatcatgtctggggcccggagcaagctggccctcttcctgtgtggctgctacgtggtggccctgggcgcccacactggagaggagagcgtggccgaccaccatgaagctgagtactacgtggccgctgtgtatgagcaccccagcatcctgagcctgaaccccctggccctgatcagccggcaggaggccctggagctgatgaaccagaacctggacatctatgagcagcaggtgatgacagctgcccagaaggatgtgcagatcatcgtgtttcctgaagatggcatccacggcttcaacttcaccaggaccagcatctaccccttcctggacttcatgcccagcccccaggtggtgcgctggaacccctgcctggagccccaccgcttcaatgacacagaggtgctgcagaggctgagctgcatggccatccggggggacatgttcctggtggccaacctgggcaccaaggagccctgccacagcagtgacccccgctgccccaaggatggccgctaccagttcaacaccaacgtggtgttcagcaacaacggcaccctggtggaccgctacaggaagcacaacctgtactttgaagctgcctttgatgtgcccctgaaggtggacctgatcacctttgacaccccatttgctggccgcttcggcatcttcacctgctttgacatcctcttctttgatcctgccatccgggtgctgcgggactacaaggtgaagcacgtggtgtaccccacagcctggatgaaccagctgcccctgctggccgccatcgagatccagaaggcctttgctgtggccttcggcatcaacgtgctggccgccaacgtgcaccaccctgtgctgggcatgactggaagtggcatccacacccccctggagagcttctggtaccatgacatggagaaccccaagagccacctgatcatcgcccaggtggccaagaaccctgtgggcctgattggagcagaaaatgccactggagaaacagaccccagccacagcaagttcctgaagatcctgagcggggacccctactgtgagaaggatgcccaggaggtgcactgtgatgaggccaccaagtggaatgtgaatgccccacccaccttccacagcgagatgatgtatgacaacttcaccctggtgcctgtgtggggcaaggagggctacctgcacgtgtgcagcaatggcctgtgctgctacctgctgtatgaaagacccaccctgagcaaggagctgtatgccctgggcgtgtttgatggcctgcacacagtgcacggcacctactacatccaggtgtgtgccctggtgcgctgtggcggcctgggctttgacacctgtggccaggagatcacagaggccaccggcatctttgagttccacctgtggggcaacttcagcaccagctacatcttccccctcttcctgaccagcggcatgaccctggaggtgcctgaccagctgggctgggagaatgaccactacttcctgaggaagagccggctgagcagcggcctggtgacagctgccctgtatggccgcctgtatgaaagagactag

SEQ ID NO: 145214 - DNA, 1572 bp, synthetic construct
  misc_feature 1..1572: note = Description of Artificial Sequence: Synthetic coding sequence
  source 1..1572: mol_type = other DNA
atgtctggggcccggagcaagctggccctcttcctgtgtggctgctacgtggtggccctgggcgcccacactggagaggagagcgtggccgaccaccatgaagctgagtactacgtggccgctgtgtatgagcaccccagcatcctgagcctgaaccccctggccctgatcagccggcaggaggccctggagctgatgaaccagaacctggacatctatgagcagcaggtgatgacagctgcccagaaggatgtgcagatcatcgtgtttcctgaagatggcatccacggcttcaacttcaccaggaccagcatctaccccttcctggacttcatgcccagcccccaggtggtgcgctggaacccctgcctggagccccaccgcttcaatgacacagaggtgctgcagaggctgagctgcatggccatccggggggacatgttcctggtggccaacctgggcaccaaggagccctgccacagcagtgacccccgctgccccaaggatggccgctaccagttcaacaccaacgtggtgttcagcaacaacggcaccctggtggaccgctacaggaagcacaacctgtactttgaagctgcctttgatgtgcccctgaaggtggacctgatcacctttgacaccccatttgctggccgcttcggcatcttcacctgctttgacatcctcttctttgatcctgccatccgggtgctgcgggactacaaggtgaagcacgtggtgtaccccacagcctggatgaaccagctgcccctgctggccgccatcgagatccagaaggcctttgctgtggccttcggcatcaacgtgctggccgccaacgtgcaccaccctgtgctgggcatgactggaagtggcatccacacccccctggagagcttctggtaccatgacatggagaaccccaagagccacctgatcatcgcccaggtggccaagaaccctgtgggcctgattggagcagaaaatgccactggagaaacagaccccagccacagcaagttcctgaagatcctgagcggggacccctactgtgagaaggatgcccaggaggtgcactgtgatgaggccaccaagtggaatgtgaatgccccacccaccttccacagcgagatgatgtatgacaacttcaccctggtgcctgtgtggggcaaggagggctacctgcacgtgtgcagcaatggcctgtgctgctacctgctgtatgaaagacccaccctgagcaaggagctgtatgccctgggcgtgtttgatggcctgcacacagtgcacggcacctactacatccaggtgtgtgccctggtgcgctgtggcggcctgggctttgacacctgtggccaggagatcacagaggccaccggcatctttgagttccacctgtggggcaacttcagcaccagctacatcttccccctcttcctgaccagcggcatgaccctggaggtgcctgaccagctgggctgggagaatgaccactacttcctgaggaagagccggctgagcagcggcctggtgacagctgccctgtatggccgcctgtatgaaagagactag

SEQ ID NO: 145215 - DNA, 1638 bp, synthetic construct
  misc_feature 1..1638: note = Description of Artificial Sequence: Synthetic coding sequence
  source 1..1638: mol_type = other DNA
atggccaggaaggagacccagctgatcatcaagatgaaccacctggccaggtttgtggtgtgcatcatgtctggggcccggagcaagctggccctcttcctgtgtggctgctacgtggtggccctgggcgcccacactggagaggagagcgtggccgaccaccatgaagctgagtactacgtggccgctgtgtatgagcaccccagcatcctgagcctgaaccccctggccctgatcagccggcaggaggccctggagctgatgaaccagaacctggacatctatgagcagcaggtgatgacagctgcccagaaggatgtgcagatcatcgtgtttcctgaagatggcatccacggcttcaacttcaccaggaccagcatctaccccttcctggacttcatgcccagcccccaggtggtgcgctggaacccctgcctggagccccaccgcttcaatgacacagaggtgctgcagaggctgagctgcatggccatccggggggacatgttcctggtggccaacctgggcaccaaggagccctgccacagcagtgacccccgctgccccaaggatggccgctaccagttcaacaccaacgtggtgttcagcaacaacggcaccctggtggaccgctacaggaagcacaacctgtactttgaagctgcctttgatgtgcccctgaaggtggacctgatcacctttgacaccccatttgctggccgcttcggcatcttcacctgctttgacatcctcttctttgatcctgccatccgggtgctgcgggactacaaggtgaagcacgtggtgtaccccacagcctggatgaaccagctgcccctgctggccgccatcgagatccagaaggcctttgctgtggccttcggcatcaacgtgctggccgccaacgtgcaccaccctgtgctgggcatgactggaagtggcatccacacccccctggagagcttctggtaccatgacatggagaaccccaagagccacctgatcatcgcccaggtggccaagaaccctgtgggcctgattggagcagaaaatgccactggagaaacagaccccagccacagcaagttcctgaagatcctgagcggggacccctactgtgagaaggatgcccaggaggtgcactgtgatgaggccaccaagtggaatgtgaatgccccacccaccttccacagcgagatgatgtatgacaacttcaccctggtgcctgtgtggggcaaggagggctacctgcacgtgtgcagcaatggcctgtgctgctacctgctgtatgaaagacccaccctgagcaaggagctgtatgccctgggcgtgtttgatggcctgcacacagtgcacggcacctactacatccaggtgtgtgccctggtgcgctgtggcggcctgggctttgacacctgtggccaggagatcacagaggccaccggcatctttgagttccacctgtggggcaacttcagcaccagctacatcttccccctcttcctgaccagcggcatgaccctggaggtgcctgaccagctgggctgggagaatgaccactacttcctgaggaagagccggctgagcagcggcctggtgacagctgccctgtatggccgcctgtatgaaagagactag

SEQ ID NO: 145216 - DNA, 1638 bp, synthetic construct
  misc_feature 1..1638: note = Description of Artificial Sequence: Synthetic coding sequence
  source 1..1638: mol_type = other DNA
atgcctgagggcggcggcaccagccggcggctgctgcccatgcagagcagatttgtggtgtgcatcatgtctggggcccggagcaagctggccctcttcctgtgtggctgctacgtggtggccctgggcgcccacactggagaggagagcgtggccgaccaccatgaagctgagtactacgtggccgctgtgtatgagcaccccagcatcctgagcctgaaccccctggccctgatcagccggcaggaggccctggagctgatgaaccagaacctggacatctatgagcagcaggtgatgacagctgcccagaaggatgtgcagatcatcgtgtttcctgaagatggcatccacggcttcaacttcaccaggaccagcatctaccccttcctggacttcatgcccagcccccaggtggtgcgctggaacccctgcctggagccccaccgcttcaatgacacagaggtgctgcagaggctgagctgcatggccatccggggggacatgttcctggtggccaacctgggcaccaaggagccctgccacagcagtgacccccgctgccccaaggatggccgctaccagttcaacaccaacgtggtgttcagcaacaacggcaccctggtggaccgctacaggaagcacaacctgtactttgaagctgcctttgatgtgcccctgaaggtggacctgatcacctttgacaccccatttgctggccgcttcggcatcttcacctgctttgacatcctcttctttgatcctgccatccgggtgctgcgggactacaaggtgaagcacgtggtgtaccccacagcctggatgaaccagctgcccctgctggccgccatcgagatccagaaggcctttgctgtggccttcggcatcaacgtgctggccgccaacgtgcaccaccctgtgctgggcatgactggaagtggcatccacacccccctggagagcttctggtaccatgacatggagaaccccaagagccacctgatcatcgcccaggtggccaagaaccctgtgggcctgattggagcagaaaatgccactggagaaacagaccccagccacagcaagttcctgaagatcctgagcggggacccctactgtgagaaggatgcccaggaggtgcactgtgatgaggccaccaagtggaatgtgaatgccccacccaccttccacagcgagatgatgtatgacaacttcaccctggtgcctgtgtggggcaaggagggctacctgcacgtgtgcagcaatggcctgtgctgctacctgctgtatgaaagacccaccctgagcaaggagctgtatgccctgggcgtgtttgatggcctgcacacagtgcacggcacctactacatccaggtgtgtgccctggtgcgctgtggcggcctgggctttgacacctgtggccaggagatcacagaggccaccggcatctttgagttccacctgtggggcaacttcagcaccagctacatcttccccctcttcctgaccagcggcatgaccctggaggtgcctgaccagctgggctgggagaatgaccactacttcctgaggaagagccggctgagcagcggcctggtgacagctgccctgtatggccgcctgtatgaaagagactag

SEQ ID NO: 145217 - DNA, 585 bp, synthetic construct
  misc_feature 1..585: note = Description of Artificial Sequence: Synthetic coding sequence
  source 1..585: mol_type = other DNA
atgcccaggaacctgctgtacagcctgctgagcagccacctgagcccccacttcagcacctctgtgaccagcgccaaggtggccgtgaatggagtgcagctgcactaccagcagacaggagagggggaccatgctgtgctgctgctgcccggcatgctgggcagcggggagacagactttggcccccagctgaagaacctgaacaagaagctgttcaccgtggtggcctgggacccccggggctacggccacagccggcccccagaccgggacttccctgctgacttctttgaaagagatgccaaggatgctgtggacctgatgaaggccctgaagttcaagaaggtgtccctgctgggctggagcgatggcggcatcacagccctgattgctgctgccaagtaccccagctacatccacaagatggtgatctggggcgccaatgcctacgtgacagatgaggacagcatgatctatgagggcatcagagatgtgtccaagtggagcgagaggaccaggaagcccctggaggccctgtatggctggagcctgaccctgagccctggctggaatgccatggcctag

SEQ ID NO: 145218 - DNA, 825 bp, synthetic construct
  misc_feature 1..825: note = Description of Artificial Sequence: Synthetic coding sequence
  source 1..825: mol_type = other DNA
atgcccaggaacctgctgtacagcctgctgagcagccacctgagcccccacttcagcacctctgtgaccagcgccaaggtggccgtgaatggagtgcagctgcactaccagcagacaggagagggggaccatgctgtgctgctgctgcccggcatgctgggcagcggggagacagactttggcccccagctgaagaacctgaacaagaagctgttcaccgtggtggcctgggacccccggggctacggccacagccggcccccagaccgggacttccctgctgacttctttgaaagagatgccaaggatgctgtggacctgatgaaggccctgaagttcaagaaggtgtccctgctgggctggagcgatggcggcatcacagccctgattgctgctgccaagtaccccagctacatccacaagatggtgatctggggcgccaatgcctacgtgacagatgaggacagcatgatctatgagggcatcagagatgtgtccaagtggagcgagaggaccaggaagcccctggaggccctgtatggctatgactactttgcccggacctgtgagaagtgggtggatggcatccggcagttcaagcacctgcctgatggcaacatctgccgccacctgctgccccgggtgcagtgcccagccctgattgtgcatggagagaaggaccccctggtgccccgcttccacgccgacttcatccacaagcacgtgaagggcagccggctgcacctgatgcctgagggcaagcacaacctgcacctgcgctttgctgatgagttcaacaagctggccgaggacttcctgcagtag

SEQ ID NO: 145219 - DNA, 876 bp, synthetic construct
  misc_feature 1..876: note = Description of Artificial Sequence: Synthetic coding sequence
  source 1..876: mol_type = other DNA
atggtggccgtgctgggcggccggggcgtgctgcggctgcggctgctgctgagcgccctgaagccaggcatccacgtgcccagggctggccctgctgctgccttcggcacctctgtgaccagcgccaaggtggccgtgaatggagtgcagctgcactaccagcagacaggagagggggaccatgctgtgctgctgctgcccggcatgctgggcagcggggagacagactttggcccccagctgaagaacctgaacaagaagctgttcaccgtggtggcctgggacccccggggctacggccacagccggcccccagaccgggacttccctgctgacttctttgaaagagatgccaaggatgctgtggacctgatgaaggccctgaagttcaagaaggtgtccctgctgggctggagcgatggcggcatcacagccctgattgctgctgccaagtaccccagctacatccacaagatggtgatctggggcgccaatgcctacgtgacagatgaagattccatgatctatgagggcatcagagatgtgtccaagtggagcgagaggaccaggaagcccctggaggccctgtatggctatgactactttgcccggacctgtgagaagtgggtggatggcatccggcagttcaagcacctgcctgatggcaacatctgccgccacctgctgccccgggtgcagtgcccagccctgattgtgcacggggagaaggaccccctggtgccccgcttccacgccgacttcatccacaagcacgtgaagggcagccggctgcacctgatgcctgagggcaagcacaacctgcacctgcgctttgctgatgagttcaacaagctggccgaggacttcctgcagtag

SEQ ID NO: 145220 - DNA, 264 bp, synthetic construct
  misc_feature 1..264: note = Description of Artificial Sequence: Synthetic coding sequence
  source 1..264: mol_type = other DNA
atgtactgcctgcagtggctgctgcctgtgctgctgatccccaagcccctgaacccagccctgtggttcagccacagcatgttcatgggcttctacctgctgtccttcctgctggagaggaagccctgcaccatctgtgccctggtgttcctggccgccctcttcctgatctgctacagctgctggggcaactgcttcctgtaccactgcagcgacagccccctgcctgagagcgcccatgaccccggggtggtgggcacctag

SEQ ID NO: 145221 - DNA, 264 bp, synthetic construct; identical to SEQ ID NO: 145220
  misc_feature 1..264: note = Description of Artificial Sequence: Synthetic coding sequence
  source 1..264: mol_type = other DNA

SEQ ID NO: 145222 - DNA, 264 bp, synthetic construct; identical to SEQ ID NO: 145220
  misc_feature 1..264: note = Description of Artificial Sequence: Synthetic coding sequence
  source 1..264: mol_type = other DNA

SEQ ID NO: 145223 - DNA, 264 bp, synthetic construct; identical to SEQ ID NO: 145220
  misc_feature 1..264: note = Description of Artificial Sequence: Synthetic coding sequence
  source 1..264: mol_type = other DNA

SEQ ID NO: 145224 - DNA, 264 bp, synthetic construct; identical to SEQ ID NO: 145220
  misc_feature 1..264: note = Description of Artificial Sequence: Synthetic coding sequence
  source 1..264: mol_type = other DNA

SEQ ID NO: 145225 - DNA, 189 bp, synthetic construct
  misc_feature 1..189: note = Description of Artificial Sequence: Synthetic coding sequence
  source 1..189: mol_type = other DNA
atgtactgcctgcagtggctgctgcctgtgctgctgatccccaagcccctgaacccagccctgtggttcagccacagcatgttcatgggcttctacctgctgtccttcctgctggagaggaagccctgcaccatctgtgccctggtgttcctggccgccctcttcctgatctgctacagctgctggtag

SEQ ID NO: 145226 - DNA, 264 bp, synthetic construct; identical to SEQ ID NO: 145220
  misc_feature 1..264: note = Description of Artificial Sequence: Synthetic coding sequence
  source 1..264: mol_type = other DNA

SEQ ID NO: 145227 - DNA, 264 bp, synthetic construct; identical to SEQ ID NO: 145220
  misc_feature 1..264: note = Description of Artificial Sequence: Synthetic coding sequence
  source 1..264: mol_type = other DNA

SEQ ID NO: 145228 - DNA, 237 bp, synthetic construct
  misc_feature 1..237: note = Description of Artificial Sequence: Synthetic coding sequence
  source 1..237: mol_type = other DNA
atgtactgcctgcagtggctgctgcctgtgctgctgatccccaagcccctgaacccagccctgtggttcagccacagcatgttcatgggcttctacctgctgtccttcctgctggagaggaagccctgcaccatctgtgccctggtgttcctggccgccctcttcctgatctgctacagctgctggggcaactgcttcctgtaccactgcagcgacagccccctgcctgagagctag

SEQ ID NO: 145229 - DNA, 24 bp, synthetic construct
  misc_feature 1..24: note = Description of Artificial Sequence: Synthetic coding sequence
  source 1..24: mol_type = other DNA
atgtactgcctgcagtggctgtag

SEQ ID NO: 145230 - DNA, 1368 bp, synthetic construct
  misc_feature 1..1368: note = Description of Artificial Sequence: Synthetic coding sequence
  source 1..1368: mol_type = other DNA
atgagcagcagcggcctgaacagcgagaaggtggccgccctgatccagaagctgaacagcgacccccagtttgtgctggcccagaatgtgggcaccacccatgacctgctggacatctgcctgaagagggccaccgtgcagagggcccagcacgtgttccagcacgctgtgccccaggagggcaagcccatcaccaaccagaagagcagcggccgctgctggatcttcagctgcctgaatgtgatgaggctgcccttcatgaagaagctgaacatcgaggagtttgagttcagccagagctacctgttcttctgggacaaggtggagcgctgctacttcttcctgagcgcctttgtggacacagcccagaggaaggagccagaagatggccgcctggtgcagttcctgctgatgaacccagccaatgatggcggccagtgggacatgctggtgaacatcgtggagaagtatggagtcatccccaagaagtgcttccctgagagctacaccacagaggccaccaggaggatgaatgacatcctgaaccacaagatgagggagttctgcatccggctgaggaacctggtgcacagcggggccaccaagggggagatcagcgccacccaggatgtgatgatggaggagatcttccgggtggtgtgcatctgcctgggcaaccccccagagaccttcacctgggagtacagagacaaggacaagaactaccagaagattggccccatcacccccctggagttctaccgggagcacgtgaagcccctcttcaacatggaggacaagatctgcctggtgaatgacccccggccccagcacaagtacaacaagctgtacacagtggagtacctgagcaacatggtgggcggcaggaagaccctgtacaacaaccagcccatcgacttcctgaagaagatggtggccgccagcatcaaggatggagaggccgtgtggtttggctgtgatgtgggcaagcacttcaacagcaagctgggcctgagtgacatgaacctgtatgaccacgagctggtgtttggagtgtccctgaagaacatgaacaaggccgagcggctgacctttggagagagcctgatgacccacgccatgaccttcaccgctgtgtctgagaaggatgaccaggatggagccttcaccaagtggagggtggagaacagctggggcgaggaccacggccacaagggctacctgtgcatgacagatgagtggttctctgaatatgtgtatgaggtggtggtggacaggaagcacgtgcctgaggaggtgctggccgtgctggagcaggagcccatcatcctgcctgcctgggaccccatgggcgccctggccgagtag

SEQ ID NO: 145231 - DNA, 1107 bp, synthetic construct
  misc_feature 1..1107: note = Description of Artificial Sequence: Synthetic coding sequence
  source 1..1107: mol_type = other DNA
atgtgcagcagcaccccctgcccccggcgggccagccagagccccacccggcgggcccaggtggagcgctgctacttcttcctgagcgcctttgtggacacagcccagaggaaggagccagaagatggccgcctggtgcagttcctgctgatgaacccagccaatgatggcggccagtgggacatgctggtgaacatcgtggagaagtatggagtcatccccaagaagtgcttccctgagagctacaccacagaggccaccaggaggatgaatgacatcctgaaccacaagatgagggagttctgcatccggctgaggaacctggtgcacagcggggccaccaagggggagatcagcgccacccaggatgtgatgatggaggagatcttccgggtggtgtgcatctgcctgggcaaccccccagagaccttcacctgggagtacagagacaaggacaagaactaccagaagattggccccatcacccccctggagttctaccgggagcacgtgaagcccctcttcaacatggaggacaagatctgcctggtgaatgacccccggccccagcacaagtacaacaagctgtacacagtggagtacctgagcaacatggtgggcggcaggaagaccctgtacaacaaccagcccatcgacttcctgaagaagatggtggccgccagcatcaaggatggagaggccgtgtggtttggctgtgatgtgggcaagcacttcaacagcaagctgggcctgagtgacatgaacctgtatgaccacgagctggtgtttggagtgtccctgaagaacatgaacaaggccgagcggctgaccttcggggagagcctgatgacccacgccatgaccttcaccgctgtgtctgagaaggatgaccaggatggagccttcaccaagtggagggtggagaacagctggggagaagatcatggccacaagggctacctgtgcatgacagatgagtggttctctgaatatgtgtatgaggtggtggtggacaggaagcacgtgcctgaggaggtgctggccgtgctggagcaggagcccatcatcctgcctgcctgggaccccatgggcgccctggccgagtag

SEQ ID NO: 145232 - DNA, 2241 bp, synthetic construct
  misc_feature 1..2241: note = Description of Artificial Sequence: Synthetic coding sequence
  source 1..2241: mol_type = other DNA
atggccggcagcagaggagctggccgcacagctgcccccagcgtgcggcctgagaagagaagaagtgagcctgagctggagcctgagcctgagcctgagccccccctgctgtgcaccagccccctgagccacagcacaggcagtgacagcggcgtgtctgattctgaggagagcgtcttcagcggcctggaggacagcggcagtgacagcagtgaagatgatgatgaaggagatgaggagggggaggatggagccctggatgatgagggccacagcggcatcaagaagaccacagaggagcaggtgcaggccagcaccccctgccccaggacagagatggccagcgccagaattggagatgaatatgcagaggacagcagtgatgaggaggacatccggaacacagtgggcaatgtgcccctggagtggtatgatgacttcccccacgtgggctatgacctggatggaagacgcatctacaagcccctgcggaccagagatgagctggaccagttcctggacaagatggatgatcctgactactggaggacagtgcaggaccccatgacaggccgggacctgcggctgacagatgagcaggtggccctggtgcggcggctgcagagcggccagtttggagatgtgggcttcaacccctatgagcctgctgtggacttcttctctggagatgtgatgatccaccctgtgaccaacagacctgctgacaagaggagcttcatccccagcctggtggagaaggagaaggtgtccaggatggtgcacgccatcaagatgggctggatccagccccggcggccccgggaccccacccccagcttctatgacctgtgggcccaggaggaccccaatgctgtgctgggccgccacaagatgcacgtgcctgcccccaagctggccctgcccggccatgctgagagctacaaccccccacctgagtacctgctgtctgaggaggagcggctggcctgggagcagcaggagcctggagagaggaagctgtccttcctgcccaggaagttccccagcctgcgggctgtgcctgcctacggccgcttcatccaggagagatttgagcgctgcctggacctgtacctgtgcccccggcagaggaagatgagggtgaatgtggaccctgaggacctgatccccaagctgccccggccccgggacctgcagcccttccccacctgccaggccctggtgtaccggggccacagcgacctggtgcgctgcctgtctgtgtccccaggcggccagtggctggtgtctggcagtgatgatggcagcctgcggctgtgggaggtggccacagcccgctgtgtgaggacagtgcctgtgggcggcgtggtgaagtctgtggcctggaaccccagccctgctgtgtgcctggtggccgctgctgtggaggacagcgtgctgctgctgaacccagccctgggggaccggctggtggccggcagcacagaccagctgctgagcgcctttgtgcccccagaggagccccccctgcagcctgcccgctggctggaggccagcgaggaggagcggcaggtgggcctgcggctgcgcatctgccacggcaagcctgtgacccaggtgacctggcacggccgcggggactacctggccgtggtgctggccacccagggccacacccaggtgctgatccaccagctgagcagaagaagaagccagagccccttccgccgcagccacggccaggtgcagagggtggccttccacccagcccggcccttcctgctggtggccagccagaggtctgtgcggctgtaccacctgctgcggcaggagctgaccaagaagctgatgcccaactgcaagtgggtgagcagcctggccgtgcaccctgctggggacaacgtcatctgtggcagctatgacagcaagctggtgtggtttgacctggacctgagcaccaagccctacaggatgctgcggcaccacaagaaggccctgcgggctgtggccttccacccccgctaccccctgtttgccagcggcagtgatgatggcagcgtcatcgtgtgccacggcatggtgtacaatgacctgctgcagaaccccctgctggtgcctgtgaaggtgctgaagggccacgtgctgacccgggacctgggcgtgctggatgtgatcttccaccccacccagccctgggtgttcagcagcggggctgatggcaccgtgcggctcttcacctag

SEQ ID NO: 145233 - DNA, 1083 bp, synthetic construct
  misc_feature 1..1083: note = Description of Artificial Sequence: Synthetic coding sequence
  source 1..1083: mol_type = other DNA
atgaactacacagagagcagccccctgcgggagagcacagccatcggcttcaccccagagctggagagcatcatccctgtgcccagcaacaagaccacctgtgagaactggagggagatccaccacctggtgttccacgtggccaacatctgctttgctgtgggcctggtgatccccaccaccctgcacctgcacatgatcttcctgcggggcatgctgaccctgggctgcaccctgtacatcgtgtgggccaccctgtaccgctgtgccctggacatcatgatctggaacagcgtcttcctgggcgtgaacatcctgcacctgagctacctgctgtacaagaagaggcctgtgaagattgagaaggagctgagcggcatgtacagaagactctttgagcccctgcgggtgcccccagacctcttccggcggctgaccggccagttctgcatgatccagaccctgaagaagggccagacctacgccgctgaggacaagacctctgtggatgaccggctgagcatcctgctgaagggcaagatgaaggtgtcctaccggggccacttcctgcacaacatctacccctgtgccttcatcgacagccctgagttccgcagcacccagatgcacaagggggagaagttccaggtgaccatcatcgcagatgacaactgccgcttcctgtgctggagccgggagcggctgacctacttcctggagagcgagcccttcctgtatgagatcttccgctacctgattggcaaggacatcaccaacaagctgtacagcctgaatgaccccaccctgaatgacaagaaggccaagaagctggagcaccagctgagcctgtgcacccagatctccatgctggagatgagaaattccatcgccagcagcagtgacagtgatgatggcctgcaccagttcctgcggggcaccagctccatgagcagcctgcacgtgagcagcccccaccagagggccagcgccaagatgaagcccatcgaggagggcgcagaagatgatgatgatgtgtttgagcccgccagccccaacaccctgaaggtgcaccagctgccctag

SEQ ID NO: 145234 - DNA, 1083 bp, synthetic construct; identical to SEQ ID NO: 145233
  misc_feature 1..1083: note = Description of Artificial Sequence: Synthetic coding sequence
  source 1..1083: mol_type = other DNA

SEQ ID NO: 145235 - DNA, 1083 bp, synthetic construct; identical to SEQ ID NO: 145233
  misc_feature 1..1083: note = Description of Artificial Sequence: Synthetic coding sequence
  source 1..1083: mol_type = other DNA

SEQ ID NO: 145236 - DNA, 783 bp, synthetic construct
  misc_feature 1..783: note = Description of Artificial Sequence: Synthetic coding sequence
  source 1..783: mol_type = other DNA
atggacagacacagcagctacatcttcatctggctgcagctggagctgtgtgccatggctgtgctgctgaccaagggggagatccgctgctactgtgatgctgcccactgtgtggccaccggctacatgtgcaagtctgagctgagcgcctgcttcagccggctgctggacccccagaacagcaacagccccctgacccacggctgcctggacagcctggccagcaccacagacatctgccaggccaagcaggccaggaaccacagcggcaccaccatccccaccctggagtgctgccacgaggacatgtgcaactaccggggcctgcatgatgtgctgagccccccaagaggagaggccagcggccagggcaaccgctaccagcatgatggcagcaggaacctgatcaccaaggtgcaggagctgaccagcagcaaggagctgtggttccgggctgctgtgattgctgtgcccatcgccggcggcctcatcctggtgctgctgatcatgctggccctgaggatgctgcggtctgagaacaagaggctgcaggaccagaggcagcagatgctgagccggctgcactacagcttccacggccaccacagcaagaagggccaggtggccaagctggacctggagtgcatggtgcctgtgtctggccacgagaactgctgcctgacctgtgacaagatgaggcaggccgacctgagcaatgacaagatcctgagcctggtgcactggggcatgtacagcggccacggcaagctggagtttgtgtag

SEQ ID NO: 145237 - DNA, 744 bp, synthetic construct
  misc_feature 1..744: note = Description of Artificial Sequence: Synthetic coding sequence
  source 1..744: mol_type = other DNA
atggacagacacagcagctacatcttcatctggctgcagctggagctgtgtgccatggctgtgctgctgaccaagggggagatccgctgctactgtgatgctgcccactgtgtggccaccggctacatgtgcaagtctgagctgagcgcctgcttcagccggctgctggacccccagaacagcaacagcccccacatctgccaggccaagcaggccaggaaccacagcggcaccaccatccccaccctggagtgctgccacgaggacatgtgcaactaccggggcctgcatgatgtgctgagccccccaagaggagaggccagcggccagggcaaccgctaccagcatgatggcagcaggaacctgatcaccaaggtgcaggagctgaccagcagcaaggagctgtggttccgggctgctgtgattgctgtgcccatcgccggcggcctcatcctggtgctgctgatcatgctggccctgaggatgctgcggtctgagaacaagaggctgcaggaccagaggcagcagatgctgagccggctgcactacagcttccacggccaccacagcaagaagggccaggtggccaagctggacctggagtgcatggtgcctgtgtctggccacgagaactgctgcctgacctgtgacaagatgaggcaggccgacctgagcaatgacaagatcctgagcctggtgcactggggcatgtacagcggccacggcaagctggagtttgtgtag

SEQ ID NO: 145238 - DNA, 2058 bp, synthetic construct
  misc_feature 1..2058: note = Description of Artificial Sequence: Synthetic coding sequence
  source 1..2058: mol_type = other DNA
atgctgtggttctctggagtgggcgccctggccgagcgctactgccgccgcagccctggcatcacctgctgcgtgctgctgctgctgaactgcagcggcgtgcccatgagcctggccagcagcttcctgaccggctctgtggccaagtgtgaaaatgaaggagaggtgctgcagatccccttcatcacagacaacccctgcatcatgtgtgtgtgcctgaacaaggaggtgacctgcaagcgggagaagtgccctgtgctgagccgggactgtgccctggccatcaagcagagaggagcctgctgtgagcagtgcaagggctgcacctatgagggcaacacctacaacagcagcttcaagtggcagagccctgctgagccctgtgtgctgcggcagtgccaggagggcgtggtgacagaaagtggagtgcgctgtgtggtgcactgcaagaaccccctggagcacctgggcatgtgctgccccacctgccccggctgtgtgtttgagggcgtgcagtaccaggagggggaggagttccagcctgagggcagcaagtgcaccaagtgcagctgcaccggcggccgcacccagtgtgtgcgggaggtgtgccccatcctgagctgcccccagcacctgagccacatccccccaggccagtgctgccccaagtgcctgggccagaggaaggtgtttgacctgcccttcggcagctgcctcttcagaagtgatgtgtatgacaatggcagcagcttcctgtatgacaactgcacagcctgcacctgccgggacagcacagtggtgtgcaagaggaagtgcagccaccctgggggctgtgaccagggccaggagggctgctgtgaggagtgcctgctgcgggtgcccccagaggacatcaaggtgtgcaagtttggaaacaagatcttccaggatggagagatgtggagcagcatcaactgcaccatctgtgcctgtgtgaagggccgcacagagtgcaggaacaagcagtgcatccccatcagcagctgcccccagggcaagatcctgaacaggaagggctgctgccccatctgcacagagaagccaggagtgtgcaccgtgtttggagacccccactacaacacctttgatggccgcaccttcaacttccagggcacctgccagtatgtgctgaccaaggactgcagcagccctgccagccccttccaggtgctggtgaagaatgatgcccggaggaccaggagcttctcctggaccaagtctgtggagctggtgctgggggagagccgggtgtccctgcagcagcacctgactgtgcgctggaatggcagcagaattgccctgccctgccgggccccccacttccacatcgacctggatggctacctgctgaaggtgaccaccaaggccggcctggagatctcctgggatggagacagctttgtggaggtgatggccgccccccacctgaagggcaagctgtgtggcctgtgtggcaactacaacggccacaagagagatgacctgattggaggagatggcaacttcaagtttgatgtggatgactttgctgagagctggagggtggagagcaatgagttctgcaaccggccccagaggaagcctgtgcctgagctgtgccagggcaccgtgaaggtgaagctgcgggcccaccgggagtgccagaagctgaagtcctgggagttccagacctgccacagcacagtggactatgccaccttctaccgcagctgtgtgacagacatgtgtgagtgccctgtgcacaagaactgctactgtgagagcttcctggcctacacccgggcctgccagcgggagggcatcaaggtgcactgggagccccagcagaactgtgccgccacccagtgcaagcatggagctgtgtatgacacctgtggccctggctgcatcaagacctgtgacaactggaatgagatcggcccctgcaacaagccctgtgtggccggctgccactgcccagccaacctggtgctgcacaagggccgctgcatcaagcctgtgctgtgcccccagaggtag

SEQ ID NO: 145239 - DNA, 2058 bp, synthetic construct; identical to SEQ ID NO: 145238
  misc_feature 1..2058: note = Description of Artificial Sequence: Synthetic coding sequence
  source 1..2058: mol_type = other DNA

SEQ ID NO: 145240 - DNA, 2028 bp, synthetic construct
  misc_feature 1..2028: note = Description of Artificial Sequence: Synthetic coding sequence
  source 1..2028: mol_type = other DNA
atggacaccaagagcatcctggaggagctgctgctgaagaggagccagcagaagaagaagatgagccccaacaactacaaggagcggctgtttgtgctgaccaagaccaacctgagctactatgaatatgacaagatgaagaggggcagcaggaagggcagcattgagatcaagaagatccgctgtgtggagaaggtgaacctggaggagcagacccctgtggagcggcagtaccccttccagatcgtgtacaaggatggcctgctgtatgtgtatgccagcaatgaggagagccgcagccagtggctgaaggccctgcagaaggagatccggggcaacccccacctgctggtgaagtaccacagcggcttctttgtggatggcaagttcctgtgctgccagcagagctgcaaggccgcccctggctgcaccctgtgggaggcctatgccaacctgcacacagctgtgaatgaggagaagcaccgggtgcccaccttcccagacagagtgctgaagatccccagggctgtgcctgtgctgaagatggatgcccccagcagcagcaccaccctggcccagtatgacaatgaaagcaagaagaactacggcagccagccccccagcagcagcaccagcctggcccagtatgacagcaacagcaagaagatctacggcagccagcccaacttcaacatgcagtacatcccccgggaggacttcccagactggtggcaggtgaggaagctgaagagcagcagcagcagtgaagatgtggccagcagcaaccagaaggagagaaatgtgaaccacaccaccagcaagatctcctgggagttccctgagagcagcagcagcgaggaggaggagaacctggatgattatgactggtttgctggcaacatcagccgcagccagagcgagcagctgctgcggcagaagggcaaggagggcgccttcatggtgaggaacagcagccaggtgggcatgtacacagtgtccctcttcagcaaggctgtgaatgacaagaagggcaccgtgaagcactaccacgtgcacaccaatgctgagaacaagctgtacctggccgagaactactgctttgacagcatccccaagctgatccactaccaccagcacaacagcgctggcatgatcacccggctgcggcaccctgtgtccaccaaggccaacaaggtgcctgacagcgtgtccctgggcaatggcatctgggagctgaagcgggaggagatcaccctgctgaaggagctgggcagcggccagtttggagtggtgcagctgggcaagtggaagggccagtatgatgtggccgtgaagatgatcaaggagggctccatgtctgaagatgagttcttccaggaggcccagaccatgatgaagctgagccaccccaagctggtgaagttctacggcgtgtgcagcaaggagtaccccatctacatcgtgacagagtacatcagcaatggctgcctgctgaactacctgcggagccacggcaagggcctggagcccagccagctgctggagatgtgctatgatgtgtgtgagggcatggccttcctggagagccaccagttcatccaccgggacctggccgccaggaactgcctggtggaccgggacctgtgtgtgaaggtgtctgactttggcatgacccgctacgtgctggatgaccagtatgtgtcctctgtgggcaccaagtttcctgtgaagtggagcgcccctgaggtgttccactacttcaagtacagcagcaagagtgatgtgtgggccttcggcatcctgatgtgggaggtgttcagcctgggcaagcagccctatgacctgtatgacaacagccaggtggtgctgaaggtgtcccagggccaccggctgtaccggccccacctggccagtgacaccatctaccagatcatgtacagctgctggcatgagctgcctgagaagaggcccaccttccagcagctgctgagcagcattgagcccctgcgggagaaggacaagcactag

SEQ ID NO: 145241 - DNA, 2028 bp, synthetic construct; identical to SEQ ID NO: 145240
  misc_feature 1..2028: note = Description of Artificial Sequence: Synthetic coding sequence
  source 1..2028: mol_type = other DNA

SEQ ID NO: 145242 - DNA, 2028 bp, synthetic construct; identical to SEQ ID NO: 145240
  misc_feature 1..2028: note = Description of Artificial Sequence: Synthetic coding sequence
  source 1..2028: mol_type = other DNA

SEQ ID NO: 145243 - DNA, 525 bp, synthetic construct
  misc_feature 1..525: note = Description of Artificial Sequence: Synthetic coding sequence
  source 1..525: mol_type = other DNA
atgacagagctggagtaccccaagggcagcagcatcatgcctgctgctggcaccatgtacctgaccaccagcacaggctacccctacacctaccacaatggagtggcctacttccacaccccagaggtgacctctgtgcccccaccctggcccagccgctctgtgtgcagcagccctgtgatggtggcccagcccatctaccagcagcctgcctaccactaccaggccaccacccagtacctgcccggccagtggcagtggagcgtgccccagcccagcgccagcagcgcccccttcctgtacctgcagcccagcgaggtgatctaccagcctgtggagatcgcccaggacggcggctgtgtgcccccacccctgagcctgatggagacctctgtgcctgagccctacagcgaccatggagtgcaggccacctaccaccaggtgtatgcccccagcgccatcaccatgcctgcccctgtgatgcagcctgagcccatcaagacagtgtggagcatccactactag

SEQ ID NO: 145244 - DNA, 888 bp, synthetic construct
  misc_feature 1..888: note = Description of Artificial Sequence: Synthetic coding sequence
  source 1..888: mol_type = other DNA
atggagacagaaagtggcccccagaccagcaaccagatgcagacagacagcctgagccccagccccaaccctgtgtcccctgtgcccctgaacaaccccaccagcgcccccaggtatggaacagtcatccccaaccgcatctttgtgggcggcatcgacttcaagaccaatgaaagtgacctgaggaagttcttcagccagtatggctctgtgaaggaggtgaagatcgtgaatgacagagctggggtgtccaagggctacggctttgtgacctttgagacccaggaggatgcccagaagatcctgcaggaggccgagaagctgaactacaaggacaagaagctgaacatcggccctgccatcaggaagcagcaggtgggcatccccaggagcagcatcatgcctgctgctggcaccatgtacctgaccaccagcacaggctacccctacacctaccacaacggggtggcctacttccacaccccagaggtgacctctgtgcccccaccctggcccagccgctctgtgtgcagcagccctgtgatggtggcccagcccatctaccagcagcctgcctaccactaccaggccaccacccagtacctgcccggccagtggcagtggagcgtgccccagcccagcgccagcagcgcccccttcctgtacctgcagcccagcgaggtgatctaccagcctgtggagatcgcccaggacggcggctgtgtgcccccacccctgagcctgatggagacctctgtgcctgagccctacagcgaccacggcgtgcaggccacctaccaccaggtgtatgcccccagcgccatcaccatgcctgcccctgtgatgcagcctgagcccatcaagacagtgtggagcatccactactag

SEQ ID NO: 145245 - DNA, 852 bp, synthetic construct
  misc_feature 1..852: note = Description of Artificial Sequence: Synthetic coding sequence
  source 1..852: mol_type = other DNA
atgcagacagacagcctgagccccagccccaaccctgtgtcccctgtgcccctgaacaaccccaccagcgcccccaggtatggaacagtcatccccaaccgcatctttgtgggcggcatcgacttcaagaccaatgaaagtgacctgaggaagttcttcagccagtatggctctgtgaaggaggtgaagatcgtgaatgacagagctggggtgtccaagggctacggctttgtgacctttgagacccaggaggatgcccagaagatcctgcaggaggccgagaagctgaactacaaggacaagaagctgaacatcggccctgccatcaggaagcagcaggtgggcatccccaggagcagcatcatgcctgctgctggcaccatgtacctgaccaccagcacaggctacccctacacctaccacaacggggtggcctacttccacaccccagaggtgacctctgtgcccccaccctggcccagccgctctgtgtgcagcagccctgtgatggtggcccagcccatctaccagcagcctgcctaccactaccaggccaccacccagtacctgcccggccagtggcagtggagcgtgccccagcccagcgccagcagcgcccccttcctgtacctgcagcccagcgaggtgatctaccagcctgtggagatcgcccaggacggcggctgtgtgcccccacccctgagcctgatggagacctctgtgcctgagccctacagcgaccacggcgtgcaggccacctaccaccaggtgtatgcccccagcgccatcaccatgcctgcccctgtgatgcagcctgagcccatcaagacagtgtggagcatccactactag

SEQ ID NO: 145246 - DNA, 852 bp, synthetic construct; identical to SEQ ID NO: 145245
  misc_feature 1..852: note = Description of Artificial Sequence: Synthetic coding sequence
  source 1..852: mol_type = other DNA

SEQ ID NO: 145247 - DNA, 414 bp, synthetic construct
  misc_feature 1..414: note = Description of Artificial Sequence: Synthetic coding sequence
  source 1..414: mol_type = other DNA
atgctgagcggccgcctggtgctgggcctggtgtccatggccggccgggtgtgcctgtgccagggcagcgctggcagcggggccatcggccctgtggaggccgccatccgcaccaagctggaggaggccctgagccctgaggtgctggagctgagaaatgaaagtggcggccatgctgtgcccccaggcagcgagacccacttccgggtggccgtggtgagcagcagatttgagggcctgagccccctgcagaggcaccggctggtgcatgctgccctggccgaggagctgggcggccctgtgcacgccctggccatccaggcccggaccccagcccagtggagggagaacagccagctggacaccagccccccctgcctgggcggcaacaagaagaccctgggcaccccctag

SEQ ID NO: 145248 - DNA, 414 bp, synthetic construct; identical to SEQ ID NO: 145247
  misc_feature 1..414: note = Description of Artificial Sequence: Synthetic coding sequence
  source 1..414: mol_type = other DNA

SEQ ID NO: 145249 - DNA, 414 bp, synthetic construct; identical to SEQ ID NO: 145247
  misc_feature 1..414: note = Description of Artificial Sequence: Synthetic coding sequence
  source 1..414: mol_type = other DNA

SEQ ID NO: 145250 - DNA, 459 bp, synthetic construct
  misc_feature 1..459: note = Description of Artificial Sequence: Synthetic coding sequence
  source 1..459: mol_type = other DNA
atggccagcgccaagagcctggaccgctggaaggcccggctgctggagggcggcagcacagccctgacctacgccctggtgcgggcagaggtgtccttccctgctgaggtggcccctgtgcggcagcagggctctgtggccggggcccgggccggcgtggtgtccctgctgggctgccgcagctcctggacagctgccatggagctgtctgctgagtacctgcgggagaagctgcagagggacctggaggccgagcacgtggaggtggaggacaccaccctgaaccgctgcagctgcagcttccgggtgctggtggtgtctgccaagtttgagggcaagcccctgctgcagaggcaccggctggtgaatgcctgcctggccgaggagctgccccacatccacgcctttgagcagaagaccctgaccccagaccagtgggcccgggagcggcagaagtag

SEQ ID NO: 145251 - DNA, 306 bp, synthetic construct
  misc_feature 1..306: note = Description of Artificial Sequence: Synthetic coding sequence
  source 1..306: mol_type = other DNA
atggccgcctggagccctgctgctgctgcccccctgctgcggggcatccggggcctgcccctgcaccacaggatgtttgccacccagacagaaggagagctgcgggtgacccagatcctgaaggagaagttcccccgggccacagccatcaaggtgacagacatcagcggcaccaagagaagaaaccagagagatgcctggattgctgacatctacctgtgcccccagaccctgaccaccccctggctgcaccgctgctgctgcctgcggccctggatgaacttcacagacatcatcctgccctag

SEQ ID NO: 145252 - DNA, 324 bp, synthetic construct
  misc_feature 1..324: note = Description of Artificial Sequence: Synthetic coding sequence
  source 1..324: mol_type = other DNA
atggccgcctggagccctgctgctgctgcccccctgctgcggggcatccggggcctgcccctgcaccacaggatgtttgccacccagacagaaggagagctgcgggtgacccagatcctgaaggagaagttcccccgggccacagccatcaaggtgacagacatcagcggcggctgtggggccatgtatgagatcaagattgaaagtgaggagttcaaggagaagaggacagtgcagcagcaccagatggtgaaccaggccctgaaggaggagatcaaggagatgcacggcctgcgcatcttcacctctgtgcccaagaggtag

SEQ ID NO: 145253 - DNA, 1200 bp, synthetic construct
  misc_feature 1..1200: note = Description of Artificial Sequence: Synthetic coding sequence
  source 1..1200: mol_type = other DNA
atggcccagaggcagccccacagccccaaccagaccctcatcagcatcaccaatgacacagagagcagcagctctgtggtgtccaatgacaacaccaacaagggctggagcggggacaacagccctggcatcgaggccctgtgtgccatctacatcacctatgctgtgatcatctctgtgggcatcctgggcaatgccatcctgatcaaggtgttcttcaagaccaagtccatgcagacagtgcccaacatcttcatcaccagcctggcctttggagacctgctgctgctgctgacctgtgtgcctgtggatgccacccactacctggccgagggctggctgtttggccgcatcggctgcaaggtgctgtccttcatccggctgacctctgtgggcgtgtctgtgttcaccctgaccatcctgtctgctgaccgctacaaggctgtggtgaagcccctggagcggcagcccagcaatgccatcctgaagacctgtgtgaaggccggctgtgtgtggatcgtgtccatgatctttgccctgcctgaggccatcttcagcaatgtgtacaccttccgggaccccaacaagaacatgacctttgagagctgcaccagctaccctgtgtccaagaagctgctgcaggagatccacagcctgctgtgcttcctggtgttctacatcatccccctgagcatcatctctgtgtactacagcctcatcgcccggaccctgtacaagagcaccctgaacatccccacagaggagcagagccacgccaggaagcagatcgagagcaggaagagaattgccaggacagtgctggtgctggtggccctgtttgccctgtgctggctgcccaaccacctgctgtacctgtaccacagcttcaccagccagacctacgtggaccccagcgccatgcacttcatcttcaccatcttcagccgggtgctggccttcagcaacagctgtgtgaacccctttgccctgtactggctgagcaagagcttccagaagcacttcaaggcccagctgttctgctgcaaggccgagaggcctgagccccctgtggccgacaccagcctgaccaccctggccgtgatgggcaccgtgcccggcaccggcagcatccagatgtctgagatctctgtgaccagcttcaccggctgcagcgtgaagcaggccgaggaccgcttctag

SEQ ID NO: 145254 - DNA, 303 bp, synthetic construct
  misc_feature 1..303: note = Description of Artificial Sequence: Synthetic coding sequence
  source 1..303: mol_type = other DNA
atgagggccctgaccctgctggccctgctggccctggccgccctgtgcatcgccggccaggccggggccaagcccagcggggctgagagcagcaagggggccgcctttgtgtccaagcaggagggcagcgaggtggtgaagaggccccggcgctacctgtaccagtggctgggcgcccctgtgccctacccagaccccctggagccccggcgggaggtgtgtgagctgaacccagactgtgatgagctggccgaccacatcggcttccaggaggcctaccgccgcttctacggccctgtgtag

SEQ ID NO: 145255 - DNA, 957 bp, synthetic construct
  misc_feature 1..957: note = Description of Artificial Sequence: Synthetic coding sequence
  source 1..957: mol_type = other DNA
atggccgcccagggctgtgccgccagccggctgctgcagctgctgctgcagctgctgctgctgctgctgctgctggccgccggcggggcccgggcccgctggagaggagagggcaccagcgcccacctgcgggacatcttcctgggccgctgtgccgagtaccgggccctgctgagccctgagcagaggaacaagaactgcacagccatctgggaggccttcaaggtggccctggacaaggacccctgcagcgtgctgcccagcgactatgacctcttcatcaacctgagccgccacagcatcccccgggacaagagcctcttctgggagaacagccacctgctggtgaacagctttgctgacaacacccggcgcttcatgcccctgagtgatgtgctgtatggccgggtggccgacttcctgtcctggtgccggcagaagaatgacagcggcctggactaccagagctgccccaccagcgaggactgtgagaacaaccctgtggacagcttctggaagagggccagcatccagtacagcaaggacagcagcggggtcatccacgtgatgctgaatggcagcgagcccactggagcctaccccatcaagggcttctttgctgactatgagatccccaacctgcagaaggagaagatcacccgcatcgagatctgggtgatgcatgagatcggcggccccaacgtggagagctgtggggagggctccatgaaggtgctggagaagaggctgaaggacatgggcttccagtacagctgcatcaatgactacagacctgtgaagctgctgcagtgtgtggaccacagcacccacccagactgtgccctgaagtctgctgctgctgccacccagaggaaggcccccagcctgtacacagagcagagagctggcctcatcatccccctcttcctggtgctggccagcaggacccagctgtag

SEQ ID NO: 145256 - DNA, 543 bp, synthetic construct
  misc_feature 1..543: note = Description of Artificial Sequence: Synthetic coding sequence
  source 1..543: mol_type = other DNA
atggccagcaccagctatgactactgccgggtgcccatggaggatggagacaagcgctgcaagctgctgctgggcatcggcatcctggtgctgctgatcatcgtcatcctgggcgtgcccctcatcatcttcaccatcaaggccaacagcgaggcctgcagagatggcctgcgggctgtgatggagtgcagaaatgtgacccacctgctgcagcaggagctgacagaggcccagaagggcttccaggatgtggaggcccaggccgccacctgcaaccacacagtgatggccctgatggccagcctggatgctgagaaggcccagggccagaagaaggtggaggagctggagggggagatcaccaccctgaaccacaagctgcaggatgccagcgctgaggtggagcggctgcggcgggagaaccaggtgctgtctgtgagaattgctgacaagaagtactaccccagcagccaggacagcagcagcgctgctgccccccagctgctgattgtgctgctgggcctgagcgccctgctgcagtag

SEQ ID NO: 145257 - DNA, 651 bp, synthetic construct
  misc_feature 1..651: note = Description of Artificial Sequence: Synthetic coding sequence
  source 1..651: mol_type = other DNA
atggccagcaccagctatgactactgccgggtgcccatggaggatggagacaagcgctgcaagctgctgctgggcatcggcatcctggtgctgctgatcatcgtcatcctgggcgtgcccctcatcatcttcaccatcaaggccaacagcgaggcctgcagagatggcctgcgggctgtgatggagtgcagaaatgtgacccacctgctgcagcaggagctgacagaggcccagaagggcttccaggatgtggaggcccaggccgccacctgcaaccacacagtgatggccctgatggccagcctggatgctgagaaggcccagggccagaagaaggtggaggagctggagggggagatcaccaccctgaaccacaagctgcaggatgccagcgctgaggtggagcggctgcggcgggagaaccaggtgctgtctgtgagaattgctgacaagaagtactaccccagcagccacttccccagcaccccccagagccggctgcagacccagctgaccaccctgaagattgagatggatgaggccaaggcccagggcacccagatgggcgcagaaaatggagccctgaccggggccctgggctgcaagggcgtgggccgggacagaagtggccgcagcctgggggagagctag

SEQ ID NO: 145258 - DNA, 1179 bp, synthetic construct
  misc_feature 1..1179: note = Description of Artificial Sequence: Synthetic coding sequence
  source 1..1179: mol_type = other DNA
atggtgctgctgagcatcctgcgcatcctcttcctgtgtgagctggtgctcttcatggagcaccgggcccagatggccgagggcggccagagcagcatcgccctgctggccgaggcccccaccctgcccctgattgaggagctgctggaggagagccctggagagcagcccaggaagccccggctgctgggccacagcctgcgctacatgctggagctgtacagaagatctgctgacagccacggccacccccgggagaacagaaccatcggggccaccatggtgcggctggtgaagcccctgaccaacgtggcccggccccaccggggcacctggcacatccagatcctgggcttccccctgcggcccaacagaggcctgtaccagctggtgcgggccaccgtggtgtaccgccaccacctgcagctgacccgcttcaacctgagctgccacgtggagccctgggtgcagaagaaccccaccaaccacttccccagcagcgagggggacagcagcaagcccagcctgatgagcaatgcctggaaggagatggacatcacccagctggtgcagcagcgcttctggaacaacaagggccaccgcatcctgcggctgcgcttcatgtgccagcagcagaaggacagcggcggcctggagctgtggcacggcaccagcagcctggacatcgccttcctgctgctgtacttcaatgacacccacaagagcatcaggaaggccaagttcctgccccggggcatggaggagttcatggagcgggagagcctgctgcggaggacccggcaggctgatggcatctctgctgaggtgacagccagcagcagcaagcacagcggccctgagaacaaccagtgcagcctgcaccccttccagatctccttccggcagctgggctgggaccactggatcatcgccccacccttctacacccccaactactgcaagggcacctgcctgcgggtgctgagagatggcctgaacagccccaaccacgccatcatccagaacctgatcaaccagctggtggaccagagcgtgccccggcccagctgtgtgccctacaagtatgtgcccatctctgtgctgatgattgaggccaacggcagcatcctgtacaaggagtatgagggcatgattgctgagagctgcacctgcaggtag

SEQ ID NO: 145259 - DNA, 1419 bp, synthetic construct
  misc_feature 1..1419: note = Description of Artificial Sequence: Synthetic coding sequence
  source 1..1419: mol_type = other DNA
atggccggggccagccggctgctcttcctgtggctgggctgcttctgtgtgtccctggcccagggcgagcggcccaagccacccttccctgagctgaggaaggctgtgcctggggacagaacagctgggggcggccctgacagcgagctgcagccccaggacaaggtgtctgagcacatgctgcggctgtatgaccgctacagcacagtgcaggccgcccggaccccaggcagcctggagggcggcagccagccctggaggccccggctgctgcgggagggcaacacagtgcgctccttccgggctgctgctgctgagaccctggagaggaagggcctgtacatcttcaacctgaccagcctgaccaagtctgagaacatcctgagcgccaccctgtacttctgcatcggggagctgggcaacatcagcctgagctgccctgtgtctgggggctgcagccaccacgcccagaggaagcacatccagattgacctgagcgcctggaccctgaagttcagcaggaaccagagccagctgctgggccacctgtctgtggacatggccaagagccaccgggacatcatgtcctggctgagcaaggacatcacccagctgctgaggaaggccaaggaaaatgaggagttcctgattggcttcaacatcaccagcaagggccggcagctgcccaagaggcggctgcccttccctgagccctacatcctggtgtatgccaatgatgctgccatcagcgagcctgagagcgtggtgagcagcctgcagggccacaggaacttccccactggaacagtgcccaagtgggacagccacatccgggccgccctgagcattgaaagaaggaagaagaggagcactggagtgctgctgcccctgcagaacaatgagctgcctggagctgagtaccagtacaagaaggatgaggtgtgggaggagaggaagccctacaagaccctgcaggcccaggcccctgagaagagcaagaacaagaagaagcagaggaagggcccccacaggaagagccagaccctgcagtttgatgagcagaccctgaagaaggcccggaggaagcagtggattgagcccaggaactgtgcccggcgctacctgaaggtggactttgctgacatcggctggagcgagtggatcatcagccccaagagctttgatgcctactactgcagcggggcctgccagttccccatgcccaagagcctgaagcccagcaaccacgccaccatccagagcatcgtgcgggctgtgggcgtggtgcccggcatccctgagccctgctgcgtgcctgagaagatgagcagcctgagcatcctcttctttgatgagaacaagaatgtggtgctgaaggtgtaccccaacatgacagtggagagctgtgcctgcaggtag

SEQ ID NO: 145260 - DNA, 213 bp, synthetic construct
  misc_feature 1..213: note = Description of Artificial Sequence: Synthetic coding sequence
  source 1..213: mol_type = other DNA
tgcttcttctactacctgaagagcctgaagcccagcaaccacgccaccatccagagcatcgtgcgggctgtgggcgtggtgcccggcatccctgagccctgctgcgtgcctgagaagatgagcagcctgagcatcctcttctttgatgagaacaagaatgtggtgctgaaggtgtaccccaacatgacagtggagagctgtgcctgcaggtag

SEQ ID NO: 145261 - DNA, 1227 bp, synthetic construct
  misc_feature 1..1227: note = Description of Artificial Sequence: Synthetic coding sequence
  source 1..1227: mol_type = other DNA
atgatccctggcaacaggatgctgatggtggtgctgctgtgccaggtgctgctgggcggggccagccacgccagcctcatccctgagaccgggaagaagaaggtggccgagatccagggccacgccggcggcagaagaagtggccagagccatgagctgctgcgggactttgaggccaccctgctgcagatgtttggcctgcggcggcggccccagcccagcaagtctgctgtgatcccagactacatgagggacctgtaccgcctgcagagcggggaggaggaggaggagcagatccacagcacaggcctggagtacccagagaggcctgccagccgggccaacacagtgcgctccttccaccacgaggagcacctggagaacatccctggcaccagcgagaacagcgccttccgcttcctgttcaacctgagcagcatcccagaaaatgaggtgatcagcagcgctgagctgcggctcttccgggagcaggtggaccagggccctgactgggagcggggcttccaccgcatcaacatctatgaggtgatgaagcccccagctgaggtggtgcccggccacctgatcacccggctgctggacacccggctggtgcaccacaacgtgacccgctgggagacctttgatgtgtccccagctgtgctgcgctggacccgggagaagcagcccaactacggcctggccatcgaggtgacccacctgcaccagaccaggacccaccagggccagcacgtgcgcatcagccgcagcctgccccagggcagcggcaactgggcccagctgcggcccctgctggtgacctttggacatgatggccggggccacgccctgaccaggagaagaagagccaagaggagccccaagcaccacagccagagggccaggaagaagaacaagaactgcagaagacacagcctgtatgtggacttcagtgatgtgggctggaatgactggatcgtggcccctcctggctaccaggccttctactgccacggggactgccccttccccctggccgaccacctgaacagcaccaaccacgccatcgtgcagaccctggtgaacagcgtgaacagcagcatccccaaggcctgctgcgtgcccacagagctgagcgccatctccatgctgtacctggatgaatatgacaaggtggtgctgaagaactaccaggagatggtggtggagggctgcggctgcaggtag

SEQ ID NO: 145262 - DNA, 1227 bp, synthetic construct; identical to SEQ ID NO: 145261
  misc_feature 1..1227: note = Description of Artificial Sequence: Synthetic coding sequence
  source 1..1227: mol_type = other DNA

SEQ ID NO: 145263 - DNA, 1227 bp, synthetic construct; identical to SEQ ID NO: 145261
  misc_feature 1..1227: note = Description of Artificial Sequence: Synthetic coding sequence
  source 1..1227: mol_type = other DNA

SEQ ID NO: 145264 - DNA, 1227 bp, synthetic construct; identical to SEQ ID NO: 145261
  misc_feature 1..1227: note = Description of Artificial Sequence: Synthetic coding sequence
  source 1..1227: mol_type = other DNA

SEQ ID NO: 145265 - DNA, 333 bp, synthetic construct
  misc_feature 1..333: note = Description of Artificial Sequence: Synthetic coding sequence
  source 1..333: mol_type = other DNA
atgatccctggcaacaggatgctgatggtggtgctgctgtgccaggtgctgctgggcggggccagccacgccagcctcatccctgagaccgggaagaagaaggtggccgagatccagggccacgccggcggcagaagaagtggccagagccatgagctgctgcgggactttgaggccaccctgctgcagatgtttggcctgcggcggcggccccagcccagcaagtctgctgtgatcccagactacatgagggacctgtaccgcctgcagagcggggaggaggaggaggagcagatccacagcacaggcctggagtacccagagcggccctag

SEQ ID NO: 145266 - DNA, 1365 bp, synthetic construct
  misc_feature 1..1365: note = Description of Artificial Sequence: Synthetic coding sequence
  source 1..1365: mol_type = other DNA
atgcacctgaccgtcttcctgctgaagggcatcgtgggcttcctgtggagctgctgggtgctggtgggctacgccaagggcggcctgggggacaaccacgtgcacagcagcttcatctacagaaggctgaggaaccacgagcggcgggagatccagcgggagatcctgagcatcctgggcctgccccaccggccccggcccttcagccctgggaagcaggccagcagcgcccccctcttcatgctggacctgtacaatgccatgaccaatgaggagaaccctgaggagagcgagtacagcgtgcgggccagcctggccgaggagaccaggggggccaggaagggctacccagccagccccaacggctacccccggcgcatccagctgagcaggaccacccccctgaccacccagagcccccccctggccagcctgcatgacaccaacttcctgaatgatgctgacatggtgatgagctttgtgaacctggtggagcgggacaaggacttcagccaccagaggaggcactacaaggagttccgctttgacctgacccagatcccccatggagaggccgtgacagctgctgagttccgcatctacaaggacaggagcaacaacagatttgaaaatgagaccatcaagatcagcatctaccagatcatcaaggagtacaccaacagagatgctgacctcttcctgctggacaccaggaaggcccaggccctggatgtgggctggctggtgtttgacatcaccgtgaccagcaaccactgggtgatcaacccccagaacaacctgggcctgcagctgtgtgccgagactggagatggccgcagcatcaacgtgaagtctgctggcctggtgggccggcagggcccccagagcaagcagcccttcatggtggccttcttcaaggccagcgaggtgctgctgcggtctgtgcgggccgccaacaagaggaagaaccagaacagaaacaagagcagcagccaccaggacagcagcaggatgagctctgtgggggactacaacaccagcgagcagaagcaggcctgcaagaagcatgagctgtatgtgtccttccgggacctgggctggcaggactggatcatcgcccctgagggctacgccgccttctactgtgatggagaatgttccttccccctgaatgcccacatgaatgccaccaaccacgccatcgtgcagaccctggtgcacctgatgtttcctgaccacgtgcccaagccctgctgtgcccccaccaagctgaatgccatctctgtgctgtactttgatgacagcagcaatgtcatcctgaagaagtacagaaacatggtggtgcgcagctgtggctgccactag

SEQ ID NO: 145267 - DNA, 1254 bp, synthetic construct
  misc_feature 1..1254: note = Description of Artificial Sequence: Synthetic coding sequence
  source 1..1254: mol_type = other DNA
atgcacctgaccgtcttcctgctgaagggcatcgtgggcttcctgtggagctgctgggtgctggtgggctacgccaagggcggcctgggggacaaccacgtgcacagcagcttcatctacagaaggctgaggaaccacgagcggcgggagatccagcgggagatcctgagcatcctgggcctgccccaccggccccggcccttcagccctgggaagcaggccagcagcgcccccctcttcatgctggacctgtacaatgccatgaccaatgaggagaaccctgaggagagcgagtacagcgtgcgggccagcctggccgaggagaccaggggggccaggaagggctacccagccagccccaacggctacccccggcgcatccagctgagcaggaccacccccctgaccacccagagcccccccctggccagcctgcatgacaccaacttcctgaatgatgctgacatggtgatgagctttgtgaacctggtggagcgggacaaggacttcagccaccagaggaggcactacaaggagttccgctttgacctgacccagatcccccatggagaggccgtgacagctgctgagttccgcatctacaaggacaggagcaacaacagatttgaaaatgagaccatcaagatcagcatctaccagatcatcaaggagtacaccaacagagatgctgacctcttcctgctggacaccaggaaggcccaggccctggatgtgggctggctggtgtttgacatcaccgtgaccagcaaccactgggtgatcaacccccagaacaacctgggcctgcagctgtgtgccgagactggagatggccgcagcatcaacgtgaagtctgctggcctggtgggccggcagggcccccagagcaagcagcccttcatggtggccttcttcaaggccagcgaggtgctgctgcggtctgtgcgggccgccaacaagaggaagaaccagaacagaaacaagagcagcagccaccaggacagcagcaggatgagctctgtgggggactacaacaccagcgagcagaagcaggcctgcaagaagcatgagctgtatgtgtccttccgggacctgggctggcaggtgcacctgatgtttcctgaccacgtgcccaagccctgctgtgcccccaccaagctgaatgccatctctgtgctgtactttgatgacagcagcaatgtcatcctgaagaagtacagaaacatggtggtgcgcagctgtggctgccactag

SEQ ID NO: 145268 - DNA, 1542 bp, synthetic construct
  misc_feature 1..1542: note = Description of Artificial Sequence: Synthetic coding sequence
  source 1..1542: mol_type = other DNA
atgcctggcctgggccggcgggcccagtggctgtgctggtggtggggcctgctgtgcagctgctgcggccccccacccctgcggccccccctgcctgctgctgctgctgctgctgctgggggccagctgctgggagatggcggcagccctggccgcacagagcagcccccacccagcccccagagcagcagcggcttcctgtacagaaggctgaagacccaggagaagcgggagatgcagaaggagatcctgtctgtgctgggcctgccccaccggccccggcccctgcacggcctgcagcagccccagcccccagccctgcggcagcaggaggagcagcagcagcagcagcagctgcccagaggagagcccccacctggccgcctgaagagcgcccccctcttcatgctggacctgtacaatgccctgtctgctgacaatgatgaagatggagccagcgagggggagcggcagcagagctggccccatgaagctgccagcagcagccagaggcggcagcccccacctggggccgcccaccccctgaacaggaagagcctgctggcccctggcagcggcagcggcggggccagccccctgaccagcgcccaggacagcgccttcctgaatgatgctgacatggtgatgagctttgtgaacctggtggagtatgacaaggagttcagcccccggcagaggcaccacaaggagttcaagttcaacctgagccagatccctgagggggaggtggtgacagctgctgagttccgcatctacaaggactgtgtgatgggcagcttcaagaaccagaccttcctgatcagcatctaccaggtgctgcaggagcaccagcaccgggacagcgacctcttcctgctggacaccagggtggtgtgggccagcgaggagggctggctggagtttgacatcacagccaccagcaacctgtgggtggtgaccccccagcacaacatgggcctgcagctgtctgtggtgaccagagatggagtgcacgtgcaccccagggctgctggcctggtgggcagagatggcccctatgacaagcagcccttcatggtggccttcttcaaggtgtctgaggtgcacgtgaggaccaccaggtctgccagcagcagaagacggcagcagagcaggaacagaagcacccagagccaggatgtggcccgggtgtcctctgccagtgactacaacagcagcgagctgaagacagcctgcaggaagcatgagctgtatgtgtccttccaggacctgggctggcaggactggatcatcgcccccaagggctatgctgccaactactgtgatggagagtgcagcttccccctgaatgcccacatgaatgccaccaaccacgccatcgtgcagaccctggtgcacctgatgaacccagaatatgtgcccaagccctgctgtgcccccaccaagctgaatgccatctctgtgctgtactttgatgacaacagcaatgtcatcctgaagaagtacagaaacatggtggtgcgggcctgtggctgccactag

SEQ ID NO: 145269 - DNA, 1308 bp, synthetic construct
  misc_feature 1..1308: note = Description of Artificial Sequence: Synthetic coding sequence
  source 1..1308: mol_type = other DNA
atgcagaaggagatcctgtctgtgctgggcctgccccaccggccccggcccctgcacggcctgcagcagccccagcccccagccctgcggcagcaggaggagcagcagcagcagcagcagctgcccagaggagagcccccacctggccgcctgaagagcgcccccctcttcatgctggacctgtacaatgccctgtctgctgacaatgatgaagatggagccagcgagggggagcggcagcagagctggccccatgaagctgccagcagcagccagaggcggcagcccccacctggggccgcccaccccctgaacaggaagagcctgctggcccctggcagcggcagcggcggggccagccccctgaccagcgcccaggacagcgccttcctgaatgatgctgacatggtgatgagctttgtgaacctggtggagtatgacaaggagttcagcccccggcagaggcaccacaaggagttcaagttcaacctgagccagatccctgagggggaggtggtgacagctgctgagttccgcatctacaaggactgtgtgatgggcagcttcaagaaccagaccttcctgatcagcatctaccaggtgctgcaggagcaccagcaccgggacagcgacctcttcctgctggacaccagggtggtgtgggccagcgaggagggctggctggagtttgacatcacagccaccagcaacctgtgggtggtgaccccccagcacaacatgggcctgcagctgtctgtggtgaccagagatggagtgcacgtgcaccccagggctgctggcctggtgggcagagatggcccctatgacaagcagcccttcatggtggccttcttcaaggtgtctgaggtgcacgtgaggaccaccaggtctgccagcagcagaagacggcagcagagcaggaacagaagcacccagagccaggatgtggcccgggtgtcctctgccagtgactacaacagcagcgagctgaagacagcctgcaggaagcatgagctgtatgtgtccttccaggacctgggctggcaggactggatcatcgcccccaagggctatgctgccaactactgtgatggagagtgcagcttccccctgaatgcccacatgaatgccaccaaccacgccatcgtgcagaccctggtgcacctgatgaacccagaatatgtgcccaagccctgctgtgcccccaccaagctgaatgccatctctgtgctgtactttgatgacaacagcaatgtcatcctgaagaagtacagaaacatggtggtgcgggcctgtggctgccactag

SEQ ID NO: 145270 - DNA, 1431 bp, synthetic construct
  misc_feature 1..1431: note = Description of Artificial Sequence: Synthetic coding sequence
  source 1..1431: mol_type = other DNA
gctgctgggggccagctgctgggagatggcggcagccctggccgcacagagcagcccccacccagcccccagagcagcagcggcttcctgtaccgccgcctgaagacccaggagaagcgggagatgcagaaggagatcctgtctgtgctgggcctgccccaccggccccggcccctgcacggcctgcagcagccccagcccccagccctgcggcagcaggaggagcagcagcagcagcagcagctgcccagaggagagcccccacctggccgcctgaagagcgcccccctcttcatgctggacctgtacaatgccctgtctgctgacaatgatgaagatggagccagcgagggggagcggcagcagagctggccccatgaggccgccagcagcagccagaggcggcagcccccacctggagctgcccaccccctgaacaggaagagcctgctggcccctggcagcggcagcggcggggccagccccctgaccagcgcccaggacagcgccttcctgaatgatgctgacatggtgatgagctttgtgaacctggtggagtatgacaaggagttcagcccccggcagaggcaccacaaggagttcaagttcaacctgagccagatccctgagggggaggtggtgacagctgctgagttccgcatctacaaggactgtgtgatgggcagcttcaagaaccagaccttcctgatcagcatctaccaggtgctgcaggagcaccagcaccgggacagcgacctcttcctgctggacaccagggtggtgtgggccagcgaggagggctggctggagtttgacatcacagccaccagcaacctgtgggtggtgaccccccagcacaacatgggcctgcagctgtctgtggtgaccagagatggagtgcacgtgcaccccagggctgctggcctggtgggcagagatggcccctatgacaagcagcccttcatggtggccttcttcaaggtgtctgaggtgcacgtgaggaccaccaggtctgccagcagcagaagacggcagcagagcaggaacagaagcacccagagccaggatgtggcccgggtgagcagcgccagtgactacaacagcagcgagctgaagacagcctgcaggaagcatgagctgtatgtgtccttccaggacctgggctggcaggactggatcatcgcccccaagggctacgccgccaactactgtgatggagaatgttccttccccctgaatgcccacatgaatgccaccaaccacgccatcgtgcagaccctggtgcacctgatgaacccagaatatgtgcccaagccctgctgtgcccccaccaagctgaatgccatctctgtgctgtactttgatgacaacagcaatgtcatcctgaagaagtacagaaacatggtggtgcgggcctgtggctgccactag

SEQ ID NO: 145271 - DNA, 2505 bp, synthetic construct
  misc_feature 1..2505: note = Description of Artificial Sequence: Synthetic coding sequence
  source 1..2505: mol_type = other DNA
atggaggagaagacccagatcaagaccttcctgggcagcaagctgcccaagtatggcaccaagtctgtgcgcagcaccctgcagcccatgcccaacggcacccctgtgaacctgctgggcaccagcaagaacagcaatgtgaagagctacatcaagaacaacggcagtgactgccccagcagccacagcttcaactggaggaaggccaacaagtaccagctgtgtgcccagggcgtggaggagcccaacaacacccagaacagccatgacaagatcattgatcctgagaagagggtgcccacccagggcatgtttgacaagaatggcatcaagggcggcctgaagtctgtgtccctcttcaccagcaagctggccaagcccagcaccatgtttgtgagcagcacagaggagctgaaccagaagagcttcagcggccccagcaacctgggcaagttcaccaagggcaccctgctgggccgcaccagctacagcagcatcaacacccccaagagccagctgaatggcttctacggcaacagatctgctggctccatgcagaggccccgggccaacagctgtgccaccaggagcagcagtggagagagcctggcccagagcccagacagcagcaagagcatcaactgtgagaagatggtgcgcagccagagcttcagccacagcatccagaacagcttcctgccccccagcagcatcaccaggagccacagcttcaacagagctgtggacctgaccaagccctaccagaaccagcagctgagcatccgggtgcccctgcggagctccatgctgaccaggaacagccggcagcctgaggtgctgaatggaaatgagcacctgggctacggcttcaaccggccctatgctgctgggggcaagaagctggccctgcccaatggacctggggtgaccagcaccctgggctacaggatggtgcaccccagcctgctgaagagcagccgcagccccttcagcggcaccatgacagtggatggcaacaagaacagccctgctgacacctgtgtggaggaggatgccaccgtgctggccaaggaccgggccgccaacaaggaccaggagctgattgaaaatgaaagctaccgcaccaagaacaaccagaccatgaagcatgatgccaagatgagatacctgagtgatgatgtggatgacatcagcctgagcagcctgagcagcagtgacaagaatgacctgtctgaggacttcagtgatgacttcattgatattgaggacagcaacagaacccgcatcaccccagaggagatgagcctgaaggaggagaagcatgaaaatggaccaccccaggacatgtttgacagccccaaggaaaatgagaaggccttcagcaagacagatgagtggattgacatctctgtgtctgacagaagtgagtgcaccaagcacaccagcggcaacaacctggtgtccccagacacagactacagagctggcagcagctttgagctgagccccagcgacagcagtgatggcacctacatgtgggatgaggagggcctggagcccatcggaaatgtgcaccctgtgggcagctatgagagcagcgagatgaacagcattgacatcctgaacaacctggagagctgtgacctggaggatgatgacctgatgctggatgtggacctgcctgaagatgcccccctggagaatgtggagtgtgacaacatgaacagatttgacagaccagacagaaatgtgcggcagccccaggagggcttctggaagaggcctccccagcgctggagcggccaggagcactaccacctgagccacccagaccactaccaccaccacggcaagagtgacctgagccggggcagcccctaccgggagagccccctgggccactttgagagctatggaggcatgcccttcttccaggcccagaagatgtttgtggatgtgcctgaaaatacagtcatcctggatgagatgaccctgcggcacatggtgcaggactgcacagctgtgaagacccagctgctgaagctgaagaggctgctgcaccagcatgatggcagcggcagcctgcatgacatccagctgagcctgcccagcagccctgagccagaagatggagacaaggtgtacaagaatgaagacctgctgaatgagatcaagcagctgaaggatgagatcaagaagaaggatgagaagatccagctgctggagctgcagctggccacccagcacatctgccaccagaagtgcaaggaggagaagtgcacctatgctgacaagtacacccagaccccctggaggcgcatccctgggggctacagcgcccccagcttcagcccctggcagggcagcttccagggcatccccaggacagtgcccccccaccggcggcagaccagcagcaccacagccttccagcagcccagccagacccacaggagccaccctgggaagaccaacaaggccaccacctaccggggcccccagtag

SEQ ID NO: 145272 - DNA, 1599 bp, synthetic construct
  misc_feature 1..1599: note = Description of Artificial Sequence: Synthetic coding sequence
  source 1..1599: mol_type = other DNA
atgccccagctgtacatctacatccggctgctgggcgcctacctgttcatcatcagccgggtgcagggccagaacctggacagcatgctgcatggaacaggcatgaagagtgacagcgaccagaagaagtcagaaaatggagtgaccctggcccctgaggacaccctgcccttcctgaagtgctactgcagcggccactgcccagatgatgccatcaacaacacctgcatcaccaacggccactgctttgccatcatcgaggaggatgaccagggcgagaccaccctggccagcggctgcatgaagtatgagggcagtgacttccagtgcaaggacagccccaaggcccagctgcggaggaccatcgagtgctgcaggaccaacctgtgcaaccagtacctgcagcccaccctgccccctgtggtgattggccccttctttgatggcagcatccgctggctggtgctgctgatctccatggctgtgtgcatcatcgccatgatcatcttcagcagctgcttctgctacaagcactactgcaagagcatcagcagcagaagacgctacaacagagacctggagcaggatgaggccttcatccctgtgggggagagcctgaaggacctgattgaccagagccagagcagcggcagcggcagcggcctgcccctgctggtgcagaggaccatcgccaagcagatccagatggtgcggcaggtgggcaagggccgctatggagaggtgtggatgggcaagtggagaggagagaaggtggccgtgaaggtgttcttcaccacagaggaggcctcctggttccgggagacagagatctaccagacagtgctgatgagacatgagaacatcctgggcttcatcgctgctgacatcaagggcaccggctcctggacccagctgtacctgatcacagactaccatgaaaatggcagcctgtatgacttcctgaagtgtgccaccctggacacccgggccctgctgaagctggcctacagcgctgcctgtggcctgtgccacctgcacacagagatctacggcacccagggcaagccagccatcgcccaccgggacctgaagagcaagaacatcctgatcaagaagaatggcagctgctgcatcgctgacctgggcctggccgtgaagttcaacagcgacaccaatgaggtggatgtgcccctgaacaccagggtgggcaccaagcgctacatggcccctgaggtgctggatgagagcctgaacaagaaccacttccagccctacatcatggctgacatctacagctttggcctcatcatctgggagatggcccggcgctgcatcaccggcggcatcgtggaggagtaccagctgccctactacaacatggtgcccagcgaccccagctatgaggacatgagggaggtggtgtgtgtgaagaggctgcggcccatcgtgagcaaccgctggaacagtgatgaatgtctgcgggctgtgctgaagctgatgtctgagtgctgggcccacaacccagccagccggctgacagccctgcgcatcaagaagaccctggccaagatggtggagagccaggatgtgaagatctag

SEQ ID NO: 145273 - DNA, 3117 bp, synthetic construct
  misc_feature 1..3117: note = Description of Artificial Sequence: Synthetic coding sequence
  source 1..3117: mol_type = other DNA
atgaccagcagcctgcagaggccctggagggtgccctggctgccctggaccatcctgctggtgtccacagctgctgccagccagaaccaggagcggctgtgtgccttcaaggacccctaccagcaggacctgggcatcggggagagccgcatcagccatgaaaatggcaccatcctgtgcagcaagggcagcacctgctacggcctgtgggagaagagcaagggggacatcaacctggtgaagcagggctgctggagccacatcggggacccccaggagtgccactatgaggagtgtgtggtgaccaccaccccacccagcatccagaatggcacctaccgcttctgctgctgcagcacagacctgtgcaatgtgaacttcacagagaacttccccccaccagacaccacccccctgagccccccccacagcttcaacagagatgagaccatcatcatcgccctggcctctgtgtctgtgctggccgtgctgattgtggccctgtgcttcggctacaggatgctgaccggggacaggaagcagggcctgcacagcatgaacatgatggaggccgccgccagcgagcccagcctggacctggacaacctgaagctgctggagctgattggccggggccgctacggggctgtgtacaagggcagcctggatgagaggcctgtggccgtgaaggtgttctcctttgccaaccggcagaacttcatcaatgagaagaacatctacagagtgcccctgatggagcatgacaacatcgcccgcttcatcgtgggagatgagcgggtgacagcagatggccgcatggagtacctgctggtgatggagtactaccccaacggcagcctgtgcaagtacctgagcctgcacaccagtgactgggtgagcagctgccgcctggcccacagcgtgacccggggcctggcctacctgcacacagagctgcccaggggggaccactacaagccagccatcagccaccgggacctgaacagcagaaatgtgctggtgaagaatgatggcacctgtgtgatcagtgactttggcctgtccatgaggctgactggaaaccggctggtgcggcctggagaagaagataatgctgccatcagcgaggtgggcaccatccgctacatggcccctgaggtgctggagggcgctgtgaacctgcgggactgtgagagcgccctgaagcaggtggacatgtatgccctgggcctcatctactgggagatcttcatgcgctgcacagacctcttccctggagagagcgtgcctgagtaccagatggccttccagacagaggtgggcaaccaccccacctttgaggacatgcaggtgctggtgtcccgggagaagcagaggcccaagtttcctgaggcctggaaggagaacagcctggccgtgcgcagcctgaaggagaccatcgaggactgctgggaccaggatgctgaggcccggctgacagcccagtgtgccgaggagaggatggccgagctgatgatgatctgggagaggaacaagtctgtgagccccaccgtgaaccccatgagcacagccatgcagaatgaaagaaacctgagccacaacagaagagtgcccaagattggcccctacccagactacagcagcagcagctacattgaagattccatccaccacacagacagcatcgtgaagaacatcagcagcgagcacagcatgagcagcacccccctgaccatcggggagaagaacagaaacagcatcaactatgagcggcagcaggcccaggcccgcatccccagccctgagacctctgtgaccagcctgagcaccaacaccaccaccaccaacaccaccggcctgacccccagcacaggcatgaccaccatcagcgagatgccctacccagatgagaccaacctgcacaccaccaacgtggcccagagcatcggccccacccctgtgtgcctgcagctgacagaggaggacctggagaccaacaagctggaccccaaggaggtggacaagaacctgaaggagagcagtgatgagaacctgatggagcacagcctgaagcagttcagcggccctgaccccctgagcagcaccagcagcagcctgctgtaccccctcatcaagctggccgtggaggccaccggccagcaggacttcacccagacagccaacggccaggcctgcctgatcccagatgtgctgcccacccagatctaccccctgcccaagcagcagaacctgcccaagaggcccaccagcctgcccctgaacaccaagaacagcaccaaggagccccggctgaagtttggcagcaagcacaagagcaacctgaagcaggtggagaccggggtggccaagatgaacaccatcaatgctgctgagccccacgtggtgacagtgaccatgaatggagtggccggcaggaaccacagcgtgaacagccacgccgccaccacccagtatgccaatggaacagtgctgagcggccagaccaccaacatcgtgacccaccgggcccaggagatgctgcagaaccagttcatcggggaggacacccggctgaacatcaacagcagcccagatgaacatgagcccctgctgcggcgggagcagcaggccggccatgatgagggcgtgctggaccggctggtggaccggcgggagcggcccctggagggcggccgcaccaacagcaacaacaacaacagcaacccctgcagcgagcaggatgtgctggcccagggcgtgcccagcacagctgctgaccccggccccagcaagccccggcgggcccagaggcccaacagcctggacctgagcgccaccaacgtgctggatggcagcagcatccagatcggggagagcacccaggacggcaagagcggcagcggggagaagatcaagaagagggtgaagaccccctacagcctgaagcgctggaggcccagcacctgggtgatcagcacagagagcctggactgtgaggtgaacaacaacggcagcaacagagctgtgcacagcaagagcagcacagctgtgtacctggccgagggcggcacagccaccaccatggtgtccaaggacatcggcatgaactgcctgtag

SEQ ID NO: 145274 - DNA, 2337 bp, synthetic construct
  misc_feature 1..2337: note = Description of Artificial Sequence: Synthetic coding sequence
  source 1..2337: mol_type = other DNA
atgagcagcggggccaaggagggcggcggcggcagccctgcctaccacctgccccacccccacccccaccccccccagcacgcccagtatgtgggcccctaccgcctggagaagaccctgggcaagggccagacaggcctggtgaagctgggcgtgcactgcatcaccggccagaaggtggccatcaagatcgtgaaccgggagaagctgtctgagagcgtgctgatgaaggtggagcgggagatcgccatcctgaagctgattgagcacccccacgtgctgaagctgcatgatgtgtatgagaacaagaagtacctgtacctggtgctggagcacgtgtctggaggagagctgtttgactacctggtgaagaagggccgcctgacccccaaggaggccaggaagttcttccggcagatcgtgtctgccctggacttctgccacagctacagcatctgccaccgggacctgaagccagagaacctgctgctggatgagaagaacaacatcagaattgctgactttggcatggccagcctgcaggtgggggacagcctgctggagaccagctgtggcagcccccactacgcctgcccagaggtgatcaagggggagaagtatgatggccggcgggctgacatgtggagctgtggggtcatcctgtttgccctgctggtgggcgccctgccctttgatgatgacaacctgcggcagctgctggagaaggtgaagaggggcgtcttccacatgccccacttcatccccccagactgccagagcctgctgcggggcatgattgaggtggagcctgagaagaggctgagcctggagcagatccagaagcacccctggtacctgggcggcaagcatgagccagacccctgcctggagcccgcccctggccggcgggtggccatgaggagcctgcccagcaatggagagctggaccctgatgtgctggagagcatggccagcctgggctgcttccgggaccgggagcggctgcaccgggagctgcggtctgaggaggagaaccaggagaagatgatctactacctgctgctggacaggaaggagcgctaccccagctgtgaggaccaggacctgcccccaagaaatgatgtggacccccccaggaagagggtggacagccccatgctgagccgccacggcaagagaagacctgagaggaagtccatggaggtgctgagcatcacagatgctgggggcggcggcagccctgtgcccacccggcgggccctggagatggcccagcacagccagaggagccgctctgtgtctggggccagcacaggcctgagcagcagccccctgagcagccccaggagccctgtgttctccttcagccctgagcctggagctggagatgaggcccggggcggcggcagccccaccagcaagacccagaccctgcccagccggggcccccggggcggcggggccggggagcagcccccaccacccagcgcccggagcacccccctgcccggccccccaggcagccccaggagcagcggcggcacccccctgcacagccccctgcacaccccccgggccagccccaccggcaccccaggcaccaccccaccacccagccctgggggcggcgtgggcggggccgcctggaggagccggctgaacagcatcagaaattccttcctgggcagcccccgcttccacaggaggaagatgcaggtgcccacagctgaggagatgagcagcctgaccccagagagcagccctgagctggccaagaggtcctggtttggaaacttcatcagcctggacaaggaggagcagatcttcctggtgctgaaggacaagcccctgagcagcatcaaggctgacatcgtgcacgccttcctgagcatccccagcctgagccacagcgtgctgagccagaccagcttccgggcagagtacaaggccagcggcggccccagcgtcttccagaagcctgtgcgcttccaggtggacatcagcagcagcgagggccctgagcccagccccaggagagatggcagcggcggcggcggcatctacagcgtgaccttcaccctcatcagcggccccagccgccgcttcaagagggtggtggagaccatccaggcccagctgctgagcacccatgaccagcccagcgtgcaggccctggctgatgagaagaatggagcccagaccaggcctgctggggccccacccaggagcctgcagcccccacctggccgcccagaccctgagctgagcagcagcccccggcggggcccccccaaggacaagaagctgctggccaccaacggcacccccctgccctag

SEQ ID NO: 145275 - DNA, 1422 bp, synthetic construct
  misc_feature 1..1422: note = Description of Artificial Sequence: Synthetic coding sequence
  source 1..1422: mol_type = other DNA
atgaggagcctgcccagcaatggagagctggaccctgatgtgctggagagcatggccagcctgggctgcttccgggaccgggagcggctgcaccgggagctgcggtctgaggaggagaaccaggagaagatgatctactacctgctgctggacaggaaggagcgctaccccagctgtgaggaccaggacctgcccccaagaaatgatgtggacccccccaggaagagggtggacagccccatgctgagcagacatggcaagaggaggcctgagaggaagtccatggaggtgctgagcatcacagatgctgggggcggcggcagccctgtgcccacccggcgggccctggagatggcccagcacagccagaggagccgctctgtgtctggggccagcacaggcctgagcagcagccccctgagcagccccaggagccctgtgttctccttcagccctgagcccggggctggagatgaggcccggggcggcggcagccccaccagcaagacccagaccctgcccagccggggcccccggggcggcggggccggggagcagcccccacctccttctgcccggagcacccccctgcccggccccccaggcagccccaggagcagcggcggcacccccctgcacagccccctgcacaccccccgggccagccccaccggcaccccaggcaccaccccaccacccagccctgggggcggcgtgggcggggccgcctggaggagccggctgaacagcatccggaacagcttcctgggcagcccccgcttccacaggaggaagatgcaggtgcccacagctgaggagatgagcagcctgaccccagagagcagccctgagctggccaagaggtcctggtttggaaacttcatcagcctggacaaggaggagcagatcttcctggtgctgaaggacaagcccctgagcagcatcaaggctgacatcgtgcacgccttcctgagcatccccagcctgagccacagcgtgctgagccagaccagcttccgggcagagtacaaggccagcggcggccccagcgtcttccagaagcctgtgcgcttccaggtggacatcagcagcagcgagggccctgagcccagccccaggagagatggcagcggcggcggcggcatctacagcgtgaccttcaccctcatcagcggccccagccgccgcttcaagagggtggtggagaccatccaggcccagctgctgagcacccatgaccagcccagcgtgcaggccctggctgatgagaagaatggagcccagaccaggcctgctggggccccacccaggagcctgcagcccccacctggccgcccagaccctgagctgagcagcagcccccggcggggcccccccaaggacaagaagctgctggccaccaacggcacccccctgccctag

SEQ ID NO: 145276 - DNA, 1422 bp, synthetic construct; identical to SEQ ID NO: 145275
  misc_feature 1..1422: note = Description of Artificial Sequence: Synthetic coding sequence
  source 1..1422: mol_type = other DNA

SEQ ID NO: 145277 - DNA, 2976 bp, synthetic construct
  misc_feature 1..2976: note = Description of Artificial Sequence: Synthetic coding sequence
  source 1..2976: mol_type = other DNA
atgaggcaccgggtgtgccggggccgcagcggccagggcagaagaagaagcagcgtcatcccctggcctgtgcccaagcacgtgggctgggtggtgctgctgggctgcggcggcagcggcaccagcatcctggtggtgtccatcgtgggcagcggcctcatcaaggccatggccccagctgagatcctgaatggcaaggagatcagcgcccagatccgggcccggctgaagaaccaggtgacccagctgaaggagcaggtgcccggcttcaccccccggctggccatcctgcaggtgggcaacagagatgacagcaacctgtacatcaacgtgaagctgaaggctgctgaggagatcggcatcaaggccacccacatcaagctgcccaggaccaccacagaaagtgaggtgatgaagtacatcaccagcctgaatgaagacagcacagtgcacggcttcctggtgcagctgcccctggacagcgagaacagcatcaacacagaggaggtgatcaatgccatcgcccctgagaaggatgtggatggcctgaccagcatcaatgctgggaagctggcccggggggacctgaatgactgcttcatcccctgcacccccaagggctgcctggagctgatcaaggagactggagtgcccatcgccggcagacatgctgtggtggtgggccgcagcaagatcgtgggcgcccccatgcatgacctgctgctgtggaacaatgccaccgtgaccacctgccacagcaagacagcccacctggatgaggaggtgaacaagggggacatcctggtggtggccaccggccagcctgagatggtgaagggggagtggatcaagccaggggccatcgtcatcgactgtggcatcaactacgtgcctgatgacaagaagcccaacggcaggaaggtggtgggagatgtggcctatgatgaggccaaggagcgggccagcttcatcacccctgtgcctgggggcgtgggccccatgacagtggccatgctgatgcagagcacagtggagagcgccaagcgcttcctggagaagttcaagccaggcaagtggatgatccagtacaacaacctgaacctgaagacccctgtgcccagcgacatcgacatcagccgcagctgcaagcccaagcccatcggcaagctggcccgggagatcggcctgctgtctgaggaggtggagctgtatggagagaccaaggccaaggtgctgctgagcgccctggagcggctgaagcacaggccagatggcaagtatgtggtggtgacaggcatcacccccacccccctgggggagggcaagagcaccaccaccatcggcctggtgcaggccctgggcgcccacctgtaccagaatgtgtttgcctgtgtgcggcagcccagccagggccccaccttcggcatcaagggcggcgctgctgggggcggctacagccaggtgatccccatggaggagttcaacctgcacctgactggagacatccacgccatcacagctgccaacaacctggtggccgccgccattgatgcccgcatcttccacgagctgacccagacagacaaggccctcttcaaccggctggtgcccagcgtgaatggagtgcggcgcttcagtgacatccagatccggcggctgaagaggctgggcatcgagaagacagaccccaccaccctgacagatgaggagatcaacagatttgcccggctggacattgatcctgagaccatcacctggcagagggtgctggacaccaatgaccgcttcctgaggaagatcaccatcggccaggcccccacagagaagggccacaccaggacagcccagtttgacatctctgtggccagcgagatcatggctgtgctggccctgaccaccagcctggaggacatgagggagcggctgggcaagatggtggtggccagcagcaagaagggggagcctgtgtctgctgaggacctgggcgtgtctggggccctgactgtgctgatgaaggatgccatcaagcccaacctgatgcagaccctggagggcacccctgtgtttgtgcacgccggcccctttgccaacatcgcccacggcaacagcagcatcatcgctgaccgcatcgccctgaagctggtgggccctgagggctttgtggtgacagaagctggctttggagctgacatcggcatggagaagttcttcaacatcaagtgccgctacagcggcctgtgcccccacgtggtggtgctggtggccaccgtgcgggccctgaagatgcatggaggcggccccaccgtgacagctggcctgcccctgcccaaggcctacatccaggagaacctggagctggtggagaagggcttcagcaacctgaagaagcagattgaaaatgccaggatgtttggcatccctgtggtggtggccgtgaatgccttcaagacagacacagaaagtgagctggacctgatcagccggctgagccgggagcacggggcctttgatgctgtgaagtgcacccactgggccgagggcggcaaaggagccctggccctggcccaggccgtgcagagagctgcccaggcccccagcagcttccagctgctgtatgacctgaagctgcctgtggaggacaagatccgcatcatcgcccagaagatctacggggctgatgacatcgagctgctgcctgaggcccagcacaaggccgaggtgtacaccaagcagggctttggaaacctgcccatctgcatggccaagacccacctgagcctgagccacaaccctgagcagaagggcgtgcccaccggcttcatcctgcccatccgggacatccgggcctctgtgggcgccggcttcctgtaccccctggtgggcaccatgagcaccatgcctggcctgcccacccggccctgcttctatgacatcgacctggaccctgagacagagcaggtgaatggcctcttctag

SEQ ID NO: 145278 - DNA, 1176 bp, synthetic construct
  misc_feature 1..1176: note = Description of Artificial Sequence: Synthetic coding sequence
  source 1..1176: mol_type = other DNA
atgttcagcccctggaagatctccatgttcctgtctgtgagagaagattctgtgcccaccacagccagcttctctgctgacatgctgaatgtgaccctgcagggccccaccctgaatggcacctttgcccagagcaagtgcccccaggtggagtggctgggctggctgaacaccatccagccccccttcctgtgggtgctgtttgtgctggccaccctggagaacatctttgtgctgagcgtcttctgcctgcacaagagcagctgcaccgtggccgagatctacctgggcaacctggccgctgctgacctgatcctggcctgtggcctgcccttctgggccatcaccatcagcaacaactttgactggctgtttggagagaccctgtgccgggtggtgaatgccatcatctccatgaacctgtacagcagcatctgcttcctgatgctggtgtccattgaccgctacctggccctggtgaagaccatgtccatgggccgcatgaggggcgtgcgctgggccaagctgtacagcctggtgatctggggctgcaccctgctgctgagcagccccatgctggtgttccgcaccatgaaggagtacagtgatgagggccacaacgtgacagcctgtgtgatctcctaccccagcctcatctgggaggtgttcaccaacatgctgctgaatgtggtgggcttcctgctgcccctgagcgtcatcaccttctgcaccatgcagatcatgcaggtgctgaggaacaatgagatgcagaagttcaaggagatccagacagagcggcgggccaccgtgctggtgctggtggtgctgctgctcttcatcatctgctggctgcccttccagatcagcaccttcctggacaccctgcaccggctgggcatcctgagcagctgccaggatgagcgcatcattgatgtgatcacccagatcgccagcttcatggcctacagcaacagctgcctgaaccccctggtgtatgtgattgtgggcaagcgcttcaggaagaagtcctgggaggtgtaccagggcgtgtgccagaagggcggctgccgctctgagcccatccagatggagaacagcatgggcaccctgcggaccagcatctctgtggagcggcagatccacaagctgcaggactgggccggcagccggcagtag

SEQ ID NO: 145279 - DNA, 1095 bp, synthetic construct
  misc_feature 1..1095: note = Description of Artificial Sequence: Synthetic coding sequence
  source 1..1095: mol_type = other DNA
atgctgaatgtgaccctgcagggccccaccctgaatggcacctttgcccagagcaaatgtccccaggtggagtggctgggctggctgaacaccatccagccccccttcctgtgggtgctgtttgtgctggccaccctggagaacatctttgtgctgtctgtgttctgcctgcacaagagcagctgcaccgtggccgagatctacctgggcaacctggccgctgctgacctgatcctggcctgtggcctgcccttctgggccatcaccatcagcaacaactttgactggctgtttggagagaccctgtgccgggtggtgaatgccatcatctccatgaacctgtacagcagcatctgcttcctgatgctggtgtccattgaccgctacctggccctggtgaagaccatgtccatgggccgcatgagaggagtgcgctgggccaagctgtacagcctggtgatctggggctgcaccctgctgctgagcagccccatgctggtgttccgcaccatgaaggagtacagtgatgagggccacaacgtgacagcctgcgtcatctcctaccccagcctcatctgggaggtgttcaccaacatgctgctgaatgtggtgggcttcctgctgcccctgagcgtcatcaccttctgcaccatgcagatcatgcaggtgctgagaaataatgagatgcagaagttcaaggagatccagacagaaagaagagccaccgtgctggtgctggtggtgctgctgctcttcatcatctgctggctgcccttccagatcagcaccttcctggacaccctgcaccggctgggcatcctgagcagctgccaggatgagcgcatcattgatgtgatcacccagatcgccagcttcatggcctacagcaacagctgcctgaaccccctggtgtatgtgattgtgggcaagcgcttcaggaagaagtcctgggaggtgtaccagggcgtgtgccagaagggcggctgccgctctgagcccatccagatggagaacagcatgggcaccctgcggaccagcatctctgtggagcggcagatccacaagctgcaggactgggccggcagccggcagtag

SEQ ID NO: 145280 - DNA, 1095 bp, synthetic construct; identical to SEQ ID NO: 145279
  misc_feature 1..1095: note = Description of Artificial Sequence: Synthetic coding sequence
  source 1..1095: mol_type = other DNA

SEQ ID NO: 145281 - DNA, 1176 bp, synthetic construct; identical to SEQ ID NO: 145278
  misc_feature 1..1176: note = Description of Artificial Sequence: Synthetic coding sequence
  source 1..1176: mol_type = other DNA

SEQ ID NO: 145282 - DNA, 684 bp, synthetic construct
  misc_feature 1..684: note = Description of Artificial Sequence: Synthetic coding sequence
  source 1..684: mol_type = other DNA
atgggcggcaagctgagcaagaagaagaagggctacaacgtgaatgatgagaaggccaaggagaaggacaagaaggccgagggcgccgccacagaggaggagggcacccccaaggagagcgagccccaggccgctgctgagcctgctgaggccaaggagggcaaggagaagccagaccaggatgctgagggcaaggccgaggagaaggagggggagaaggatgctgctgctgccaaggaggaggcccccaaggccgagcctgagaagacagagggcgctgctgaggccaaggccgagccccccaaggcccctgagcaggagcaggccgcccctggccctgctgctggaggagaggcccccaaggctgctgaggccgctgctgccccagctgagagcgctgccccagctgctggggaggagcccagcaaggaggagggggagcccaagaagacagaggccccagctgccccagctgcccaggagaccaagagtgatggagccccagccagtgacagcaagccaggcagcagcgaggccgcccccagcagcaaggagaccccagctgccacagaggcccccagcagcacccccaaggcccagggccctgctgccagcgctgaggagcccaagcctgtggaggccccagctgccaacagcgaccagacagtgacagtgaaggagtag

SEQ ID NO: 145283 - DNA, 522 bp, synthetic construct
  misc_feature 1..522: note = Description of Artificial Sequence: Synthetic coding sequence
  source 1..522: mol_type = other DNA
atgggcggcaagctgagcaagaagaagaagggctacaacgtgaatgatgagaaggccaaggagaaggacaagaaggccgagggcgccgccacagaggaggagggcacccccaaggagagcgagccccaggccgctgctgagcctgctgaggccaaggagggcaaggagaagccagaccaggatgctgagggcaaggccgaggagaaggagggggagaaggatgctgctgctgccaaggaggaggcccccaaggccgagccagacaaggaggagggggagcccaagaagacagaggccccagctgccccagctgcccaggagaccaagagtgatggagccccagccagtgacagcaagccaggcagcagcgaggccgcccccagcagcaaggagaccccagctgccacagaggcccccagcagcacccccaaggcccagggccctgctgccagcgctgaggagcccaagcctgtggaggccccagctgccaacagcgaccagacagtgacagtgaaggagtag

SEQ ID NO: 145284 - DNA, 543 bp, synthetic construct
  misc_feature 1..543: note = Description of Artificial Sequence: Synthetic coding sequence
  source 1..543: mol_type = other DNA
atgggctgcggcggcagcagagcagatgccatcgagccccgctactatgagagctggacccgggagacagagagcacctggctgacctacacagacagtgatgccccacccagcgctgctgccccagacagcggccctgaggccggcggcctgcacagcgtgctggaggccgagaagagcaagatcaaggcccccacagacagcgtgtctgatgagggcctcttcagcgccagcaagatggcccccctggccgtgttcagccacggcatgctggaggatggcctgcccagcaatggagtgcccaggagcacagcccctgggggcatccccaaccctgagaagaagaccaactgtgagacccagtgccccaacccccagagcctgagcagcggccccctgacccagaagcagaatggcctgcagaccacagaggccaagagagatgccaagaggatgcctgccaaggaggtgaccatcaacgtgacagacagcatccagcagatggacaggagccgccgcatcaccaagaactgtgtgaactag

SEQ ID NO: 145285 - DNA, 438 bp, synthetic construct
  misc_feature 1..438: note = Description of Artificial Sequence: Synthetic coding sequence
  source 1..438: mol_type = other DNA
atgggctgcggcggcagcagagcagatgccatcgagccccgctactatgagagctggacccgggagacagagagcacctggctgacctacacagacagtgatgccccacccagcgctgctgccccagacagcggccctgaggccggcggcctgcacagcggcatgctggaggatggcctgcccagcaatggagtgcccaggagcacagcccctgggggcatccccaaccctgagaagaagaccaactgtgagacccagtgccccaacccccagagcctgagcagcggccccctgacccagaagcagaatggcctgcagaccacagaggccaagagagatgccaagaggatgcctgccaaggaggtgaccatcaacgtgacagacagcatccagcagatggacaggagccgccgcatcaccaagaactgtgtgaactag

SEQ ID NO: 145286 - DNA, 165 bp, synthetic construct
  misc_feature 1..165: note = Description of Artificial Sequence: Synthetic coding sequence
  source 1..165: mol_type = other DNA
atgggctgcggcggcagcagagcagatgccatcgagccccgctactatgagagctggacccgggagacagagagcacctggctgacctacacagacagtgatgccccacccagcgctgctgccccagacagcggccctgaggccggcggcctgcacagcggctag

SEQ ID NO: 145287 - DNA, 387 bp, synthetic construct
  misc_feature 1..387: note = Description of Artificial Sequence: Synthetic coding sequence
  source 1..387: mol_type = other DNA
atggagagcaaggaggagcgggccctgaacaacctgattgtggagaatgtgaaccaggagaatgatgagaaggatgagaaggagcaggtggccaacaagggggagcccctggccctgcccctgaatgtgtctgagtactgtgtgccccggggcaacagaagacgcttccgggtgcggcagcccatcctgcagtaccgctgggacatcatgcaccggctgggggagccccaggccaggatgagggaggagaacatggagcgcatcggggaggaggtgcggcagctgatggagaagctgcgggagaagcagctgagccacagcctgcgggctgtgtccacagatcctccccaccacgaccaccatgatgagttctgcctgatgccctag

SEQ ID NO: 145288 - DNA, 387 bp, synthetic construct; identical to SEQ ID NO: 145287
  misc_feature 1..387: note = Description of Artificial Sequence: Synthetic coding sequence
  source 1..387: mol_type = other DNA

SEQ ID NO: 145289 - DNA, 306 bp, synthetic construct
  misc_feature 1..306: note = Description of Artificial Sequence: Synthetic coding sequence
  source 1..306: mol_type = other DNA
atggagagcaaggaggagcgggccctgaacaacctgattgtggagaatgtgaaccaggagaatgatgagaaggatgagaaggagcaggtggccaacaagggggagcccctggccctgcccctgaatgtgtctgagtactgtgtgccccggggcaacagaagacgcttccgggtgcggcagcccatcctgcagtaccgctgggacatcatgcaccggctgggggagccccaggccaggatgagggaggagaacatggagcgcatcggggaggaggtgcggcagctgatggagaagctgcgggagtag

SEQ ID NO: 145290 - DNA, 483 bp, synthetic construct
  misc_feature 1..483: note = Description of Artificial Sequence: Synthetic coding sequence
  source 1..483: mol_type = other DNA
atgcagaagatggtggtgtgtggggccaagtgctgcggagatgcccctcatgtggagaaccgggaggaggagacagcccgcatcggccctggggtgatggagagcaaggaggagcgggccctgaacaacctgattgtggagaatgtgaaccaggagaatgatgagaaggatgagaaggagcaggtggccaacaagggggagcccctggccctgcccctgaatgtgtctgagtactgtgtgccccggggcaacagaagacgcttccgggtgcggcagcccatcctgcagtaccgctgggacatcatgcaccggctgggggagccccaggccaggatgagggaggagaacatggagcgcatcggggaggaggtgcggcagctgatggagaagctgcgggagaagcagctgagccacagcctgcgggctgtgtccacagatcctccccaccacgaccaccatgatgagttctgcctgatgccctag

SEQ ID NO: 145291 - DNA, 378 bp, synthetic construct
  misc_feature 1..378: note = Description of Artificial Sequence: Synthetic coding sequence
  source 1..378: mol_type = other DNA
atggagagcaaggagaagagagctgtgaacagcctgtccatggagaatgccaaccaggagaatgaggagaaggagcaggtggccaacaagggggagcccctggccctgcccctggatgctggggagtactgtgtgccccggggcaacagaagacgcttccgggtgcggcagcccatcctgcagtaccgctgggacatgatgcaccggctgggggagccccaggccaggatgagggaggagaacatggagagaattggagaggaggtgcggcagctgatggagaagctgcgggagaagcagctgagccacagcctgcgggctgtgtccacagaccccccccaccacgaccaccatgatgagttctgcctgatgccctag

SEQ ID NO: 145292 - DNA, 363 bp, synthetic construct
  misc_feature 1..363: note = Description of Artificial Sequence: Synthetic coding sequence
  source 1..363: mol_type = other DNA
atggagagcaaggaggagctggccgccaacaacctgaatggagaaaatgcccagcaggagaatgaaggaggagagcaggcccccacccagaatgaggaggagagccgccacctgggcggcggggagggccagaagccaggcggcaacatcagaagaggccgggtgcggcggctggtgcccaacttccgctgggccatccccaacagacacatcgagcacaatgaggccagagatgatgtggagagatttgtgggccagatgatggagatcaagaggaagacccgggagcagcagatgaggcactacatgaggttccagaccccagagccagacaaccactatgacttctgcctgatcccctag

SEQ ID NO: 145293 - DNA, 363 bp, synthetic construct; identical to SEQ ID NO: 145292
  misc_feature 1..363: note = Description of Artificial Sequence: Synthetic coding sequence
  source 1..363: mol_type = other DNA

SEQ ID NO: 145294 - DNA, 336 bp, synthetic construct
  misc_feature 1..336: note = Description of Artificial Sequence: Synthetic coding sequence
  source 1..336: mol_type = other DNA
atggagaatgtgcccaaggagaacaaggtggtggagaaggcccctgtgcagaatgaggccccagccctgggcggcggggagtaccaggagcccggcggcaatgtgaagggcgtgtgggcccccccagcccctggctttggagaagatgtgcccaaccggctggtggacaacatcgacatgattgatggagatggagatgacatggagcgcttcatggaggagatgagggagctgcggaggaagatccgggagctgcagctgcgctacagcctgcgcatcctgattggagaccccccccaccacgaccaccatgatgagttctgcctgatgccctag

SEQ ID NO: 145295 - DNA, 336 bp, synthetic construct; identical to SEQ ID NO: 145294
  misc_feature 1..336: note = Description of Artificial Sequence: Synthetic coding sequence
  source 1..336: mol_type = other DNA

SEQ ID NO: 145296 - DNA, 378 bp, synthetic construct
  misc_feature 1..378: note = Description of Artificial Sequence: Synthetic coding sequence
  source 1..378: mol_type = other DNA
atggaccacaagcccctgctgcaggagcggcccccagcctacaacctggaggccggccagggcgactatgcctgtggcccccacggctacggggccatcccagctgcccctcctcctccaccctacccctacctggtgacaggcatccccacccaccacccccgggtgtacaacatccacagcaggacagtgacccgctacccagccaacagcatcgtggtggtgggcggctgccctgtgtgccgggtgggcgtgctggaggactgcttcaccttcctgggcatcttcctggccatcatcctcttccccttcggcttcatctgctgctttgccctgaggaagaggcgctgccccaactgtggggccacctttgcctag

SEQ ID NO: 145297 - DNA, 297 bp, synthetic construct
  misc_feature 1..297: note = Description of Artificial Sequence: Synthetic coding sequence
  source 1..297: mol_type = other DNA
atggaccacaagcccctgctgcaggagcggcccccagcctacaacctggaggccggccagggcgactatgcctgtggcccccacggctacggggccatcccagctgcccctcctcctccaccctacccctacctggtgacaggcatccccacccaccacccccgggtgtacaacatccacagcaggacagtgacccgctacccagccaacagcatcgtggtggtgggcggctgccctgtgtgccgccaccagaggagctcctggctgtacacctaccccctgcgggtgtgcacctag

SEQ ID NO: 145298 - DNA, 1536 bp, synthetic construct
  misc_feature 1..1536: note = Description of Artificial Sequence: Synthetic coding sequence
  source 1..1536: mol_type = other DNA
atgagccggggccctgaggaggtgaaccggctgacagagagcacctacagaaatgtgatggagcagttcaaccctggcctgaggaacctgatcaacctgggcaagaactatgagaaggctgtgaatgccatgatcctggccggcaaggcctactatgatggagtggccaagatcggggagatcgccaccggcagccctgtgtccacagagctgggccacgtgctgattgagatcagcagcacccacaagaagctgaatgaaagcctggatgagaacttcaagaagttccacaaggagatcatccacgagctggagaagaagattgagctggatgtgaagtacatgaatgccaccctgaagcgctaccagacagagcacaagaacaagctggagagcctggagaagagccaggccgagctgaagaagatccggaggaagagccagggcagcagaaatgccctgaagtatgagcacaaggagattgaatatgtggagaccgtgaccagccggcagagcgagatccagaagttcatcgcagatggctgcaaggaggccctgctggaggagaagaggcgcttctgcttcctggtggacaagcactgcggctttgccaaccacatccactactaccacctgcagagcgctgagctgctgaacagcaagctgccccgctggcaggagacctgtgtggatgccatcaaggtgcctgagaagatcatgaacatgattgaggagatcaagaccccagccagcacccctgtgtctggcaccccccaggccagccccatgattgaaagaagcaatgtggtgaggaaggactatgacaccctgagcaagtgcagccccaagatgcccccagcccccagcggccgggcctacaccagccccctgattgacatgttcaacaacccagccacagctgcccccaacagccagagggtgaacaacagcacaggcaccagcgaggaccccagcctgcagaggtctgtgtctgtggccaccggcctgaacatgatgaagaagcagaaggtgaagaccatcttcccccacacagctggcagcaacaagaccctgctgagctttgcccagggagatgtgatcaccctgctgatccctgaggagaaggatggctggctgtatggagaacatgatgtgtccaaggcccggggctggttccccagcagctacaccaagctgctggaggagaatgaaacagaagctgtgacagtgcccacccccagccccacccctgtgcgcagcatcagcacagtgaacctgtctgagaacagctctgtggtgattcctcctccagactacctggagtgcctgtccatgggcgctgctgctgacagaagagctgacagcgcccggaccaccagcaccttcaaggccccagccagcaagccagagacagctgccccaaatgatgccaacggcacagccaagccacccttcctgtctggagagaacccctttgccaccgtgaagctgcggcccaccgtgaccaatgacagaagtgcccccatcatcagatag

SEQ ID NO: 145299 - DNA, 4656 bp, synthetic construct
  misc_feature 1..4656: note = Description of Artificial Sequence: Synthetic coding sequence
  source 1..4656: mol_type = other DNA
atggagaacacaggctggatgggcaagggccacaggatgaccccagcctgccccctgctgctgagcgtcatcctgagcctgcggctggccacagcctttgatcctgcccccagcgcctgcagcgccctggccagcggcgtgctgtatggagccttcagcctgcaggacctcttccccaccatcgccagcggctgctcctggaccctggagaacccagaccccaccaagtacagcctgtacctgcgcttcaaccggcaggagcaggtgtgtgcccactttgccccccggctgctgcccctggaccactacctggtgaacttcacctgcctgcggcccagccctgaggaggccgtggcccaggccgagagcgaggtgggccggcctgaggaggaggaggccgaggccgctgctggcctggagctgtgcagcggcagcggccccttcaccttcctgcactttgacaagaactttgtgcagctgtgcctgtctgctgagcccagcgaggccccccggctgctggccccagctgccctggccttccgctttgtggaggtgctgctgatcaacaacaacaacagcagccagttcacctgtggggtgctgtgccgctggagcgaagaatgtggccgggccgccggccgggcctgtggctttgcccagcccggctgcagctgccctggagaggccggggccggcagcaccaccaccaccagccctggccccccagctgcccacaccctgagcaatgccctggtgcctgggggccctgcccccccagctgaggccgacctgcacagcggcagcagcaatgacctcttcaccacagagatgagatatggagaggagcctgaggaggagcccaaggtgaagacccagtggcccaggtctgcagatgagcccggcctgtacatggcccagacaggagaccctgctgctgaggagtggagcccctggagcgtgtgcagcctgacctgtggccagggcctgcaggtgaggaccaggagctgtgtgagcagcccctacggcaccctgtgcagcggccccctgcgggagacccggccctgcaacaacagcgccacctgccctgtgcacggcgtgtgggaggagtggggctcctggagcctgtgcagccgcagctgtggccggggcagccgcagcaggatgaggacctgtgtgcccccccagcacggcggcaaggcctgtgagggccctgagctgcagaccaagctgtgcagcatggccgcctgccctgtggagggccagtggctggagtggggcccctggggcccctgcagcaccagctgtgccaacggcacccagcagaggagcaggaaatgttctgtggccggccctgcctgggccacctgcacaggagccctgacagacaccagagaatgtagcaacctggagtgcccagccacagacagcaagtggggcccctggaatgcctggagcctgtgcagcaagacctgtgacaccggctggcagaggcgcttcaggatgtgccaggccaccggcacccagggctacccctgtgagggcactggagaggaggtgaagccctgcagcgagaagcgctgcccagccttccacgagatgtgcagagatgaatatgtgatgctgatgacctggaagaaggctgctgctggggagatcatctacaacaagtgccccccaaatgccagcggcagcgccagccgccgctgcctgctgagcgcccagggcgtggcctactggggcctgcccagctttgcccgctgcatcagccatgagtaccgctacctgtacctgagcctgcgggagcacctggccaagggccagaggatgctggccggggagggcatgagccaggtggtgcgcagcctgcaggagctgctggcccggaggacctactacagcggggacctgctcttctctgtggacatcctgagaaatgtgacagacaccttcaagagggccacctacgtgcccagcgcagatgatgtgcagcgcttcttccaggtggtgtccttcatggtggatgctgagaacaaggagaagtgggatgatgcccagcaggtgtccccaggctctgtgcacctgctgcgggtggtggaggacttcatccacctggtgggagatgccctgaaggccttccagagcagcctgattgtgacagacaacctggtgatcagcatccagcgggagcctgtgtctgctgtgtccagtgacatcaccttccccatgagaggaagaagaggcatgaaggactgggtgcgccacagcgaggacaggctcttcctgcccaaggaggtgctgagcctgagcagccctgggaagccagccaccagcggggccgccggcagccctggccggggccggggccctggcaccgtgcccccaggccctggccacagccaccagaggctgctgcctgctgaccctgatgagagcagctacttcgtcatcggggctgtgctgtaccgcaccctgggcctcatcctgcccccacccaggcctcccctggccgtgaccagccgggtgatgacagtgacagtgcggccccccacccagcccccagctgagcccctcatcaccgtggagctgagctacatcatcaatggcaccacagacccccactgtgcctcctgggactacagcagagcagatgccagcagcggggactgggacacagagaactgccagaccctggagacccaggccgcccacacccgctgccagtgccagcacctgagcacctttgctgtgctggcccagccccccaaggacctgaccctggagctggccggcagccccagcgtgcccctggtgattggctgtgctgtgtcctgcatggccctgctgaccctgctggccatctatgctgccttctggaggttcatcaagtctgagaggagcatcatcctgctgaacttctgcctgagcatcctggccagcaacatcctgatcctggtgggccagagccgggtgctgagcaaaggagtgtgcaccatgacagctgccttcctgcacttcttcttcctgagcagcttctgctgggtgctgacagaggcctggcagagctacctggccgtcatcggccgcatgaggacccggctggtgaggaagcgcttcctgtgcctgggctggggcctgcctgccctggtggtggccgtgtctgtgggcttcaccaggaccaagggctacggcaccagcagctactgctggctgagcctggagggcggcctgctgtatgcctttgtgggccctgctgctgtgattgtgctggtgaacatgctgattggcatcatcgtgttcaacaagctgatggccagagatggcatcagtgacaagagcaagaagcagagagctggggccagcctgtggagcagctgtgtggtgctgcccctgctggccctgacctggatgtctgctgtgctggccatgacagacagaagatctgtgctcttccaggccctgtttgctgtgttcaacagcgcccagggctttgtgatcacagctgtgcactgcttcctgcggcgggaggtgcaggatgtggtgaagtgccagatgggcgtgtgcagagcagatgaaagtgaggacagcccagacagctgcaagaatggccagctgcagatcctgagtgactttgagaaggatgtggacctggcctgccagacagtgctcttcaaggaggtgaacacctgcaaccccagcaccatcaccggcaccctgagccggctgagcctggatgaagatgaggagcccaagagctgcctggtgggccctgagggcagcctgtccttcagccccctgcccggcaacatcctggtgcccatggccgccagccctggcctgggggagcccccaccaccccaggaggccaaccctgtgtacatgtgtggggagggcggcctgcggcagctggacctgacctggctgcggcccacagagcccggcagcgagggggactacatggtgctgcccaggaggaccctgagcctgcagcccggcggcggcggcggcggcggggaggatgccccccgggcccggcctgagggcaccccccggcgggccgccaagacagtggcccacacagagggctaccccagcttcctgtctgtggaccacagcggcctgggcctgggccctgcctacggcagcctgcagaacccctacggcatgaccttccagcccccaccacccacccccagcgcccggcaggtgcctgagcctggagagaggagcaggaccatgcccaggacagtgcccggcagcaccatgaagatgggcagcctggagaggaagaagctgcgctacagcgacctggactttgaggtgatgcacaccaggaagaggcacagcgagctgtaccacgagctgaaccagaagttccacacctttgaccgctaccgcagccagagcacagccaagcgggagaagcgctggagcgtgagcagcggcggcgctgctgagaggtctgtgtgcacagacaagcccagccctggagagcggcccagcctgagccagcacagaagacaccagagctggagcaccttcaagtccatgaccctgggcagcctgccccccaagccccgggagcggctgaccctgcacagagctgctgcctgggagcccacagagcccccagatggagacttccagacagaggtgtag

SEQ ID NO: 145300 - DNA, 4755 bp, synthetic construct
  misc_feature 1..4755: note = Description of Artificial Sequence: Synthetic coding sequence
  source 1..4755: mol_type = other DNA
atggagaacacaggctggatgggcaagggccacaggatgaccccagcctgccccctgctgctgagcgtcatcctgagcctgcggctggccacagcctttgatcctgcccccagcgcctgcagcgccctggccagcggcgtgctgtatggagccttcagcctgcaggacctcttccccaccatcgccagcggctgctcctggaccctggagaacccagaccccaccaagtacagcctgtacctgcgcttcaaccggcaggagcaggtgtgtgcccactttgccccccggctgctgcccctggaccactacctggtgaacttcacctgcctgcggcccagccctgaggaggccgtggcccaggccgagagcgaggtgggccggcctgaggaggaggaggccgaggccgctgctggcctggagctgtgcagcggcagcggccccttcaccttcctgcactttgacaagaactttgtgcagctgtgcctgtctgctgagcccagcgaggccccccggctgctggccccagctgccctggccttccgctttgtggaggtgctgctgatcaacaacaacaacagcagccagttcacctgtggggtgctgtgccgctggagcgaagaatgtggccgggccgccggccgggcctgtggctttgcccagcccggctgcagctgccctggagaggccggggccggcagcaccaccaccaccagccctggccccccagctgcccacaccctgagcaatgccctggtgcctgggggccctgcccccccagctgaggccgacctgcacagcggcagcagcaatgacctcttcaccacagagatgagatatggagaggagcctgaggaggagcccaaggtgaagacccagtggcccaggtctgcagatgagcccggcctgtacatggcccagacaggagaccctgctgctgaggagtggagcccctggagcgtgtgcagcctgacctgtggccagggcctgcaggtgaggaccaggagctgtgtgagcagcccctacggcaccctgtgcagcggccccctgcgggagacccggccctgcaacaacagcgccacctgccctgtgcacggcgtgtgggaggagtggggctcctggagcctgtgcagccgcagctgtggccggggcagccgcagcaggatgaggacctgtgtgcccccccagcacggcggcaaggcctgtgagggccctgagctgcagaccaagctgtgcagcatggccgcctgccctgtggagggccagtggctggagtggggcccctggggcccctgcagcaccagctgtgccaacggcacccagcagaggagcaggaaatgttctgtggccggccctgcctgggccacctgcacaggagccctgacagacaccagagaatgtagcaacctggagtgcccagccacagacagcaagtggggcccctggaatgcctggagcctgtgcagcaagacctgtgacaccggctggcagaggcgcttcaggatgtgccaggccaccggcacccagggctacccctgtgagggcactggagaggaggtgaagccctgcagcgagaagcgctgcccagccttccacgagatgtgcagagatgaatatgtgatgctgatgacctggaagaaggctgctgctggggagatcatctacaacaagtgccccccaaatgccagcggcagcgccagccgccgctgcctgctgagcgcccagggcgtggcctactggggcctgcccagctttgcccgctgcatcagccatgagtaccgctacctgtacctgagcctgcgggagcacctggccaagggccagaggatgctggccggggagggcatgagccaggtggtgcgcagcctgcaggagctgctggcccggaggacctactacagcggggacctgctcttctctgtggacatcctgagaaatgtgacagacaccttcaagagggccacctacgtgcccagcgcagatgatgtgcagcgcttcttccaggtggtgtccttcatggtggatgctgagaacaaggagaagtgggatgatgcccagcaggtgtccccaggctctgtgcacctgctgcgggtggtggaggacttcatccacctggtgggagatgccctgaaggccttccagagcagcctgattgtgacagacaacctggtgatcagcatccagcgggagcctgtgtctgctgtgtccagtgacatcaccttccccatgagaggaagaagaggcatgaaggactgggtgcgccacagcgaggacaggctcttcctgcccaaggaggtgctgagcctgagcagccctgggaagccagccaccagcggggccgccggcagccctggccggggccggggccctggcaccgtgcccccaggccctggccacagccaccagaggctgctgcctgctgaccctgatgagagcagctacttcgtcatcggggctgtgctgtaccgcaccctgggcctcatcctgcccccacccaggcctcccctggccgtgaccagccgggtgatgacagtgacagtgcggccccccacccagcccccagctgagcccctcatcaccgtggagctgagctacatcatcaatggcaccacagacccccactgtgcctcctgggactacagcagagcagatgccagcagcggggactgggacacagagaactgccagaccctggagacccaggccgcccacacccgctgccagtgccagcacctgagcacctttgctgtgctggcccagccccccaaggacctgaccctggagctggccggcagccccagcgtgcccctggtgattggctgtgctgtgtcctgcatggccctgctgaccctgctggccatctatgctgccttctggaggttcatcaagtctgagaggagcatcatcctgctgaacttctgcctgagcatcctggccagcaacatcctgatcctggtgggccagagccgggtgctgagcaaaggagtgtgcaccatgacagctgccttcctgcacttcttcttcctgagcagcttctgctgggtgctgacagaggcctggcagagctacctggccgtcatcggccgcatgaggacccggctggtgaggaagcgcttcctgtgcctgggctggggcctgcctgccctggtggtggccgtgtctgtgggcttcaccaggaccaagggctacggcaccagcagctactgctggctgagcctggagggcggcctgctgtatgcctttgtgggccctgctgctgtgattgtgctggtgaacatgctgattggcatcatcgtgttcaacaagctgatggccagagatggcatcagtgacaagagcaagaagcagagagctggcagcgagcgctgcccctgggccagcctgctgctgccctgcagcgcctgtggggctgtgcccagccccctgctgagcagcgccagcgccagaaatgccatggccagcctgtggagcagctgtgtggtgctgcccctgctggccctgacctggatgtctgctgtgctggccatgacagaccggcgctctgtgctcttccaggccctgtttgctgtgttcaacagcgcccagggcttcgtcatcacagctgtgcactgcttcctgcggcgggaggtgcaggatgtggtgaagtgccagatgggcgtgtgcagagcagatgaaagtgaggacagcccagacagctgcaagaatggccagctgcagatcctgagtgactttgagaaggatgtggacctggcctgccagacagtgctcttcaaggaggtgaacacctgcaaccccagcaccatcaccggcaccctgagccggctgagcctggatgaagatgaggagcccaagagctgcctggtgggccctgagggcagcctgtccttcagccccctgcccggcaacatcctggtgcccatggccgccagccctggcctgggggagcccccaccaccccaggaggccaaccctgtgtacatgtgtggggagggcggcctgcggcagctggacctgacctggctgcggcccacagagcccggcagcgagggggactacatggtgctgcccaggaggaccctgagcctgcagcccggcggcggcggcggcggcggagaagatgccccccgggcccggcctgagggcaccccaagaagagctgccaagacagtggcccacacagagggctaccccagcttcctgtctgtggaccacagcggcctgggcctgggccctgcctacggcagcctgcagaacccctacggcatgaccttccagcccccaccacccaccccatctgcccggcaggtgcctgagcccggggagaggagcaggaccatgcccaggacagtgcccggcagcaccatgaagatgggcagcctggagaggaagaagctgcgctacagcgacctggactttgaggtgatgcacaccaggaagaggcacagcgagctgtaccacgagctgaaccagaagttccacacctttgaccgctaccgcagccagagcacagccaagcgggagaagcgctggagcgtgtcctctggaggagctgctgagaggtctgtgtgcacagacaagcccagccctggagagcggcccagcctgagccagcaccggcggcaccagagctggagcaccttcaagtccatgaccctgggcagcctgccccccaagccccgggagcggctgaccctgcacagagctgctgcctgggagcccacagagcccccagatggagacttccagacagaggtgtag

SEQ ID NO: 145301 - DNA, 4758 bp, synthetic construct
  misc_feature 1..4758: note = Description of Artificial Sequence: Synthetic coding sequence
  source 1..4758: mol_type = other DNA
atggagaacacaggctggatgggcaagggccacaggatgaccccagcctgccccctgctgctgagcgtcatcctgagcctgcggctggccacagcctttgatcctgcccccagcgcctgcagcgccctggccagcggcgtgctgtatggagccttcagcctgcaggacctcttccccaccatcgccagcggctgctcctggaccctggagaacccagaccccaccaagtacagcctgtacctgcgcttcaaccggcaggagcaggtgtgtgcccactttgccccccggctgctgcccctggaccactacctggtgaacttcacctgcctgcggcccagccctgaggaggccgtggcccaggccgagagcgaggtgggccggcctgaggaggaggaggccgaggccgctgctggcctggagctgtgcagcggcagcggccccttcaccttcctgcactttgacaagaactttgtgcagctgtgcctgtctgctgagcccagcgaggccccccggctgctggccccagctgccctggccttccgctttgtggaggtgctgctgatcaacaacaacaacagcagccagttcacctgtggggtgctgtgccgctggagcgaagaatgtggccgggccgccggccgggcctgtggctttgcccagcccggctgcagctgccctggagaggccggggccggcagcaccaccaccaccagccctggccccccagctgcccacaccctgagcaatgccctggtgcctgggggccctgcccccccagctgaggccgacctgcacagcggcagcagcaatgacctcttcaccacagagatgagatatggagaggagcctgaggaggagcccaaggtgaagacccagtggcccaggtctgcagatgagcccggcctgtacatggcccagacaggagaccctgctgctgaggagtggagcccctggagcgtgtgcagcctgacctgtggccagggcctgcaggtgaggaccaggagctgtgtgagcagcccctacggcaccctgtgcagcggccccctgcgggagacccggccctgcaacaacagcgccacctgccctgtgcacggcgtgtgggaggagtggggctcctggagcctgtgcagccgcagctgtggccggggcagccgcagcaggatgaggacctgtgtgcccccccagcacggcggcaaggcctgtgagggccctgagctgcagaccaagctgtgcagcatggccgcctgccctgtggagggccagtggctggagtggggcccctggggcccctgcagcaccagctgtgccaacggcacccagcagaggagcaggaaatgttctgtggccggccctgcctgggccacctgcacaggagccctgacagacaccagagaatgtagcaacctggagtgcccagccacagacagcaagtggggcccctggaatgcctggagcctgtgcagcaagacctgtgacaccggctggcagaggcgcttcaggatgtgccaggccaccggcacccagggctacccctgtgagggcactggagaggaggtgaagccctgcagcgagaagcgctgcccagccttccacgagatgtgcagagatgaatatgtgatgctgatgacctggaagaaggctgctgctggggagatcatctacaacaagtgccccccaaatgccagcggcagcgccagccgccgctgcctgctgagcgcccagggcgtggcctactggggcctgcccagctttgcccgctgcatcagccatgagtaccgctacctgtacctgagcctgcgggagcacctggccaagggccagaggatgctggccggggagggcatgagccaggtggtgcgcagcctgcaggagctgctggcccggaggacctactacagcggggacctgctcttctctgtggacatcctgagaaatgtgacagacaccttcaagagggccacctacgtgcccagcgcagatgatgtgcagcgcttcttccaggtggtgtccttcatggtggatgctgagaacaaggagaagtgggatgatgcccagcaggtgtccccaggctctgtgcacctgctgcgggtggtggaggacttcatccacctggtgggagatgccctgaaggccttccagagcagcctgattgtgacagacaacctggtgatcagcatccagcgggagcctgtgtctgctgtgtccagtgacatcaccttccccatgagaggaagaagaggcatgaaggactgggtgcgccacagcgaggacaggctcttcctgcccaaggaggtgctgagcctgagcagccctgggaagccagccaccagcggggccgccggcagccctggccggggccggggccctggcaccgtgcccccaggccctggccacagccaccagaggctgctgcctgctgaccctgatgagagcagctacttcgtcatcggggctgtgctgtaccgcaccctgggcctcatcctgcccccacccaggcctcccctggccgtgaccagccgggtgatgacagtgacagtgcggccccccacccagcccccagctgagcccctcatcaccgtggagctgagctacatcatcaatggcaccacagacccccactgtgcctcctgggactacagcagagcagatgccagcagcggggactgggacacagagaactgccagaccctggagacccaggccgcccacacccgctgccagtgccagcacctgagcacctttgctgtgctggcccagccccccaaggacctgaccctggagctggccggcagccccagcgtgcccctggtgattggctgtgctgtgtcctgcatggccctgctgaccctgctggccatctatgctgccttctggaggttcatcaagtctgagaggagcatcatcctgctgaacttctgcctgagcatcctggccagcaacatcctgatcctggtgggccagagccgggtgctgagcaaaggagtgtgcaccatgacagctgccttcctgcacttcttcttcctgagcagcttctgctgggtgctgacagaggcctggcagagctacctggccgtcatcggccgcatgaggacccggctggtgaggaagcgcttcctgtgcctgggctggggcctgcctgccctggtggtggccgtgtctgtgggcttcaccaggaccaagggctacggcaccagcagctactgctggctgagcctggagggcggcctgctgtatgcctttgtgggccctgctgctgtgattgtgctggtgaacatgctgattggcatcatcgtgttcaacaagctgatggccagagatggcatcagtgacaagagcaagaagcagagagctggcagcgagcgctgcccctgggccagcctgctgctgccctgcagcgcctgtggggctgtgcccagccccctgctgagcagcgccagcgccagaaatgccatggccagcctgtggagcagctgtgtggtgctgcccctgctggccctgacctggatgtctgctgtgctggccatgacagaccggcgctctgtgctcttccaggccctgtttgctgtgttcaacagcgcccagggcttcgtcatcacagctgtgcactgcttcctgcggcgggaggtgcaggatgtggtgaagtgccagatgggcgtgtgcagagcagatgaaagtgaggacagcccagacagctgcaagaatggccagctgcagatcctgagtgactttgagaaggatgtggacctggcctgccagacagtgctcttcaaggaggtgaacacctgcaaccccagcaccatcaccggcaccctgagccggctgagcctggatgaagatgaggagcccaagagctgcctggtgggccctgagggcagcctgtccttcagccccctgcccggcaacatcctggtgcccatggccgccagccctggcctgggggagcccccaccaccccaggaggccaaccctgtgtacatgtgtggggagggcggcctgcggcagctggacctgacctggctgcggcccacagagcccggcagcgagggggactacatggtgctgcccaggaggaccctgagcctgcagcccggcggcggcggcggcggcggagaagatgccccccgggcccggcctgagggcaccccaagaagagctgccaagacagtggcccacacagagggctaccccagcttcctgtctgtggaccacagcggcctgggcctgggccctgcctacggcagcctgcagaacccctacggcatgaccttccagcccccaccacccaccccatctgcccggcaggtgcctgagcccggggagaggagcaggaccatgcccaggacagtgcccggcagcaccatgaagatgggcagcctggagaggaagaagctgcgctacagcgacctggactttgagaaggtgatgcacaccaggaagaggcacagcgagctgtaccacgagctgaaccagaagttccacacctttgaccgctaccgcagccagagcacagccaagcgggagaagcgctggagcgtgagcagcggcggcgctgctgagaggtctgtgtgcacagacaagcccagccctggagagcggcccagcctgagccagcacagaagacaccagagctggagcaccttcaagtccatgaccctgggcagcctgccccccaagccccgggagcggctgaccctgcacagagctgctgcctgggagcccacagagcccccagatggagacttccagacagaggtgtag

SEQ ID NO: 145302 - DNA, 4665 bp, synthetic construct
  misc_feature 1..4665: note = Description of Artificial Sequence: Synthetic coding sequence
  source 1..4665: mol_type = other DNA
atgaccccagcctgccccctgctgctgagcgtcatcctgagcctgcggctggccacagcctttgatcctgcccccagcgcctgcagcgccctggccagcggcgtgctgtatggagccttcagcctgcaggacctcttccccaccatcgccagcggctgctcctggaccctggagaacccagaccccaccaagtacagcctgtacctgcgcttcaaccggcaggagcaggtgtgtgcccactttgccccccggctgctgcccctggaccactacctggtgaacttcacctgcctgcggcccagccctgaggaggccgtggcccaggccgagagcgaggtgggccggcctgaggaggaggaggccgaggccgctgctggcctggagctgtgcagcggcagcggccccttcaccttcctgcactttgacaagaactttgtgcagctgtgcctgtctgctgagcccagcgaggccccccggctgctggccccagctgccctggccttccgctttgtggaggtgctgctgatcaacaacaacaacagcagccagttcacctgtggggtgctgtgccgctggagcgaagaatgtggccgggccgccggccgggcctgtggctttgcccagcccggctgcagctgccctggagaggccggggccggcagcaccaccaccaccagccctggccccccagctgcccacaccctgagcaatgccctggtgcctgggggccctgcccccccagctgaggccgacctgcacagcggcagcagcaatgacctcttcaccacagagatgagatatggagaggagcctgaggaggagcccaaggtgaagacccagtggcccaggtctgcagatgagcccggcctgtacatggcccagacaggagaccctgctgctgaggagtggagcccctggagcgtgtgcagcctgacctgtggccagggcctgcaggtgaggaccaggagctgtgtgagcagcccctacggcaccctgtgcagcggccccctgcgggagacccggccctgcaacaacagcgccacctgccctgtgcacggcgtgtgggaggagtggggctcctggagcctgtgcagccgcagctgtggccggggcagccgcagcaggatgaggacctgtgtgcccccccagcacggcggcaaggcctgtgagggccctgagctgcagaccaagctgtgcagcatggccgcctgccctgtggagggccagtggctggagtggggcccctggggcccctgcagcaccagctgtgccaacggcacccagcagaggagcaggaaatgttctgtggccggccctgcctgggccacctgcacaggagccctgacagacaccagagaatgtagcaacctggagtgcccagccacagacagcaagtggggcccctggaatgcctggagcctgtgcagcaagacctgtgacaccggctggcagaggcgcttcaggatgtgccaggccaccggcacccagggctacccctgtgagggcactggagaggaggtgaagccctgcagcgagaagcgctgcccagccttccacgagatgtgcagagatgaatatgtgatgctgatgacctggaagaaggctgctgctggggagatcatctacaacaagtgccccccaaatgccagcggcagcgccagccgccgctgcctgctgagcgcccagggcgtggcctactggggcctgcccagctttgcccgctgcatcagccatgagtaccgctacctgtacctgagcctgcgggagcacctggccaagggccagaggatgctggccggggagggcatgagccaggtggtgcgcagcctgcaggagctgctggcccggaggacctactacagcggggacctgctcttctctgtggacatcctgagaaatgtgacagacaccttcaagagggccacctacgtgcccagcgcagatgatgtgcagcgcttcttccaggtggtgtccttcatggtggatgctgagaacaaggagaagtgggatgatgcccagcaggtgtccccaggctctgtgcacctgctgcgggtggtggaggacttcatccacctggtgggagatgccctgaaggccttccagagcagcctgattgtgacagacaacctggtgatcagcatccagcgggagcctgtgtctgctgtgtccagtgacatcaccttccccatgagaggaagaagaggcatgaaggactgggtgcgccacagcgaggacaggctcttcctgcccaaggaggtgctgagcctgagcagccctgggaagccagccaccagcggggccgccggcagccctggccggggccggggccctggcaccgtgcccccaggccctggccacagccaccagaggctgctgcctgctgaccctgatgagagcagctacttcgtcatcggggctgtgctgtaccgcaccctgggcctcatcctgcccccacccaggcctcccctggccgtgaccagccgggtgatgacagtgacagtgcggccccccacccagcccccagctgagcccctcatcaccgtggagctgagctacatcatcaatggcaccacagacccccactgtgcctcctgggactacagcagagcagatgccagcagcggggactgggacacagagaactgccagaccctggagacccaggccgcccacacccgctgccagtgccagcacctgagcacctttgctgtgctggcccagccccccaaggacctgaccctggagctggccggcagccccagcgtgcccctggtgattggctgtgctgtgtcctgcatggccctgctgaccctgctggccatctatgctgccttctggaggttcatcaagtctgagaggagcatcatcctgctgaacttctgcctgagcatcctggccagcaacatcctgatcctggtgggccagagccgggtgctgagcaaaggagtgtgcaccatgacagctgccttcctgcacttcttcttcctgagcagcttctgctgggtgctgacagaggcctggcagagctacctggccgtcatcggccgcatgaggacccggctggtgaggaagcgcttcctgtgcctgggctggggcctgcctgccctggtggtggccgtgtctgtgggcttcaccaggaccaagggctacggcaccagcagctactgctggctgagcctggagggcggcctgctgtatgcctttgtgggccctgctgctgtgattgtgctggtgaacatgctgattggcatcatcgtgttcaacaagctgatggccagagatggcatcagtgacaagagcaagaagcagagagctggcagcgagcgctgcccctgggccagcctgctgctgccctgcagcgcctgtggggctgtgcccagccccctgctgagcagcgccagcgccagaaatgccatggccagcctgtggagcagctgtgtggtgctgcccctgctggccctgacctggatgtctgctgtgctggccatgacagaccggcgctctgtgctcttccaggccctgtttgctgtgttcaacagcgcccagggcttcgtcatcacagctgtgcactgcttcctgcggcgggaggtgcaggatgtggtgaagtgccagatgggcgtgtgcagagcagatgaaagtgaggacagcccagacagctgcaagaatggccagctgcagatcctgagtgactttgagaaggatgtggacctggcctgccagacagtgctcttcaaggaggtgaacacctgcaaccccagcaccatcaccggcaccctgagccggctgagcctggatgaagatgaggagcccaagagctgcctggtgggccctgagggcagcctgtccttcagccccctgcccggcaacatcctggtgcccatggccgccagccctggcctgggggagcccccaccaccccaggaggccaaccctgtgtacatgtgtggggagggcggcctgcggcagctggacctgacctggctgcggcccacagagcccggcagcgagggggactacatggtgctgcccaggaggaccctgagcctgcagcccggcggcggcggcggcggcggagaagatgccccccgggcccggcctgagggcaccccaagaagagctgccaagacagtggcccacacagagggctaccccagcttcctgtctgtggaccacagcggcctgggcctgggccctgcctacggcagcctgcagaacccctacggcatgaccttccagcccccaccacccaccccatctgcccggcaggtgcctgagcccggggagaggagcaggaccatgcccaggacagtgcccggcagcaccatgaagatgggcagcctggagaggaagaagctgcgctacagcgacctggactttgagaaggtgatgcacaccaggaagaggcacagcgagctgtaccacgagctgaaccagaagttccacacctttgaccgctaccgcagccagagcacagccaaggacaagcccagccctggagagcggcccagcctgagccagcaccggcggcaccagagctggagcaccttcaagtccatgaccctgggcagcctgccccccaagccccgggagcggctgaccctgcacagagctgctgcctgggagcccacagagcccccagatggagacttccagacagaggtgtag

SEQ ID NO: 145303 - DNA, 4401 bp, synthetic construct
  misc_feature 1..4401: note = Description of Artificial Sequence: Synthetic coding sequence
  source 1..4401: mol_type = other DNA
atgaccccagcctgccccctgctgctgagcgtcatcctgagcctgcggctggccacagcctttgatcctgcccccagcgcctgcagcgccctggccagcggcgtgctgtatggagccttcagcctgcaggacctcttccccaccatcgccagcggctgctcctggaccctggagaacccagaccccaccaagtacagcctgtacctgcgcttcaaccggcaggagcaggtgtgtgcccactttgccccccggctgctgcccctggaccactacctggtgaacttcacctgcctgcggcccagccctgaggaggccgtggcccaggccgagagcgaggtgggccggcctgaggaggaggaggccgaggccgctgctggcctggagctgtgcagcggcagcggccccttcaccttcctgcactttgacaagaactttgtgcagctgtgcctgtctgctgagcccagcgaggccccccggctgctggccccagctgccctggccttccgctttgtggaggtgctgctgatcaacaacaacaacagcagccagttcacctgtggggtgctgtgccgctggagcgaagaatgtggccgggccgccggccgggcctgtggctttgcccagcccggctgcagctgccctggagaggccggggccggcagcaccaccaccaccagccctggccccccagctgcccacaccctgagcaatgccctggtgcctgggggccctgcccccccagctgaggccgacctgcacagcggcagcagcaatgacctcttcaccacagagatgagatatggagaggagcctgaggaggagcccaaggtgaagacccagtggcccaggtctgcagatgagcccggcctgtacatggcccagacaggagaccctgctgctgaggagtggagcccctggagcgtgtgcagcctgacctgtggccagggcctgcaggtgaggaccaggagctgtgtgagcagcccctacggcaccctgtgcagcggccccctgcgggagacccggccctgcaacaacagcgccacctgccctgtggagggccagtggctggagtggggcccctggggcccctgcagcaccagctgtgccaacggcacccagcagaggagcaggaagtgcagcgtggccggccctgcctgggccacctgcaccggggccctgacagacacccgggagtgcagcaacctggagtgcccagccacagacagcaagtggggcccctggaatgcctggagcctgtgcagcaagacctgtgacaccggctggcagaggcgcttcaggatgtgccaggccaccggcacccagggctacccctgtgagggcaccggggaggaggtgaagccctgcagcgagaagcgctgcccagccttccacgagatgtgcagagatgaatatgtgatgctgatgacctggaagaaggctgctgctggggagatcatctacaacaagtgccccccaaatgccagcggcagcgccagccgccgctgcctgctgagcgcccagggcgtggcctactggggcctgcccagctttgcccgctgcatcagccatgagtaccgctacctgtacctgagcctgcgggagcacctggccaagggccagaggatgctggccggggagggcatgagccaggtggtgcgcagcctgcaggagctgctggcccggaggacctactacagcggggacctgctcttctctgtggacatcctgagaaatgtgacagacaccttcaagagggccacctacgtgcccagcgcagatgatgtgcagcgcttcttccaggtggtgtccttcatggtggatgctgagaacaaggagaagtgggatgatgcccagcaggtgtccccaggctctgtgcacctgctgcgggtggtggaggacttcatccacctggtgggagatgccctgaaggccttccagagcagcctcatcgtgacagacaacctggtgatcagcatccagcgggagcctgtgtctgctgtgtccagtgacatcaccttccccatgaggggccggcggggcatgaaggactgggtgcgccacagtgaagatagactcttcctgcccaaggaggtgctgagcctgagcagccctgggaagccagccaccagcggggctgctggcagccctggccggggccggggccctggcaccgtgcccccaggccctggccacagccaccagaggctgctgcctgctgaccctgatgagagcagctactttgtgattggagctgtgctgtaccgcaccctgggcctcatcctgcccccaccccggccccccctggccgtgaccagccgggtgatgacagtgacagtgcggccccccacccagcccccagctgagcccctcatcaccgtggagctgagctacatcatcaatggcaccacagacccccactgtgcctcctgggactacagcagagcagatgccagcagcggggactgggacacagagaactgccagaccctggagacccaggccgcccacacccgctgccagtgccagcacctgagcacctttgctgtgctggcccagccccccaaggacctgaccctggagctggccggcagccccagcgtgcccctggtgattggctgtgctgtgtcctgcatggccctgctgaccctgctggccatctatgctgccttctggaggttcatcaagtctgagaggagcatcatcctgctgaacttctgcctgagcatcctggccagcaacatcctgatcctggtgggccagagccgggtgctgagcaagggcgtgtgcaccatgacagctgccttcctgcacttcttcttcctgagcagcttctgctgggtgctgacagaggcctggcagagctacctggccgtgattggaaggatgaggacccggctggtgaggaagcgcttcctgtgcctgggctggggcctgcctgccctggtggtggccgtgtctgtgggcttcaccaggaccaagggctacggcaccagcagctactgctggctgagcctggagggcggcctgctgtatgcctttgtgggccctgctgctgtgattgtgctggtgaacatgctgattggcatcatcgtgttcaacaagctgatggccagagatggcatcagtgacaagagcaagaagcagagagctggggccagcctgtggagcagctgtgtggtgctgcccctgctggccctgacctggatgtctgctgtgctggccatgacagaccggcgctctgtgctcttccaggccctgtttgctgtgttcaacagcgcccagggcttcgtcatcacagctgtgcactgcttcctgcggcgggaggtgcaggatgtggtgaagtgccagatgggcgtgtgcagagcagatgaaagtgaggacagcccagacagctgcaagaatggccagctgcagatcctgagtgactttgagaaggatgtggacctggcctgccagacagtgctcttcaaggaggtgaacacctgcaaccccagcaccatcaccggcaccctgagccggctgagcctggatgaagatgaggagcccaagagctgcctggtgggccctgagggcagcctgtccttcagccccctgcccggcaacatcctggtgcccatggccgccagccctggcctgggggagcccccaccaccccaggaggccaaccctgtgtacatgtgtggggagggcggcctgcggcagctggacctgacctggctgcggcccacagagcccggcagcgagggggactacatggtgctgcccaggaggaccctgagcctgcagcccggcggcggcggcggcggcggagaagatgccccccgggcccggcctgagggcaccccaagaagagctgccaagacagtggcccacacagagggctaccccagcttcctgtctgtggaccacagcggcctgggcctgggccctgcctacggcagcctgcagaacccctacggcatgaccttccagcccccaccacccaccccatctgcccggcaggtgcctgagcccggggagaggagcaggaccatgcccaggacagtgcccggcagcaccatgaagatgggcagcctggagaggaagaagctgcgctacagcgacctggactttgagaaggtgatgcacaccaggaagaggcacagcgagctgtaccacgagctgaaccagaagttccacacctttgaccgctaccgcagccagagcacagccaaggacaagcccagccctggagagcggcccagcctgagccagcaccggcggcaccagagctggagcaccttcaagtccatgaccctgggcagcctgccccccaagccccgggagcggctgaccctgcacagagctgctgcctgggagcccacagagcccccagatggagacttccagacagaggtgtag

SEQ ID NO: 145304 - DNA, 4500 bp, synthetic construct
  misc_feature 1..4500: note = Description of Artificial Sequence: Synthetic coding sequence
  source 1..4500: mol_type = other DNA
atgaccccagcctgccccctgctgctgagcgtcatcctgagcctgcggctggccacagcctttgatcctgcccccagcgcctgcagcgccctggccagcggcgtgctgtatggagccttcagcctgcaggacctcttccccaccatcgccagcggctgctcctggaccctggagaacccagaccccaccaagtacagcctgtacctgcgcttcaaccggcaggagcaggtgtgtgcccactttgccccccggctgctgcccctggaccactacctggtgaacttcacctgcctgcggcccagccctgaggaggccgtggcccaggccgagagcgaggtgggccggcctgaggaggaggaggccgaggccgctgctggcctggagctgtgcagcggcagcggccccttcaccttcctgcactttgacaagaactttgtgcagctgtgcctgtctgctgagcccagcgaggccccccggctgctggccccagctgccctggccttccgctttgtggaggtgctgctgatcaacaacaacaacagcagccagttcacctgtggggtgctgtgccgctggagcgaagaatgtggccgggccgccggccgggcctgtggctttgcccagcccggctgcagctgccctggagaggccggggccggcagcaccaccaccaccagccctggccccccagctgcccacaccctgagcaatgccctggtgcctgggggccctgcccccccagctgaggccgacctgcacagcggcagcagcaatgacctcttcaccacagagatgagatatggagaggagcctgaggaggagcccaaggtgaagacccagtggcccaggtctgcagatgagcccggcctgtacatggcccagacagtgcatggagtgtgggaggagtggggctcctggagcctgtgcagccgcagctgtggccggggcagccgcagcaggatgaggacctgtgtgcccccccagcacggcggcaaggcctgtgagggccctgagctgcagaccaagctgtgcagcatggccgcctgccctgtggagggccagtggctggagtggggcccctggggcccctgcagcaccagctgtgccaacggcacccagcagaggagcaggaagtgcagcgtggccggccctgcctgggccacctgcaccggggccctgacagacacccgggagtgcagcaacctggagtgcccagccacagacagcaagtggggcccctggaatgcctggagcctgtgcagcaagacctgtgacaccggctggcagaggcgcttcaggatgtgccaggccaccggcacccagggctacccctgtgagggcaccggggaggaggtgaagccctgcagcgagaagcgctgcccagccttccacgagatgtgcagagatgaatatgtgatgctgatgacctggaagaaggctgctgctggggagatcatctacaacaagtgccccccaaatgccagcggcagcgccagccgccgctgcctgctgagcgcccagggcgtggcctactggggcctgcccagctttgcccgctgcatcagccatgagtaccgctacctgtacctgagcctgcgggagcacctggccaagggccagaggatgctggccggggagggcatgagccaggtggtgcgcagcctgcaggagctgctggcccggaggacctactacagcggggacctgctcttctctgtggacatcctgagaaatgtgacagacaccttcaagagggccacctacgtgcccagcgcagatgatgtgcagcgcttcttccaggtggtgtccttcatggtggatgctgagaacaaggagaagtgggatgatgcccagcaggtgtccccaggctctgtgcacctgctgcgggtggtggaggacttcatccacctggtgggagatgccctgaaggccttccagagcagcctcatcgtgacagacaacctggtgatcagcatccagcgggagcctgtgtctgctgtgtccagtgacatcaccttccccatgaggggccggcggggcatgaaggactgggtgcgccacagtgaagatagactcttcctgcccaaggaggtgctgagcctgagcagccctgggaagccagccaccagcggggctgctggcagccctggccggggccggggccctggcaccgtgcccccaggccctggccacagccaccagaggctgctgcctgctgaccctgatgagagcagctactttgtgattggagctgtgctgtaccgcaccctgggcctcatcctgcccccaccccggccccccctggccgtgaccagccgggtgatgacagtgacagtgcggccccccacccagcccccagctgagcccctcatcaccgtggagctgagctacatcatcaatggcaccacagacccccactgtgcctcctgggactacagcagagcagatgccagcagcggggactgggacacagagaactgccagaccctggagacccaggccgcccacacccgctgccagtgccagcacctgagcacctttgctgtgctggcccagccccccaaggacctgaccctggagctggccggcagccccagcgtgcccctggtgattggctgtgctgtgtcctgcatggccctgctgaccctgctggccatctatgctgccttctggaggttcatcaagtctgagaggagcatcatcctgctgaacttctgcctgagcatcctggccagcaacatcctgatcctggtgggccagagccgggtgctgagcaagggcgtgtgcaccatgacagctgccttcctgcacttcttcttcctgagcagcttctgctgggtgctgacagaggcctggcagagctacctggccgtgattggaaggatgaggacccggctggtgaggaagcgcttcctgtgcctgggctggggcctgcctgccctggtggtggccgtgtctgtgggcttcaccaggaccaagggctacggcaccagcagctactgctggctgagcctggagggcggcctgctgtatgcctttgtgggccctgctgctgtgattgtgctggtgaacatgctgattggcatcatcgtgttcaacaagctgatggccagagatggcatcagtgacaagagcaagaagcagagagctggcagcgagcgctgcccctgggccagcctgctgctgccctgcagcgcctgtggggctgtgcccagccccctgctgagcagcgccagcgccagaaatgccatggccagcctgtggagcagctgtgtggtgctgcccctgctggccctgacctggatgtctgctgtgctggccatgacagacagaagatctgtgctcttccaggccctgtttgctgtgttcaacagcgcccagggctttgtgatcacagctgtgcactgcttcctgcggcgggaggtgcaggatgtggtgaagtgccagatgggcgtgtgcagagcagatgaaagtgaggacagcccagacagctgcaagaatggccagctgcagatcctgagtgactttgagaaggatgtggacctggcctgccagacagtgctcttcaaggaggtgaacacctgcaaccccagcaccatcaccggcaccctgagccggctgagcctggatgaagatgaggagcccaagagctgcctggtgggccctgagggcagcctgtccttcagccccctgcccggcaacatcctggtgcccatggccgccagccctggcctgggggagcccccaccaccccaggaggccaaccctgtgtacatgtgtggggagggcggcctgcggcagctggacctgacctggctgcggcccacagagcccggcagcgagggggactacatggtgctgcccaggaggaccctgagcctgcagcccggcggcggcggcggcggcggggaggatgccccccgggcccggcctgagggcaccccccggcgggccgccaagacagtggcccacacagagggctaccccagcttcctgtctgtggaccacagcggcctgggcctgggccctgcctacggcagcctgcagaacccctacggcatgaccttccagcccccaccacccacccccagcgcccggcaggtgcctgagcctggagagaggagcaggaccatgcccaggacagtgcccggcagcaccatgaagatgggcagcctggagaggaagaagctgcgctacagcgacctggactttgagaaggtgatgcacaccaggaagaggcacagcgagctgtaccacgagctgaaccagaagttccacacctttgaccgctaccgcagccagagcacagccaaggacaagcccagccctggagagcggcccagcctgagccagcacagaagacaccagagctggagcaccttcaagtccatgaccctgggcagcctgccccccaagccccgggagcggctgaccctgcacagagctgctgcctgggagcccacagagcccccagatggagacttccagacagaggtgtag

SEQ ID NO: 145305 - DNA, 4503 bp, synthetic construct
  misc_feature 1..4503: note = Description of Artificial Sequence: Synthetic coding sequence
  source 1..4503: mol_type = other DNA
atgctgagcctgcggggccctgacacccacggcaagggccacaggatgaccccagcctgccccctgctgctgagcgtcatcctgagcctgcggctggccacagcctttgatcctgcccccagcgcctgcagcgccctggccagcggcgtgctgtatggagccttcagcctgcaggacctcttccccaccatcgccagcggctgctcctggaccctggagaacccagaccccaccaagtacagcctgtacctgcgcttcaaccggcaggagcaggtgtgtgcccactttgccccccggctgctgcccctggaccactacctggtgaacttcacctgcctgcggcccagccctgaggaggccgtggcccaggccgagagcgaggtgggccggcctgaggaggaggaggccgaggccgccgccggcctggagctgtgcagcggcagcggccccttcaccttcctgcactttgacaagaactttgtgcagctgtgcctgtctgctgagcccagcgaggccccccggctgctggccccagctgccctggccttccgctttgtggaggtgctgctgatcaacaacaacaacagcagccagttcacctgtggggtgctgtgccgctggagcgaggagtgtggccgggctgctggccgggcctgtggctttgcccagcccggctgcagctgccctggagaggccggggccggcagcaccaccaccaccagccctggccccccagctgcccacaccctgagcaatgccctggtgcctgggggccctgcccctcctgctgaggccgacctgcacagcggcagcagcaatgacctcttcaccacagagatgagatatggagaggagcctgaggaggagcccaaggtgaagacccagtggcccaggtctgcagatgagcccggcctgtacatggcccagacagtgcacggcgtgtgggaggagtggggctcctggagcctgtgcagccgcagctgtggccggggcagccgcagcaggatgaggacctgtgtgcccccccagcacggcggcaaggcctgtgagggccctgagctgcagaccaagctgtgcagcatggccgcctgccctgtggagggccagtggctggagtggggcccctggggcccctgcagcaccagctgtgccaacggcacccagcagaggagcaggaaatgttctgtggccggccctgcctgggccacctgcacaggagccctgacagacaccagagaatgtagcaacctggagtgcccagccacagacagcaagtggggcccctggaatgcctggagcctgtgcagcaagacctgtgacaccggctggcagaggcgcttcaggatgtgccaggccaccggcacccagggctacccctgtgagggcactggagaggaggtgaagccctgcagcgagaagcgctgcccagccttccacgagatgtgcagagatgaatatgtgatgctgatgacctggaagaaggctgctgctggggagatcatctacaacaagtgccccccaaatgccagcggcagcgccagccgccgctgcctgctgagcgcccagggcgtggcctactggggcctgcccagctttgcccgctgcatcagccatgagtaccgctacctgtacctgagcctgcgggagcacctggccaagggccagaggatgctggccggggagggcatgagccaggtggtgcgcagcctgcaggagctgctggcccggaggacctactacagcggggacctgctcttctctgtggacatcctgagaaatgtgacagacaccttcaagagggccacctacgtgcccagcgcagatgatgtgcagcgcttcttccaggtggtgtccttcatggtggatgctgagaacaaggagaagtgggatgatgcccagcaggtgtccccaggctctgtgcacctgctgcgggtggtggaggacttcatccacctggtgggagatgccctgaaggccttccagagcagcctgattgtgacagacaacctggtgatcagcatccagcgggagcctgtgtctgctgtgtccagtgacatcaccttccccatgagaggaagaagaggcatgaaggactgggtgcgccacagcgaggacaggctcttcctgcccaaggaggtgctgagcctgagcagccctgggaagccagccaccagcggggccgccggcagccctggccggggccggggccctggcaccgtgcccccaggccctggccacagccaccagaggctgctgcctgctgaccctgatgagagcagctacttcgtcatcggggctgtgctgtaccgcaccctgggcctcatcctgcccccacccaggcctcccctggccgtgaccagccgggtgatgacagtgacagtgcggccccccacccagcccccagctgagcccctcatcaccgtggagctgagctacatcatcaatggcaccacagacccccactgtgcctcctgggactacagcagagcagatgccagcagcggggactgggacacagagaactgccagaccctggagacccaggccgcccacacccgctgccagtgccagcacctgagcacctttgctgtgctggcccagccccccaaggacctgaccctggagctggccggcagccccagcgtgcccctggtgattggctgtgctgtgtcctgcatggccctgctgaccctgctggccatctatgctgccttctggaggttcatcaagtctgagaggagcatcatcctgctgaacttctgcctgagcatcctggccagcaacatcctgatcctggtgggccagagccgggtgctgagcaaaggagtgtgcaccatgacagctgccttcctgcacttcttcttcctgagcagcttctgctgggtgctgacagaggcctggcagagctacctggccgtcatcggccgcatgaggacccggctggtgaggaagcgcttcctgtgcctgggctggggcctgcctgccctggtggtggccgtgtctgtgggcttcaccaggaccaagggctacggcaccagcagctactgctggctgagcctggagggcggcctgctgtatgcctttgtgggccctgctgctgtgattgtgctggtgaacatgctgattggcatcatcgtgttcaacaagctgatggccagagatggcatcagtgacaagagcaagaagcagagagctggggccagcctgtggagcagctgtgtggtgctgcccctgctggccctgacctggatgtctgctgtgctggccatgacagacagaagatctgtgctcttccaggccctgtttgctgtgttcaacagcgcccagggctttgtgatcacagctgtgcactgcttcctgcggcgggaggtgcaggatgtggtgaagtgccagatgggcgtgtgcagagcagatgaaagtgaggacagcccagacagctgcaagaatggccagctgcagatcctgagtgactttgagaaggatgtggacctggcctgccagacagtgctcttcaaggaggtgaacacctgcaaccccagcaccatcaccggcaccctgagccggctgagcctggatgaagatgaggagcccaagagctgcctggtgggccctgagggcagcctgtccttcagccccctgcccggcaacatcctggtgcccatggccgccagccctggcctgggggagcccccaccaccccaggaggccaaccctgtgtacatgtgtggggagggcggcctgcggcagctggacctgacctggctgcggcccacagagcccggcagcgagggggactacatggtgctgcccaggaggaccctgagcctgcagcccggcggcggcggcggcggcggggaggatgccccccgggcccggcctgagggcaccccccggcgggccgccaagacagtggcccacacagagggctaccccagcttcctgtctgtggaccacagcggcctgggcctgggccctgcctacggcagcctgcagaacccctacggcatgaccttccagcccccaccacccacccccagcgcccggcaggtgcctgagcctggagagaggagcaggaccatgcccaggacagtgcccggcagcaccatgaagatgggcagcctggagaggaagaagctgcgctacagcgacctggactttgagaaggtgatgcacaccaggaagaggcacagcgagctgtaccacgagctgaaccagaagttccacacctttgaccgctaccgcagccagagcacagccaagcgggagaagcgctggagcgtgtcctctggaggagctgctgagaggtctgtgtgcacagacaagcccagccctggagagcggcccagcctgagccagcaccggcggcaccagagctggagcaccttcaagtccatgaccctgggcagcctgccccccaagccccgggagcggctgaccctgcacagagctgctgcctgggagcccacagagcccccagatggagacttccagacagaggtgtag

SEQ ID NO: 145306 - DNA, 2544 bp, synthetic construct
  misc_feature 1..2544: note = Description of Artificial Sequence: Synthetic coding sequence
  source 1..2544: mol_type = other DNA
gggaagggccacaggatgaccccagcctgccccctgctgctgagcgtcatcctgagcctgcggctggccacagcctttgatcctgcccccagcgcctgcagcgccctggccagcggcgtgctgtatggagccttcagcctgcaggacctcttccccaccatcgccagcggctgctcctggaccctggagaacccagaccccaccaagtacagcctgtacctgcgcttcaaccggcaggagcaggtgtgtgcccactttgccccccggctgctgcccctggaccactacctggtgaacttcacctgcctgcggcccagccctgaggaggccgtggcccaggccgagagcgaggtgggccggcctgaggaggaggaggccgaggccgccgccggcctggagctgtgcagcggcagcggccccttcaccttcctgcactttgacaagaactttgtgcagctgtgcctgtctgctgagcccagcgaggccccccggctgctggccccagctgccctggccttccgctttgtggaggtgctgctgatcaacaacaacaacagcagccagttcacctgtggggtgctgtgccgctggagcgaggagtgtggccgggctgctggccgggcctgtggctttgcccagcccggctgcagctgccctggagaggccggggccggcagcaccaccaccaccagccctggccccccagctgcccacaccctgagcaatgccctggtgcctgggggccctgcccctcctgctgaggccgacctgcacagcggcagcagcaatgacctcttcaccacagagatgagatatggagaggagcctgaggaggagcccaaggtgaagacccagtggcccaggtctgcagatgagcccggcctgtacatggcccagacaggagaccctgctgctgaggagtggagcccctggagcgtgtgcagcctgacctgtggccagggcctgcaggtgaggaccaggagctgtgtgagcagcccctacggcaccctgtgcagcggccccctgcgggagacccggccctgcaacaacagcgccacctgccctgtggagggccagtggctggagtggggcccctggggcccctgcagcaccagctgtgccaacggcacccagcagaggagcaggaaatgttctgtggccggccctgcctgggccacctgcacaggagccctgacagacaccagagaatgtagcaacctggagtgcccagccacagacagcaagtggggcccctggaatgcctggagcctgtgcagcaagacctgtgacaccggctggcagaggcgcttcaggatgtgccaggccaccggcacccagggctacccctgtgagggcactggagaggaggtgaagccctgcagcgagaagcgctgcccagccttccacgagatgtgcagagatgaatatgtgatgctgatgacctggaagaaggctgctgctggggagatcatctacaacaagtgccccccaaatgccagcggcagcgccagccgccgctgcctgctgagcgcccagggcgtggcctactggggcctgcccagctttgcccgctgcatcagccatgagtaccgctacctgtacctgagcctgcgggagcacctggccaagggccagaggatgctggccggggagggcatgagccaggtggtgcgcagcctgcaggagctgctggcccggaggacctactacagcggggacctgctcttctctgtggacatcctgagaaatgtgacagacaccttcaagagggccacctacgtgcccagcgcagatgatgtgcagcgcttcttccaggtggtgtccttcatggtggatgctgagaacaaggagaagtgggatgatgcccagcaggtgtccccaggctctgtgcacctgctgcgggtggtggaggacttcatccacctggtgggagatgccctgaaggccttccagagcagcctgattgtgacagacaacctggtgatcagcatccagcgggagcctgtgtctgctgtgtccagtgacatcaccttccccatgagaggaagaagaggcatgaaggactgggtgcgccacagcgaggacaggctcttcctgcccaaggaggtgctgagcctgagcagccctgggaagccagccaccagcggggccgccggcagccctggccggggccggggccctggcaccgtgcccccaggccctggccacagccaccagaggctgctgcctgctgaccctgatgagagcagctacttcgtcatcggggctgtgctgtaccgcaccctgggcctcatcctgcccccacccaggcctcccctggccgtgaccagccgggtgatgacagtgacagtgcggccccccacccagcccccagctgagcccctcatcaccgtggagctgagctacatcatcaatggcaccacagacccccactgtgcctcctgggactacagcagagcagatgccagcagcggggactgggacacagagaactgccagaccctggagacccaggccgcccacacccgctgccagtgccagtag

SEQ ID NO: 145307 - skipped

SEQ ID NO: 145308 - DNA, 3528 bp, synthetic construct
  misc_feature 1..3528: note = Description of Artificial Sequence: Synthetic coding sequence
  source 1..3528: mol_type = other DNA
atggcccagacagtgcacggcgtgtgggaggagtggggctcctggagcctgtgcagccgcagctgtggccggggcagccgcagcaggatgaggacctgtgtgcccccccagcacggcggcaaggcctgtgagggccctgagctgcagaccaagctgtgcagcatggccgcctgccctgtggagggccagtggctggagtggggcccctggggcccctgcagcaccagctgtgccaacggcacccagcagaggagcaggaaatgttctgtggccggccctgcctgggccacctgcacaggagccctgacagacaccagagaatgtagcaacctggagtgcccagccacagacagcaagtggggcccctggaatgcctggagcctgtgcagcaagacctgtgacaccggctggcagaggcgcttcaggatgtgccaggccaccggcacccagggctacccctgtgagggcactggagaggaggtgaagccctgcagcgagaagcgctgcccagccttccacgagatgtgcagagatgaatatgtgatgctgatgacctggaagaaggctgctgctggggagatcatctacaacaagtgccccccaaatgccagcggcagcgccagccgccgctgcctgctgagcgcccagggcgtggcctactggggcctgcccagctttgcccgctgcatcagccatgagtaccgctacctgtacctgagcctgcgggagcacctggccaagggccagaggatgctggccggggagggcatgagccaggtggtgcgcagcctgcaggagctgctggcccggaggacctactacagcggggacctgctcttctctgtggacatcctgagaaatgtgacagacaccttcaagagggccacctacgtgcccagcgcagatgatgtgcagcgcttcttccaggtggtgtccttcatggtggatgctgagaacaaggagaagtgggatgatgcccagcaggtgtccccaggctctgtgcacctgctgcgggtggtggaggacttcatccacctggtgggagatgccctgaaggccttccagagcagcctgattgtgacagacaacctggtgatcagcatccagcgggagcctgtgtctgctgtgtccagtgacatcaccttccccatgagaggaagaagaggcatgaaggactgggtgcgccacagcgaggacaggctcttcctgcccaaggaggtgctgagcctgagcagccctgggaagccagccaccagcggggccgccggcagccctggccggggccggggccctggcaccgtgcccccaggccctggccacagccaccagaggctgctgcctgctgaccctgatgagagcagctacttcgtcatcggggctgtgctgtaccgcaccctgggcctcatcctgcccccacccaggcctcccctggccgtgaccagccgggtgatgacagtgacagtgcggccccccacccagcccccagctgagcccctcatcaccgtggagctgagctacatcatcaatggcaccacagacccccactgtgcctcctgggactacagcagagcagatgccagcagcggggactgggacacagagaactgccagaccctggagacccaggccgcccacacccgctgccagtgccagcacctgagcacctttgctgtgctggcccagccccccaaggacctgaccctggagctggccggcagccccagcgtgcccctggtgattggctgtgctgtgtcctgcatggccctgctgaccctgctggccatctatgctgccttctggaggttcatcaagtctgagaggagcatcatcctgctgaacttctgcctgagcatcctggccagcaacatcctgatcctggtgggccagagccgggtgctgagcaaaggagtgtgcaccatgacagctgccttcctgcacttcttcttcctgagcagcttctgctgggtgctgacagaggcctggcagagctacctggccgtcatcggccgcatgaggacccggctggtgaggaagcgcttcctgtgcctgggctggggcctgcctgccctggtggtggccgtgtctgtgggcttcaccaggaccaagggctacggcaccagcagctactgctggctgagcctggagggcggcctgctgtatgcctttgtgggccctgctgctgtgattgtgctggtgaacatgctgattggcatcatcgtgttcaacaagctgatggccagagatggcatcagtgacaagagcaagaagcagagagctggggccagcctgtggagcagctgtgtggtgctgcccctgctggccctgacctggatgtctgctgtgctggccatgacagacagaagatctgtgctcttccaggccctgtttgctgtgttcaacagcgcccagggctttgtgatcacagctgtgcactgcttcctgcggcgggaggtgcaggatgtggtgaagtgccagatgggcgtgtgcagagcagatgaaagtgaggacagcccagacagctgcaagaatggccagctgcagatcctgagtgactttgagaaggatgtggacctggcctgccagacagtgctcttcaaggaggtgaacacctgcaaccccagcaccatcaccggcaccctgagccggctgagcctggatgaagatgaggagcccaagagctgcctggtgggccctgagggcagcctgtccttcagccccctgcccggcaacatcctggtgcccatggccgccagccctggcctgggggagcccccaccaccccaggaggccaaccctgtgtacatgtgtggggagggcggcctgcggcagctggacctgacctggctgcggcccacagagcccggcagcgagggggactacatggtgctgcccaggaggaccctgagcctgcagcccggcggcggcggcggcggcggggaggatgccccccgggcccggcctgagggcaccccccggcgggccgccaagacagtggcccacacagagggctaccccagcttcctgtctgtggaccacagcggcctgggcctgggccctgcctacggcagcctgcagaacccctacggcatgaccttccagcccccaccacccacccccagcgcccggcaggtgcctgagcctggagagaggagcaggaccatgcccaggacagtgcccggcagcaccatgaagatgggcagcctggagaggaagaagctgcgctacagcgacctggactttgagaaggtgatgcacaccaggaagaggcacagcgagctgtaccacgagctgaaccagaagttccacacctttgaccgctaccgcagccagagcacagccaaggacaagcccagccctggagagcggcccagcctgagccagcacagaagacaccagagctggagcaccttcaagtccatgaccctgggcagcctgccccccaagccccgggagcggctgaccctgcacagagctgctgcctgggagcccacagagcccccagatggagacttccagacagaggtgtag

SEQ ID NO: 145309 - DNA, 4656 bp, synthetic construct; identical to SEQ ID NO: 145299
  misc_feature 1..4656: note = Description of Artificial Sequence: Synthetic coding sequence
  source 1..4656: mol_type = other DNA

SEQ ID NO: 145310 - DNA, 2187 bp, synthetic construct
  misc_feature 1..2187: note = Description of Artificial Sequence: Synthetic coding sequence
  source 1..2187: mol_type = other DNA
atgctgctgccccagggcaaggaggccgtggagggcaagaagtgccagggccggcagaggcgggccggcctgtctgaggtgtggagcaggaagctgagaaatgaaagcctgggcacctggagcacccagggctgcaagacagtgctgacagatgccagccacaccaagtgcctgtgtgaccggctgagcacctttgccatcctggcccagcagccccgggagatcatcatggagagcagcggcacccccagcgtgaccctcatcgtgggcagcggcctgagctgcctggccctgatcaccctggccgtggtgtatgctgccctgtggagatacatccgctctgagaggagcatcatcctgatcaacttctgcctgagcatcatcagcagcaacatcctgatcctggtgggccagacccagacccacaacaagagcatctgcaccaccaccacagccttcctgcacttcttcttcctggccagcttctgctgggtgctgacagaggcctggcagagctacatggctgtgacaggcaagatccgcaccaggctcatcaggaagcgcttcctgtgcctgggctggggcctgcctgccctggtggtggccacctctgtgggcttcaccaggaccaagggctatggaacagaccactactgctggctgagcctggagggcggcctgctgtatgcctttgtgggccctgctgctgctgtggtgctggtgaacatggtgattggcatcctggtgttcaacaagctggtgtccagagatggcatcctggacaagaagctgaagcaccgggccggccagatgtctgagccccacagcggcctgaccctgaagtgtgccaagtgtggggtggtgtccaccacagccctgagcgccaccacagccagcaatgccatggccagcctgtggagcagctgtgtggtgctgcccctgctggccctgacctggatgtctgctgtgctggccatgacagacaagaggagcatcctcttccagatcctgtttgctgtgtttgacagcctgcagggctttgtgattgtgatggtgcactgcatcctgcggcgggaggtgcaggatgccttccgctgccgcctgaggaactgccaggaccccatcaatgctgacagcagcagcagcttccccaatggacatgcccagatcatgacagactttgagaaggatgtggacatcgcctgccgctctgtgctgcacaaggacatcggcccctgcagagctgccaccatcaccggcaccctgagccgcatcagcctgaatgatgatgaggaggagaagggcaccaaccctgagggcctgagctacagcaccctgcctggaaatgtcatcagcaaggtgatcatccagcagcccaccggcctgcacatgcccatgtccatgaatgagctgagcaacccctgcctgaagaaggaaaattctgagctgcggaggacagtgtacctgtgcacagatgacaacctgcggggagctgacatggacatcgtgcacccccaggagaggatgatggagagtgactacatcgtgatgcccaggagctctgtgaacaaccagcccagcatgaaggaggagagcaagatgaacatcggcatggagaccctgccccatgagcggctgctgcactacaaggtgaaccctgagttcaacatgaacccccctgtgatggaccagttcaacatgaacctggagcagcacctggccccccaggagcacatgcagaacctgccctttgagcccaggacagctgtgaagaacttcatggccagcgagctggatgacaatgccggcctgagccgctcagaaacaggcagcaccatctccatgagcagcctggagaggaggaagagccgctacagcgacctggactttgagaaggtgatgcacaccaggaagaggcacatggagctgttccaggagctgaaccagaagttccagaccctggaccgcttccgggacatccccaacaccagctccatggagaacccagcccccaacaagaacccctgggacaccttcaagaaccccagcgagtacccccactacaccaccatcaacgtgctggacacagaggccaaggatgccctggagctgcggcctgctgagtgggagaagtgcctgaacctgcccctggatgtgcaggagggggacttccagacagaggtgtag

SEQ ID NO: 145311 - DNA, 4569 bp, synthetic construct
  misc_feature 1..4569: note = Description of Artificial Sequence: Synthetic coding sequence
  source 1..4569: mol_type = other DNA
atgaaggctgtgaggaacctgctgatctacatcttcagcacctacctgctggtgatgtttggcttcaatgctgcccaggacttctggtgcagcaccctggtgaagggcgtcatctacggcagctacagcgtgtctgagatgttccccaagaacttcaccaactgcacctggaccctggagaacccagaccccaccaagtacagcatctacctgaagttcagcaagaaggacctgagctgcagcaacttcagcctgctggcctaccagtttgaccacttcagccatgagaagatcaaggacctgctgaggaagaaccacagcatcatgcagctgtgcaacagcaagaatgcctttgtgttcctgcagtatgacaagaacttcatccagatcagaagagtcttccccaccaacttccctggcctgcagaagaagggggaggaggaccagaagagcttctttgagttcctggtgctgaacaaggtgagccccagccagtttggctgccacgtgctgtgcacctggctggagagctgcctgaagtcagaaaatggaagaacagagagctgtggcatcatgtacaccaagtgcacctgcccccagcacctgggggagtggggcattgatgaccagagcctcatcctgctgaacaacgtggtgctgcccctgaatgagcagacagagggctgcctgacccaggagctgcagaccacccaggtgtgcaacctgacccgggaggccaagaggcctcccaaggaggagtttggcatgatgggagaccacaccatcaagagccagaggcccaggtctgtgcatgagaagagggtgccccaggagcaggctgatgctgccaagttcatggcccagacaggagagagcggcgtggaggagtggagccagtggagcacctgcagcgtgacctgtggccagggcagccaggtgaggaccaggacctgtgtgagcccctacggcacccactgcagcggccccctgcgggagagccgggtgtgcaacaacacagccctgtgccctgtgcatggagtgtgggaggagtggagcccctggagcctgtgcagcttcacctgtggccggggccagaggaccaggaccaggagctgcaccccaccccagtatggaggccggccctgtgagggccctgagacccaccacaagccctgcaacatcgccctgtgccctgtggatggccagtggcaggagtggagctcctggagccagtgcagcgtgacctgcagcaatggcacccagcagaggagccggcagtgcacagctgctgcccacggcggcagcgagtgccggggcccctgggccgagagccgggagtgctacaacccagaatgtacagccaacggccagtggaaccagtggggccactggagcggctgcagcaagagctgtgatggcggctgggagcggcgcatccgcacctgccagggcgctgtgatcaccggccagcagtgtgagggcactggagaggaggtgcggcgctgcaatgagcagcgctgcccagccccctatgagatctgcccagaggactacctgatgtccatggtgtggaagaggaccccagctggggacctggccttcaaccagtgccccctgaatgccaccggcaccaccagccgccgctgcagcctgagcctgcacggcgtggccttctgggagcagcccagctttgcccgctgcatcagcaatgagtaccgccacctgcagcacagcatcaaggagcacctggccaagggccagaggatgctggccggagatggcatgagccaggtgaccaagaccctgctggacctgacccagaggaagaacttctacgccggggacctgctgatgtctgtggagatcctgagaaatgtgacagacaccttcaagagggccagctacatcccagccagtgatggagtgcagaacttcttccagatcgtgagcaacctgctggatgaggagaacaaggagaagtgggaggatgcccagcagatctacccaggcagcattgagctgatgcaggtgattgaggacttcatccacatcgtgggcatgggcatgatggacttccagaacagctacctgatgactggaaatgtggtggccagcatccagaagctgcctgctgcctctgtgctgacagacatcaacttccccatgaagggcaggaagggcatggtggactgggccagaaattctgaggacagagtggtgatccccaagagcatcttcacccctgtgagcagcaaggagctggatgagagctctgtgtttgtgctgggcgctgtgctgtacaagaacctggacctgatcctgcccaccctgaggaactacaccgtcatcaacagcaagatcatcgtggtgaccatccggcctgagcccaagaccacagacagcttcctggagattgagctggcccacctggccaacggcaccctgaacccctactgtgtgctgtgggatgacagcaagaccaatgaaagcctgggcacctggagcacccagggctgcaagacagtgctgacagatgccagccacaccaagtgcctgtgtgaccggctgagcacctttgccatcctggcccagcagccccgggagatcatcatggagagcagcggcacccccagcgtgaccctcatcgtgggcagcggcctgagctgcctggccctgatcaccctggccgtggtgtatgctgccctgtggagatacatccgctctgagaggagcatcatcctgatcaacttctgcctgagcatcatcagcagcaacatcctgatcctggtgggccagacccagacccacaacaagagcatctgcaccaccaccacagccttcctgcacttcttcttcctggccagcttctgctgggtgctgacagaggcctggcagagctacatggctgtgacaggcaagatccgcaccaggctcatcaggaagcgcttcctgtgcctgggctggggcctgcctgccctggtggtggccacctctgtgggcttcaccaggaccaagggctatggaacagaccactactgctggctgagcctggagggcggcctgctgtatgcctttgtgggccctgctgctgctgtggtgctggtgaacatggtgattggcatcctggtgttcaacaagctggtgtccagagatggcatcctggacaagaagctgaagcaccgggccggccagatgtctgagccccacagcggcctgaccctgaagtgtgccaagtgtggggtggtgtccaccacagccctgagcgccaccacagccagcaatgccatggccagcctgtggagcagctgtgtggtgctgcccctgctggccctgacctggatgtctgctgtgctggccatgacagacaagaggagcatcctcttccagatcctgtttgctgtgtttgacagcctgcagggctttgtgattgtgatggtgcactgcatcctgcggcgggaggtgcaggatgccttccgctgccgcctgaggaactgccaggaccccatcaatgctgacagcagcagcagcttccccaatggacatgcccagatcatgacagactttgagaaggatgtggacatcgcctgccgctctgtgctgcacaaggacatcggcccctgcagagctgccaccatcaccggcaccctgagccgcatcagcctgaatgatgatgaggaggagaagggcaccaaccctgagggcctgagctacagcaccctgcctggaaatgtcatcagcaaggtgatcatccagcagcccaccggcctgcacatgcccatgtccatgaatgagctgagcaacccctgcctgaagaaggaaaattctgagctgcggaggacagtgtacctgtgcacagatgacaacctgcggggagctgacatggacatcgtgcacccccaggagaggatgatggagagtgactacatcgtgatgcccaggagctctgtgaacaaccagcccagcatgaaggaggagagcaagatgaacatcggcatggagaccctgccccatgagcggctgctgcactacaaggtgaaccctgagttcaacatgaacccccctgtgatggaccagttcaacatgaacctggagcagcacctggccccccaggagcacatgcagaacctgccctttgagcccaggacagctgtgaagaacttcatggccagcgagctggatgacaatgccggcctgagccgctcagaaacaggcagcaccatctccatgagcagcctggagaggaggaagagccgctacagcgacctggactttgagaaggtgatgcacaccaggaagaggcacatggagctgttccaggagctgaaccagaagttccagaccctggaccgcttccgggacatccccaacaccagctccatggagaacccagcccccaacaagaacccctgggacaccttcaagaaccccagcgagtacccccactacaccaccatcaacgtgctggacacagaggccaaggatgccctggagctgcggcctgctgagtgggagaagtgcctgaacctgcccctggatgtgcaggagggggacttccagacagaggtgtag

SEQ ID NO: 145312 - DNA, 1461 bp, synthetic construct
  misc_feature 1..1461: note = Description of Artificial Sequence: Synthetic coding sequence
  source 1..1461: mol_type = other DNA
atggtgattggcatcctggtgttcaacaagctggtgtccagagatggcatcctggacaagaagctgaagcaccgggccggccagatgtctgagccccacagcggcctgaccctgaagtgtgccaagtgtggggtggtgtccaccacagccctgagcgccaccacagccagcaatgccatggccagcctgtggagcagctgtgtggtgctgcccctgctggccctgacctggatgtctgctgtgctggccatgacagacaagaggagcatcctcttccagatcctgtttgctgtgtttgacagcctgcagggctttgtgattgtgatggtgcactgcatcctgcggcgggaggtgcaggatgccttccgctgccgcctgaggaactgccaggaccccatcaatgctgacagcagcagcagcttccccaatggacatgcccagatcatgacagactttgagaaggatgtggacatcgcctgccgctctgtgctgcacaaggacatcggcccctgcagagctgccaccatcaccggcaccctgagccgcatcagcctgaatgatgatgaggaggagaagggcaccaaccctgagggcctgagctacagcaccctgcctggaaatgtcatcagcaaggtgatcatccagcagcccaccggcctgcacatgcccatgtccatgaatgagctgagcaacccctgcctgaagaaggaaaattctgagctgcggaggacagtgtacctgtgcacagatgacaacctgcggggagctgacatggacatcgtgcacccccaggagaggatgatggagagtgactacatcgtgatgcccaggagctctgtgaacaaccagcccagcatgaaggaggagagcaagatgaacatcggcatggagaccctgccccatgagcggctgctgcactacaaggtgaaccctgagttcaacatgaacccccctgtgatggaccagttcaacatgaacctggagcagcacctggccccccaggagcacatgcagaacctgccctttgagcccaggacagctgtgaagaacttcatggccagcgagctggatgacaatgccggcctgagccgctcagaaacaggcagcaccatctccatgagcagcctggagaggaggaagagccgctacagcgacctggactttgagaaggtgatgcacaccaggaagaggcacatggagctgttccaggagctgaaccagaagttccagaccctggaccgcttccgggacatccccaacaccagctccatggagaacccagcccccaacaagaacccctgggacaccttcaagaaccccagcgagtacccccactacaccaccatcaacgtgctggacacagaggccaaggatgccctggagctgcggcctgctgagtgggagaagtgcctgaacctgcccctggatgtgcaggagggggacttccagacagaggtgtag

SEQ ID NO: 145313 - DNA, 978 bp, synthetic construct
  misc_feature 1..978: note = Description of Artificial Sequence: Synthetic coding sequence
  source 1..978: mol_type = other DNA
atgaaggccaaggacctgattgtgaccccagccaccatcctgaaggagaagccagaccccaacaacctggtgtttggaacagtgttcacagaccacatgctgactgtggagtggagcagcgagtttggctgggagaagccccacatcaagcccctgcagaacctgagcctgcaccctggcagcagcgccctgcactatgctgtggaggtgtttgacaaggaggagctgctggagtgcatccagcagctggtgaagctggaccaggagtgggtgccctacagcaccagcgccagcctgtacatccggcccaccttcatcggcacagagcccagcctgggcgtgaagaagcccaccaaggccctgctgtttgtgctgctgagccctgtgggcccctacttcagcagcggcaccttcaaccctgtgtccctgtgggccaaccccaagtatgtgcgggcctggaagggcggcactggagactgcaagatgggcggcaactacggcagcagcctgtttgcccagtgtgaggccgtggacaatggctgccagcaggtgctgtggctgtatggagaggaccaccagatcacagaggtgggcaccatgaacctcttcctgtactggatcaatgaagatggagaggaggagctggccaccccacccctggatggcatcatcctgcccggggtgacccggcgctgcatcctggacctggcccaccagtggggcgagttcaaggtgtctgagcgctacctgaccatggatgacctgaccacagccctggagggcaacagagtgcgggagatgtttggcagcggcacagcctgtgtggtgtgccctgtgtctgacatcctgtacaagggggagaccatccacatccccaccatggagaatggccccaagctggccagccgcatcctgagcaagctgacagacatccagtatggccgggaggagagtgactggaccatcgtgctgtcctag

SEQ ID NO: 145314 - DNA, 1158 bp, synthetic construct
  misc_feature 1..1158: note = Description of Artificial Sequence: Synthetic coding sequence
  source 1..1158: mol_type = other DNA
atggactgcagcaatggctgcagcgctgagtgcaccggggagggcggcagcaaggaggtggtgggcaccttcaaggccaaggacctgattgtgaccccagccaccatcctgaaggagaagccagaccccaacaacctggtgtttggcaccgtcttcacagaccacatgctgactgtggagtggagcagcgagtttggctgggagaagccccacatcaagcccctgcagaacctgagcctgcaccctggcagcagcgccctgcactatgctgtggagctgtttgagggcctgaaggccttccggggcgtggacaacaagatccgcctcttccagcccaacctgaacatggacaggatgtacagatctgctgtgcgggccaccctgcctgtgtttgacaaggaggagctgctggagtgcatccagcagctggtgaagctggaccaggagtgggtgccctacagcaccagcgccagcctgtacatccggcccaccttcatcggcacagagcccagcctgggcgtgaagaagcccaccaaggccctgctgtttgtgctgctgagccctgtgggcccctacttcagcagcggcaccttcaaccctgtgtccctgtgggccaaccccaagtatgtgcgggcctggaagggcggcactggagactgcaagatgggcggcaactacggcagcagcctgtttgcccagtgtgaggccgtggacaatggctgccagcaggtgctgtggctgtatggagaggaccaccagatcacagaggtgggcaccatgaacctcttcctgtactggatcaatgaagatggagaggaggagctggccaccccacccctggatggcatcatcctgcccggggtgacccggcgctgcatcctggacctggcccaccagtggggcgagttcaaggtgtctgagcgctacctgaccatggatgacctgaccacagccctggagggcaacagagtgcgggagatgtttggcagcggcacagcctgtgtggtgtgccctgtgtctgacatcctgtacaagggggagaccatccacatccccaccatggagaatggccccaagctggccagccgcatcctgagcaagctgacagacatccagtatggccgggaggagagtgactggaccatcgtgctgtcctag

SEQ ID NO: 145315 - DNA, 1197 bp, synthetic construct
  misc_feature 1..1197: note = Description of Artificial Sequence: Synthetic coding sequence
  source 1..1197: mol_type = other DNA
atggccagccccctgcggtctgctgctgccctggcccggcaggactgcagcaatggctgcagcgcagaatgtactggagagggcggcagcaaggaggtggtgggcaccttcaaggccaaggacctgattgtgaccccagccaccatcctgaaggagaagccagaccccaacaacctggtgtttggaacagtgttcacagaccacatgctgactgtggagtggagcagcgagtttggctgggagaagccccacatcaagcccctgcagaacctgagcctgcaccctggcagcagcgccctgcactatgctgtggagctgtttgagggcctgaaggccttccggggcgtggacaacaagatccgcctcttccagcccaacctgaacatggacaggatgtacagatctgctgtgcgggccaccctgcctgtgtttgacaaggaggagctgctggagtgcatccagcagctggtgaagctggaccaggagtgggtgccctacagcaccagcgccagcctgtacatccggcccaccttcatcggcacagagcccagcctgggcgtgaagaagcccaccaaggccctgctgtttgtgctgctgagccctgtgggcccctacttcagcagcggcaccttcaaccctgtgtccctgtgggccaaccccaagtatgtgcgggcctggaagggcggcaccggggactgcaagatgggcggcaactacggcagcagcctgtttgcccagtgtgaggccgtggacaatggctgccagcaggtgctgtggctgtatggagaggaccaccagatcacagaggtgggcaccatgaacctcttcctgtactggatcaatgaagatggagaggaggagctggccaccccacccctggatggcatcatcctgcccggggtgacccggcgctgcatcctggacctggcccaccagtggggcgagttcaaggtgtctgagcgctacctgaccatggatgacctgaccacagccctggagggcaacagagtgcgggagatgtttggaagtggcacagcctgtgtggtgtgccctgtgtctgacatcctgtacaagggggagaccatccacatccccaccatggagaatggccccaagctggccagccgcatcctgagcaagctgacagacatccagtatggccgggaggagagtgactggaccatcgtgctgtcctag

SEQ ID NO: 145316 - DNA, 1050 bp, synthetic construct
  misc_feature 1..1050: note = Description of Artificial Sequence: Synthetic coding sequence
  source 1..1050: mol_type = other DNA
atgaaggactgcagcaatggctgcagcgcagaatgtactggagagggcggcagcaaggaggtggtgggcaccttcaaggccaaggacctgattgtgaccccagccaccatcctgaaggagaagccagaccccaacaacctggtgtttggaacagtgttcacagaccacatgctgactgtggagtggagcagcgagtttggctgggagaagccccacatcaagcccctgcagaacctgagcctgcaccctggcagcagcgccctgcactatgctgtggaggtgtttgacaaggaggagctgctggagtgcatccagcagctggtgaagctggaccaggagtgggtgccctacagcaccagcgccagcctgtacatccggcccaccttcatcggcacagagcccagcctgggcgtgaagaagcccaccaaggccctgctgtttgtgctgctgagccctgtgggcccctacttcagcagcggcaccttcaaccctgtgtccctgtgggccaaccccaagtatgtgcgggcctggaagggcggcactggagactgcaagatgggcggcaactacggcagcagcctgtttgcccagtgtgaggccgtggacaatggctgccagcaggtgctgtggctgtatggagaggaccaccagatcacagaggtgggcaccatgaacctcttcctgtactggatcaatgaagatggagaggaggagctggccaccccacccctggatggcatcatcctgcccggggtgacccggcgctgcatcctggacctggcccaccagtggggcgagttcaaggtgtctgagcgctacctgaccatggatgacctgaccacagccctggagggcaacagagtgcgggagatgtttggcagcggcacagcctgtgtggtgtgccctgtgtctgacatcctgtacaagggggagaccatccacatccccaccatggagaatggccccaagctggccagccgcatcctgagcaagctgacagacatccagtatggccgggaggagagtgactggaccatcgtgctgtcctag

SEQ ID NO: 145317 - DNA, 1161 bp, synthetic construct
  misc_feature 1..1161: note = Description of Artificial Sequence: Synthetic coding sequence
  source 1..1161: mol_type = other DNA
atgaaggactgcagcaatggctgcagcgcagaatgtactggagagggcggcagcaaggaggtggtgggcaccttcaaggccaaggacctgattgtgaccccagccaccatcctgaaggagaagccagaccccaacaacctggtgtttggaacagtgttcacagaccacatgctgactgtggagtggagcagcgagtttggctgggagaagccccacatcaagcccctgcagaacctgagcctgcaccctggcagcagcgccctgcactatgctgtggagctgtttgagggcctgaaggccttccggggcgtggacaacaagatccgcctcttccagcccaacctgaacatggacaggatgtacagatctgctgtgcgggccaccctgcctgtgtttgacaaggaggagctgctggagtgcatccagcagctggtgaagctggaccaggagtgggtgccctacagcaccagcgccagcctgtacatccggcccaccttcatcggcacagagcccagcctgggcgtgaagaagcccaccaaggccctgctgtttgtgctgctgagccctgtgggcccctacttcagcagcggcaccttcaaccctgtgtccctgtgggccaaccccaagtatgtgcgggcctggaagggcggcaccggggactgcaagatgggcggcaactacggcagcagcctgtttgcccagtgtgaggccgtggacaatggctgccagcaggtgctgtggctgtatggagaggaccaccagatcacagaggtgggcaccatgaacctcttcctgtactggatcaatgaagatggagaggaggagctggccaccccacccctggatggcatcatcctgcccggggtgacccggcgctgcatcctggacctggcccaccagtggggcgagttcaaggtgtctgagcgctacctgaccatggatgacctgaccacagccctggagggcaacagagtgcgggagatgtttggaagtggcacagcctgtgtggtgtgccctgtgtctgacatcctgtacaagggggagaccatccacatccccaccatggagaatggccccaagctggccagccgcatcctgagcaagctgacagacatccagtatggccgggaggagagtgactggaccatcgtgctgtcctag

SEQ ID NO: 145318 - DNA, 1179 bp, synthetic construct
  misc_feature 1..1179: note = Description of Artificial Sequence: Synthetic coding sequence
  source 1..1179: mol_type = other DNA
atggctgctgctgccctgggccagatctgggccaggaagctgctgtctgtgccctggctgctgtgtggccccaggagatatgccagcagcagcttcaaggctgctgacctgcagctggagatgacccagaagccccacaagaagccaggccctggagagcccctggtgtttgggaagaccttcacagaccacatgctgatggtggagtggaatgacaagggctggggccagccccgcatccagcccttccagaacctgaccctgcacccagccagcagcagcctgcactacagcctgcagctgtttgagggcatgaaggccttcaagggcaaggaccagcaggtgcggctcttccggccctggctgaacatggacaggatgctgcggagcgccatgaggctgtgcctgcccagctttgacaagctggagctgctggagtgcatcagaagactcatcgaggtggacaaggactgggtgcctgatgctgctggcaccagcctgtatgtgcggcctgtgctgattggaaatgagcccagcctgggcgtgtcccagcccacccgggccctgctgtttgtgatcctgtgccctgtgggcgcctacttccctgggggctctgtgacccctgtgtccctgctggccgaccctgccttcatccgggcctgggtgggcggcgtgggcaactacaagctgggcggcaactacggccccaccgtgctggtgcagcaggaggccctgaagaggggctgtgagcaggtgctgtggctgtatggccctgaccaccagctgacagaggtgggcaccatgaacatctttgtgtactggacccatgaagatggagtgctggagctggtgaccccacccctgaatggagtcatcctgcccggggtggtgcggcagagcctgctggacatggcccagacctggggcgagttccgggtggtggagaggaccatcaccatgaagcagctgctgcgggccctggaggagggccgggtgcgggaggtgtttggcagcggcacagcctgccaggtgtgccctgtgcaccgcatcctgtacaaggacaggaacctgcacatccccaccatggagaatggacctgagctgatcctgcgcttccagaaggagctgaaggagatccagtatggcatccgggcccacgagtggatgtttcctgtgtag

SEQ ID NO: 145319 - DNA, 1059 bp, synthetic construct
  misc_feature 1..1059: note = Description of Artificial Sequence: Synthetic coding sequence
  source 1..1059: mol_type = other DNA
atgacccagaagccccacaagaagccaggccctggagagcccctggtgtttgggaagaccttcacagaccacatgctgatggtggagtggaatgacaagggctggggccagccccgcatccagcccttccagaacctgaccctgcacccagccagcagcagcctgcactacagcctgcagctgtttgagggcatgaaggccttcaagggcaaggaccagcaggtgcggctcttccggccctggctgaacatggacaggatgctgcggagcgccatgaggctgtgcctgcccagctttgacaagctggagctgctggagtgcatcagaagactcatcgaggtggacaaggactgggtgcctgatgctgctggcaccagcctgtatgtgcggcctgtgctgattggaaatgagcccagcctgggcgtgtcccagcccacccgggccctgctgtttgtgatcctgtgccctgtgggcgcctacttccctgggggctctgtgacccctgtgtccctgctggccgaccctgccttcatccgggcctgggtgggcggcgtgggcaactacaagctgggcggcaactacggccccaccgtgctggtgcagcaggaggccctgaagaggggctgtgagcaggtgctgtggctgtatggccctgaccaccagctgacagaggtgggcaccatgaacatctttgtgtactggacccatgaagatggagtgctggagctggtgaccccacccctgaatggagtcatcctgcccggggtggtgcggcagagcctgctggacatggcccagacctggggcgagttccgggtggtggagaggaccatcaccatgaagcagctgctgcgggccctggaggagggccgggtgcgggaggtgtttggcagcggcacagcctgccaggtgtgccctgtgcaccgcatcctgtacaaggacaggaacctgcacatccccaccatggagaatggacctgagctgatcctgcgcttccagaaggagctgaaggagatccagtatggcatccgggcccacgagtggatgtttcctgtgtag

SEQ ID NO: 145320 - DNA, 903 bp, synthetic construct
  misc_feature 1..903: note = Description of Artificial Sequence: Synthetic coding sequence
  source 1..903: mol_type = other DNA
atggctgctgctgccctgggccagctgtttgagggcatgaaggccttcaagggcaaggaccagcaggtgcggctcttccggccctggctgaacatggacaggatgctgcggagcgccatgaggctgtgcctgcccagctttgacaagctggagctgctggagtgcatcagaagactcatcgaggtggacaaggactgggtgcctgatgctgctggcaccagcctgtatgtgcggcctgtgctgattggaaatgagcccagcctgggcgtgtcccagcccacccgggccctgctgtttgtgatcctgtgccctgtgggcgcctacttccctgggggctctgtgacccctgtgtccctgctggccgaccctgccttcatccgggcctgggtgggcggcgtgggcaactacaagctgggcggcaactacggccccaccgtgctggtgcagcaggaggccctgaagaggggctgtgagcaggtgctgtggctgtatggccctgaccaccagctgacagaggtgggcaccatgaacatctttgtgtactggacccatgaagatggagtgctggagctggtgaccccacccctgaatggagtcatcctgcccggggtggtgcggcagagcctgctggacatggcccagacctggggcgagttccgggtggtggagaggaccatcaccatgaagcagctgctgcgggccctggaggagggccgggtgcgggaggtgtttggcagcggcacagcctgccaggtgtgccctgtgcaccgcatcctgtacaaggacaggaacctgcacatccccaccatggagaatggacctgagctgatcctgcgcttccagaaggagctgaaggagatccagtatggcatccgggcccacgagtggatgtttcctgtgtag

SEQ ID NO: 145321 - DNA, 1338 bp, synthetic construct
  misc_feature 1..1338: note = Description of Artificial Sequence: Synthetic coding sequence
  source 1..1338: mol_type = other DNA
atggctgtggccatcgctgctgcccgggtgtggaggctgaacagaggcctgagccaggccgccctgctgctgctgcggcagcccggggcccggggcctggcccggagccaccccccccggcagcagcagcagttcagcagcctggatgacaagccccagtttcctggggccagcgctgagttcatcgacaagctggagttcatccagcccaacgtcatcagcggcatccccatctacagagtgatggaccggcagggccagatcatcaaccccagcgaggacccccacctgcccaaggagaaggtgctgaagctgtacaagtccatgaccctgctgaacaccatggaccgcatcctgtatgagagccagaggcagggccgcatctccttctacatgaccaactatggagaggagggcacccacgtgggcagcgctgctgccctggacaacacagacctggtgtttggccagtaccgggaggccggcgtgctgatgtacagagactaccccctggagctgttcatggcccagtgctacggcaacatcagtgacctgggcaagggccggcagatgcctgtgcactacggctgcaaggagcggcactttgtgaccatcagcagccccctggccacccagatcccccaggccgtgggcgccgcctatgctgccaagagggccaatgccaacagagtggtgatctgctactttggagagggcgccgcctctgaaggagatgcccacgccggcttcaactttgctgccaccctggagtgccccatcatcttcttctgcagaaataatggctacgccatcagcacccccaccagcgagcagtacagaggagatggcattgctgcccggggccctggctacggcatcatgagcatccgggtggatggaaatgatgtgtttgctgtgtacaatgccaccaaggaggccaggagaagagctgtggccgagaaccagcccttcctgattgaggccatgacctacagaattggccaccacagcaccagtgatgacagcagcgcctacagatctgtggatgaggtgaactactgggacaagcaggaccaccccatcagccggctgcggcactacctgctgagccagggctggtgggatgaggagcaggagaaggcctggaggaagcagagcaggaggaaggtgatggaggcctttgagcaggccgagaggaagcccaagcccaaccccaacctgctcttcagtgatgtgtaccaggagatgcctgcccagctgaggaagcagcaggagagcctggcccggcacctgcagacctacggggagcactaccccctggaccactttgacaagtag

SEQ ID NO: 145322 - DNA, 1212 bp, synthetic construct
  misc_feature 1..1212: note = Description of Artificial Sequence: Synthetic coding sequence
  source 1..1212: mol_type = other DNA
atggctgtggccatcgctgctgcccgggtgtggaggctgaacagaggcctgagccaggccgccctgctgctgctgcggcagcccggggcccggggcctggcccggagccaccccccccggcagcagcagcagttcagcagcctggatgacaagccccagtttcctggggccagcgctgagttcatcgacaagctggagttcatccagcccaacgtcatcagcggcatccccatctacagagtgatggaccggcagggccagatcatcaaccccagcgaggacccccacctgcccaaggagaaggtgctgaagctgtacaagtccatgaccctgctgaacaccatggaccgcatcctgtatgagagccagaggcagggccgcatctccttctacatgaccaactatggagaggagggcacccacgtgggcagcgctgctgccctggacaacacagacctggtgtttggccagtaccgggaggccggcgtgctgatgtacagagactaccccctggagctgttcatggcccagtgctacggcaacatcagtgacctgggcaagggccggcagatgcctgtgcactacggctgcaaggagcggcactttgtgaccatcagcagccccctggccacccagatcccccaggccgtgggcgccgcctatgctgccaagagggccaatgccaacagagtggtgatctgctactttggagagggcgccgcctctgaaggagatgcccacgccggcttcaactttgctgccaccctggagtgccccatcatcttcttctgcagaaataatggctacgccatcagcacccccaccagcgagcagtacagaggagatggcattgctgcccggggccctggctacggcatcatgagcatccgggtggatggaaatgatgtgtttgctgtgtacacagccaccggcggccccaaggcccgggcctctgtgggccccagcagccccagcaccaccggcacctgtggcatcatgatgcccctgcacgccatgggcctgtggcaccctgtgagccaccagcaggagctgtctgctgcccccaagcccaagggcaccaccaagcccatcctggagagctacctgaagagccacctgctgggccacagccgctaccagctgtacatccaccaggatgctgtgagaagagagaagccccagagcaacctgaaccgggagagcctcatctag

SEQ ID NO: 145323 - DNA, 1179 bp, synthetic construct
  misc_feature 1..1179: note = Description of Artificial Sequence: Synthetic coding sequence
  source 1..1179: mol_type = other DNA
atggctgtggtggccgctgctgctggctggctgctgcggctgcgggctgctggagctgagggccactggaggcggctgcctggagctggcctggcccggggcttcctgcaccctgctgccaccgtggaggatgctgcccagaggcggcaggtggcccacttcaccttccagcctgaccctgagccccgggagtatggccagacccagaagatgaacctcttccagagcgtgaccagcgccctggacaacagcctggccaaggaccccacagctgtgatctttggagaagatgtggccttcggcggcgtcttccgctgcaccgtgggcctgcgggacaagtatggcaaggacagagtcttcaacacccccctgtgtgagcagggcatcgtgggcttcggcatcggcattgctgtgactggagccacagccatcgccgagatccagtttgctgactacatcttccctgcctttgaccagatcgtgaatgaggccgccaagtaccgctacagaagtggggacctcttcaactgtggcagcctgaccatccgcagcccctggggctgtgtgggccatggagccctgtaccacagccagagccctgaggccttctttgcccactgccccggcatcaaggtggtgatccccaggagccccttccaggccaagggcctgctgctgagctgcatcgaggacaagaacccctgcatcttctttgagcccaagatcctgtacagagctgctgctgaggaggtgcccatcgagccctacaacatccccctgagccaggccgaggtgatccaggagggcagtgatgtgaccctggtggcctggggcacccaggtgcacgtgatccgggaggtggcctccatggccaaggagaagctgggcgtgtcctgtgaggtgattgacctgcggaccatcatcccctgggatgtggacaccatctgcaagagcgtcatcaagacaggccgcctgctgatcagccatgaggcccccctgaccggcggctttgccagcgagatcagcagcacagtgcaggaggagtgcttcctgaacctggaggcccccatcagccgggtgtgtggctatgacacccccttcccccacatctttgagcccttctacatcccagacaagtggaagtgctatgatgccctgaggaagatgatcaactactag

SEQ ID NO: 145324 - DNA, 1179 bp, synthetic construct; identical to SEQ ID NO: 145323
  misc_feature 1..1179: note = Description of Artificial Sequence: Synthetic coding sequence
  source 1..1179: mol_type = other DNA

SEQ ID NO: 145325 - DNA, 657 bp, synthetic construct
  misc_feature 1..657: note = Description of Artificial Sequence: Synthetic coding sequence
  source 1..657: mol_type = other DNA
atggctgtggtggccgctgctgctggctggctgctgcggctgcgggctgctggagctgagggccactggaggcggctgcctggagctggcctggcccggggcttcctgcaccctgctgccaccgtggaggatgctgcccagaggcggcaggtggcccacttcaccttccagcctgaccctgagccccgggagtatggccagacccagaagatgaacctcttccagagcgtgaccagcgccctggacaacagcctggccaaggaccccacagctgtgatctttggagaagatgtggccttcggcggcgtcttccgctgcaccgtgggcctgcgggacaagtatggcaaggacagagtcttcaacacccccctgtgtgagcagggcatcgtgggcttcggcatcggcattgctgtgactggagccacagccatcgccgagatccagtttgctgactacatcttccctgcctttgaccagatcgtgaatgaggccgccaagtaccgctacagaagtggggacctcttcaactgtggcagcctgaccatccgcagcccctggggctgtgtgggccatggagccctgtaccacagccagagccctgaggccttctttgcccactgccccggcatcaagatcaaggtgatcagcctgtcctag

SEQ ID NO: 145326 - DNA, 969 bp, synthetic construct
  misc_feature 1..969: note = Description of Artificial Sequence: Synthetic coding sequence
  source 1..969: mol_type = other DNA
atgaacctcttccagagcgtgaccagcgccctggacaacagcctggccaaggaccccacagctgtgatctttggagaagatgtggccttcggcggcgtcttccgctgcaccgtgggcctgcgggacaagtatggcaaggacagagtcttcaacacccccctgtgtgagcagggcatcgtgggcttcggcatcggcattgctgtgactggagccacagccatcgccgagatccagtttgctgactacatcttccctgcctttgaccagatcgtgaatgaggccgccaagtaccgctacagaagtggggacctcttcaactgtggcagcctgaccatccgcagcccctggggctgtgtgggccatggagccctgtaccacagccagagccctgaggccttctttgcccactgccccggcatcaaggtggtgatccccaggagccccttccaggccaagggcctgctgctgagctgcatcgaggacaagaacccctgcatcttctttgagcccaagatcctgtacagagctgctgctgaggaggtgcccatcgagccctacaacatccccctgagccaggccgaggtgatccaggagggcagtgatgtgaccctggtggcctggggcacccaggtgcacgtgatccgggaggtggcctccatggccaaggagaagctgggcgtgtcctgtgaggtgattgacctgcggaccatcatcccctgggatgtggacaccatctgcaagagcgtcatcaagacaggccgcctgctgatcagccatgaggcccccctgaccggcggctttgccagcgagatcagcagcacagtgcaggaggagtgcttcctgaacctggaggcccccatcagccgggtgtgtggctatgacacccccttcccccacatctttgagcccttctacatcccagacaagtggaagtgctatgatgccctgaggaagatgatcaactactag

SEQ ID NO: 145327 - DNA, 657 bp, synthetic construct; identical to SEQ ID NO: 145325
  misc_feature 1..657: note = Description of Artificial Sequence: Synthetic coding sequence
  source 1..657: mol_type = other DNA

SEQ ID NO: 145328 - DNA, 1779 bp, synthetic construct
  misc_feature 1..1779: note = Description of Artificial Sequence: Synthetic coding sequence
  source 1..1779: mol_type = other DNA
atgtctgtgtccctggtggtgatccggctggagctggccgagcacagccctgtgcctgctggcttcggcttctctgctgctgctggggagatgtctgatgaggagatcaagaagaccaccctggccagcgctgtggcctgcctggagggcaagagccctggagagaaggtggccatcatccaccagcacctgggccggcgggagatgacagatgtgatcatcgagaccatgaagagcaacccagatgagctgaagaccaccgtggaggagaggaagagcagcgaggccagccccacagcccagaggagcaaggaccacagcaaagaatgcatcaatgctgccccagacagccccagcaagcagctgcctgaccagatctccttcttcagcggcaaccccagcgtggagatcgtgcacggcatcatgcacctgtacaagaccaacaagatgaccagcctgaaggaggatgtgcggcgcagcgccatgctgtgcatcctgactgtgcctgctgccatgaccagccatgacctgatgaagtttgtggcccccttcaatgaagtcatcgagcagatgaagatcatccgggacagcacccccaaccagtacatggtgctgatcaagttccgggcccaggctgatgctgacagcttctacatgacctgcaatggccggcagttcaacagcattgaagatgatgtgtgccagctggtgtatgtggagcgggcagaggtgctgaagtcagaagatggagccagcctgcctgtgatggacctgacagagctgcccaagtgcaccgtgtgcctggagaggatggatgagagcgtgaatggcatcctgaccaccctgtgcaaccacagcttccacagccagtgcctgcagcgctgggatgacaccacctgccctgtgtgccgctactgccagaccccagagcctgtggaggagaacaagtgctttgaatgtggggtgcaggagaacctgtggatctgcctgatctgtggccacatcggctgcggccgctacgtgtccagacatgcctacaagcactttgaggagacccagcacacctacgccatgcagctgaccaaccaccgggtgtgggactatgctggggacaactacgtgcaccggctggtggccagcaagacagatggcaagatcgtgcagtatgaatgtgagggggacacctgccaggaggagaagattgatgccctgcagctggagtacagctacctgctgaccagccagctggagagccagaggatctactgggagaacaagatcgtgcgcatcgagaaggacacagctgaggagatcaacaacatgaagaccaagttcaaggagaccattgaaaaatgtgacaacctggagcacaagctgaatgacctgctgaaggagaagcagagcgtggagaggaagtgcacccagctgaacaccaaggtggccaagctgaccaatgagctgaaggaggagcaggagatgaacaagtgcctgcgggccaaccaggtgctgctgcagaacaagctgaaggaggaggagcgggtgctgaaggagacctgtgaccagaaggacctgcagatcacagagatccaggagcagctgagagatgtgatgttctacctggagacccagcagaagatcaaccacctgcctgctgagacccggcaggagatccaggagggccagatcaacatcgccatggccagcgccagcagccctgccagcagcggcggcagcggcaagctgcccagcaggaagggccgcagcaagaggggcaagtag

SEQ ID NO: 145329 - DNA, 1242 bp, synthetic construct
  misc_feature 1..1242: note = Description of Artificial Sequence: Synthetic coding sequence
  source 1..1242: mol_type = other DNA
atgcacctgtacaagaccaacaagatgaccagcctgaaggaggatgtgagaagaagtgccatgctgtgcatcctgactgtgcctgctgccatgaccagccatgacctgatgaagtttgtggcccccttcaatgaggtgattgagcagatgaagatcatccgggacagcacccccaaccagtacatggtgctgatcaagttccgggcccagggcgccagcctgcctgtgatggacctgacagagctgcccaagtgcaccgtgtgcctggagaggatggatgaatctgtgaatggcatcctgaccaccctgtgcaaccacagcttccacagccagtgcctgcagcgctgggatgacaccacctgccctgtgtgccgctactgccagaccccagagcctgtggaggagaacaagtgctttgaatgtggggtgcaggagaacctgtggatctgcctgatctgtggccacatcggctgcggccgctacgtgtccagacatgcctacaagcactttgaggagacccagcacacctacgccatgcagctgaccaaccaccgggtgtgggactatgctggggacaactacgtgcaccggctggtggccagcaagacagatggcaagatcgtgcagtatgaatgtgagggggacacctgccaggaggagaagattgatgccctgcagctggagtacagctacctgctgaccagccagctggagagccagaggatctactgggagaacaagatcgtgagaattgagaaggacacagctgaggagatcaacaacatgaagaccaagttcaaggagaccatcgagaagtgtgacaacctggagcacaagctgaatgacctgctgaaggagaagcagagcgtggagaggaagtgcacccagctgaacaccaaggtggccaagctgaccaatgagctgaaggaggagcaggagatgaacaagtgcctgcgggccaaccaggtgctgctgcagaacaagctgaaggaggaggagcgggtgctgaaggagacctgtgaccagaaggacctgcagatcacagagatccaggagcagctgagagatgtgatgttctacctggagacccagcagaagatcaaccacctgcctgctgagacccggcaggagatccaggagggccagatcaacatcgccatggccagcgccagcagccctgccagcagcggcggcagcggcaagctgcccagcaggaagggccgcagcaagaggggcaagtag

SEQ ID NO: 145330 - DNA, 2136 bp, synthetic construct
  misc_feature 1..2136: note = Description of Artificial Sequence: Synthetic coding sequence
  source 1..2136: mol_type = other DNA
atgaacaagggctggctggagctggagagtgaccccggcctcttcaccctgctggtggaggactttggagtgaagggcgtgcaggtggaggagatctatgacctgcagagcaagtgccagggccctgtgtatggcttcatcttcctgttcaagtggattgaggagcggcgcagcaggaggaaggtgtccaccctggtggatgacacctctgtgattgatgatgacatcgtgaacaacatgttctttgcccaccagctgatccccaacagctgtgccacccacgccctgctgtctgtgctgctgaactgcagctctgtggacctgggccccaccctgagcaggatgaaggacttcaccaagggcttcagccctgagagcaagggctacgccatcggaaatgcccctgagctggccaaggcccacaacagccacgcccggcctgagcccaggcacctgcctgagaagcagaatggcctgtctgctgtgaggaccatggaggccttccactttgtgtcctatgtgcccatcaccggccgcctgtttgagctggatggcctgaaggtgtaccccatcgaccacggcccctggggagaagatgaggagtggacagacaaggcccggcgggtcatcatggagcgcatcggcctggccacagctggcatcaagtatgaggcccggctgcacgtgctgaaggtgaaccggcagacagtgctggaggccctgcagcagctgatccgggtgacccagcctgagctgatccagacccacaagagccaggagagccagctgcctgaggagagcaagagcgccagcaacaagagccccctggtgctggaggccaacagagccccagctgccagcgagggcaaccacacagatggagctgaggaggccgccggcagctgtgcccaggcccccagccacagcccccccaacaagcccaagctggtggtgaagcccccaggcagcagcctgaatggagtgcaccccaaccccacccccatcgtgcagaggctgcctgccttcctggacaaccacaactatgccaagagccccatgcaggaggaggaggacctggccgccggcgtgggccgcagccgggtgcctgtgcggcccccccagcagtacagtgatgatgaagatgattatgaagatgatgaggaggatgatgtgcagaacaccaacagcgccctgcgctacaagggcaaaggaacaggcaagccaggggccctgagcggcagcgcagatggccagctgtctgtgctgcagcccaacaccatcaacgtgctggccgagaagctgaaggagagccagaaggacctgagcatccccctgagcatcaagaccagcagtggagctggcagccctgctgtggccgtgcccacccacagccagcccagccccacccccagcaatgaaagcacagacacagccagcgagatcggcagcgccttcaacagccccctgcggagccccatccgcagcgccaaccccacccggcccagcagccctgtgaccagccacatcagcaaggtgctgtttggagaagatgacagcctgctgcgggtggactgcatccgctacaacagagctgtgcgggacctgggccctgtgatcagcacaggcctgctgcacctggccgaggatggagtgctgagccccctggccctgacagagggcggcaagggcagcagccccagcatccggcccatccagggcagccagggcagcagcagccctgtggagaaggaggtggtggaggccacagacagccgggagaagacaggcatggtgcggcctggagagcccctgtctggagagaagtacagccccaaggagctgctggccctgctgaagtgtgtggaggccgagatcgccaactatgaggcctgcctgaaggaggaggtggagaagaggaagaagttcaagattgatgaccagaggaggacccacaactatgatgagttcatctgcaccttcatctccatgctggcccaggagggcatgctggccaacctggtggagcagaacatctctgtgagaagacggcagggcgtgtccatcggccgcctgcacaagcagaggaagccagacaggaggaagaggagccggccctacaaggccaagaggcagtag

SEQ ID NO: 145331 - DNA, 2190 bp, synthetic construct
  misc_feature 1..2190: note = Description of Artificial Sequence: Synthetic coding sequence
  source 1..2190: mol_type = other DNA
atgaacaagggctggctggagctggagagtgaccccggcctcttcaccctgctggtggaggactttggagtgaagggcgtgcaggtggaggagatctatgacctgcagagcaagtgccagggccctgtgtatggcttcatcttcctgttcaagtggattgaggagcggcgcagcaggaggaaggtgtccaccctggtggatgacacctctgtgattgatgatgacatcgtgaacaacatgttctttgcccaccagctgatccccaacagctgtgccacccacgccctgctgtctgtgctgctgaactgcagctctgtggacctgggccccaccctgagcaggatgaaggacttcaccaagggcttcagccctgagagcaagggctacgccatcggaaatgcccctgagctggccaaggcccacaacagccacgcccggcctgagcccaggcacctgcctgagaagcagaatggcctgtctgctgtgaggaccatggaggccttccactttgtgtcctatgtgcccatcaccggccgcctgtttgagctggatggcctgaaggtgtaccccatcgaccacggcccctggggagaagatgaggagtggacagacaaggcccggcgggtcatcatggagcgcatcggcctggccacagctggggagccctaccatgacatccgcttcaacctgatggctgtggtgcctgaccggcgcatcaagtatgaggcccggctgcacgtgctgaaggtgaaccggcagacagtgctggaggccctgcagcagctgatccgggtgacccagcctgagctgatccagacccacaagagccaggagagccagctgcctgaggagagcaagagcgccagcaacaagagccccctggtgctggaggccaacagagccccagctgccagcgagggcaaccacacagatggagctgaggaggccgccggcagctgtgcccaggcccccagccacagcccccccaacaagcccaagctggtggtgaagcccccaggcagcagcctgaatggagtgcaccccaaccccacccccatcgtgcagaggctgcctgccttcctggacaaccacaactatgccaagagccccatgcaggaggaggaggacctggccgccggcgtgggccgcagccgggtgcctgtgcggcccccccagcagtacagtgatgatgaagatgattatgaagatgatgaggaggatgatgtgcagaacaccaacagcgccctgcgctacaagggcaaaggaacaggcaagccaggggccctgagcggcagcgcagatggccagctgtctgtgctgcagcccaacaccatcaacgtgctggccgagaagctgaaggagagccagaaggacctgagcatccccctgagcatcaagaccagcagtggagctggcagccctgctgtggccgtgcccacccacagccagcccagccccacccccagcaatgaaagcacagacacagccagcgagatcggcagcgccttcaacagccccctgcggagccccatccgcagcgccaaccccacccggcccagcagccctgtgaccagccacatcagcaaggtgctgtttggagaagatgacagcctgctgcgggtggactgcatccgctacaacagagctgtgcgggacctgggccctgtgatcagcacaggcctgctgcacctggccgaggatggagtgctgagccccctggccctgacagagggcggcaagggcagcagccccagcatccggcccatccagggcagccagggcagcagcagccctgtggagaaggaggtggtggaggccacagacagccgggagaagacaggcatggtgcggcctggagagcccctgtctggagagaagtacagccccaaggagctgctggccctgctgaagtgtgtggaggccgagatcgccaactatgaggcctgcctgaaggaggaggtggagaagaggaagaagttcaagattgatgaccagaggaggacccacaactatgatgagttcatctgcaccttcatctccatgctggcccaggagggcatgctggccaacctggtggagcagaacatctctgtgagaagacggcagggcgtgtccatcggccgcctgcacaagcagaggaagccagacaggaggaagaggagccggccctacaaggccaagaggcagtag

SEQ ID NO: 145332 - DNA, 879 bp, synthetic construct
  misc_feature 1..879: note = Description of Artificial Sequence: Synthetic coding sequence
  source 1..879: mol_type = other DNA
atggctgtgcaggtggtgcaggccgtgcaggccgtgcacctggagagtgatgccttcctggtgtgcctgaaccacgccctgagcacagagaaggaggaggtgatgggcctgtgcattggagagctgaatgatgacaccagcagaagtgacagcaagtttgcctacacaggaacagagatgaggacagtggccgagaaggtggatgctgtgcgcatcgtgcacatccacagcgtcatcatcctgcggcggagtgacaagaggaaggacagagtggagatcagccctgagcagctgtctgctgccagcacagaagctgagcggctggccgagctgaccggccggcccatgagggtggtgggctggtaccacagccacccccacatcaccgtgtggcccagccacgtggatgtgaggacccaggccatgtaccagatgatggaccagggctttgtgggcctcatcttcagctgcttcatcgaggacaagaacaccaagacaggccgggtgctgtacacctgcttccagagcatccaggcccagaagagcagtgaatatgagcgcatcgagatccccatccacatcgtgccccacgtgaccatcggcaaggtgtgcctggagagcgctgtggagctgcccaagatcctgtgccaggaggagcaggatgcctaccgccgcatccacagcctgacccacctggacagcgtgaccaagatccacaacggcagcgtcttcaccaagaacctgtgcagccagatgtctgctgtgtctggccccctgctgcagtggctggaggaccggctggagcagaaccagcagcacctgcaggagctgcagcaggagaaggaggagctgatgcaggagctgagcagcctggagtag

SEQ ID NO: 145333 - DNA, 876 bp, synthetic construct
  misc_feature 1..876: note = Description of Artificial Sequence: Synthetic coding sequence
  source 1..876: mol_type = other DNA
atggctgtgcaggtggtgcaggccgtgcaggccgtgcacctggagagtgatgccttcctggtgtgcctgaaccacgccctgagcacagagaaggaggaggtgatgggcctgtgcattggagagctgaatgatgacaccaggagtgacagcaagtttgcctacacaggaacagagatgaggacagtggccgagaaggtggatgctgtgagaattgtgcacatccacagcgtcatcatcctgcggcggagtgacaagaggaaggacagagtggagatcagccctgagcagctgtctgctgccagcacagaggccgagcggctggccgagctgaccggccggcccatgagggtggtgggctggtaccacagccacccccacatcaccgtgtggcccagccacgtggatgtgaggacccaggccatgtaccagatgatggaccagggctttgtgggcctcatcttcagctgcttcatcgaggacaagaacaccaagacaggccgggtgctgtacacctgcttccagagcatccaggcccagaagagcagtgaatatgaaagaattgagatccccatccacatcgtgccccacgtgaccatcggcaaggtgtgcctggagagcgctgtggagctgcccaagatcctgtgccaggaggagcaggatgcctaccgccgcatccacagcctgacccacctggacagcgtgaccaagatccacaatggatctgtgttcaccaagaacctgtgcagccagatgtctgctgtgtctggccccctgctgcagtggctggaggaccggctggagcagaaccagcagcacctgcaggagctgcagcaggagaaggaggagctgatgcaggagctgagcagcctggagtag

SEQ ID NO: 145334 - DNA, 951 bp, synthetic construct
  misc_feature 1..951: note = Description of Artificial Sequence: Synthetic coding sequence
  source 1..951: mol_type = other DNA
atggctgtgcaggtggtgcaggccgtgcaggccgtgcacctggagagtgatgccttcctggtgtgcctgaaccacgccctgagcacagagaaggaggaggtgatgggcctgtgcattggagagctgaatgatgacaccaggagtgacagcaagtttgcctacacaggaacagagatgaggacagtggccgagaaggtggatgctgtgagaattgtgcacatccacagcgtcatcatcctgcggcggagtgacaagaggaaggacagagtggagatcagccctgagcagctgtctgctgccagcacagaggccgagcggctggccgagctgaccggccggcccatgagggtggtgggctggtaccacagccacccccacatcaccgtgtggcccagccacgtggatgtgaggacccaggccatgtaccagatgatggaccagggctttgtgggcctcatcttcagctgcttcatcgaggacaagaacaccaagacaggccgggtgctgtacacctgcttccagagcatccaggcccagaagagcagcgagagcctgcacggcccccgggacttctggagcagcagccagcacatcagcattgagggccagaaggaggaggagagatatgagcgcatcgagatccccatccacatcgtgccccacgtgaccatcggcaaggtgtgcctggagagcgctgtggagctgcccaagatcctgtgccaggaggagcaggatgcctaccgccgcatccacagcctgacccacctggacagcgtgaccaagatccacaacggcagcgtcttcaccaagaacctgtgcagccagatgtctgctgtgtctggccccctgctgcagtggctggaggaccggctggagcagaaccagcagcacctgcaggagctgcagcaggagaaggaggagctgatgcaggagctgagcagcctggagtag

SEQ ID NO: 145335 - DNA, 954 bp, synthetic construct
  misc_feature 1..954: note = Description of Artificial Sequence: Synthetic coding sequence
  source 1..954: mol_type = other DNA
atggctgtgcaggtggtgcaggccgtgcaggccgtgcacctggagagtgatgccttcctggtgtgcctgaaccacgccctgagcacagagaaggaggaggtgatgggcctgtgcattggagaggtgagcagccccagcagaagtgacagcaagtttgcctacacaggaacagagatgaggacagtggccgagaaggtggatgctgtgagaattgtgcacatccacagcgtcatcatcctgcggcggagtgacaagaggaaggacagagtggagatcagccctgagcagctgtctgctgccagcacagagacccaccggctggccgagctgaccggccggcccatgagggtggtgggctggtaccacagccacccccacatcaccgtgtggcccagccacgtggatgtgaggacccaggccatgtaccagatgatggaccagggctttgtgggcctcatcttcagctgcttcatcgaggacaagaacaccaagacaggccgggtgctgtacacctgcttccagagcatccaggcccagaagagcagcgagagcctgcacggcccccgggacttctggagcagcagccagcacatcagcattgagggccagaaggaggaggagagatatgagcgcatcgagatccccatccacatcgtgccccacgtgaccatcggcaaggtgtgcctggagagcgctgtggagctgcccaagatcctgtgccaggaggagcaggatgcctaccgccgcatccacagcctgacccacctggacagcgtgaccaagatccacaacggcagcgaggtgttcaccaagaacctgtgcagccagatgtctgctgtgtctggccccctgctgcagtggctggaggaccggctggagcagaaccagcagcacctgcaggagctgcagcaggagaaggaggagctgatgcaggagctgagcagcctggagtag

SEQ ID NO: 145336 - DNA, 747 bp, synthetic construct
  misc_feature 1..747: note = Description of Artificial Sequence: Synthetic coding sequence
  source 1..747: mol_type = other DNA
atggctgtgcaggtggtgcaggccgtgcaggccgtgcacctggagagtgatgccttcctggtgtgcctgaaccacgccctgagcacagagaaggaggaggtgatgggcctgtgcattggagaggtgagcagccccagcagaagtgacagcaagtttgcctacacaggaacagagatgaggacagtggccgagaaggtggatgctgtgagaattgtgcacatccacagcgtcatcatcctgcggcggagtgacaagaggaaggacagagtggagatcagccctgagcagctgtctgctgccagcacagagacccaccggctggccgagctgaccggccggcccatgagggtggtgggctggtaccacagccacccccacatcaccgtgtggcccagccacgtggatgtgaggacccaggccatgtaccagatgatggaccagggctttgtgggcctcatcttcagctgcttcatcgaggacaagaacaccaagacaggccgggtgctgtacacctgcttccagagcatccaggcccagaagagcagtgacctgacccacctggacagcgtgaccaagatccacaatggaagtgaggtgttcaccaagaacctgtgcagccagatgtctgctgtgtctggccccctgctgcagtggctggaggaccggctggagcagaaccagcagcacctgcaggagctgcagcaggagaaggaggagctgatgcaggagctgagcagcctggagtag

SEQ ID NO: 145337 - DNA, 1845 bp, synthetic construct
  misc_feature 1..1845: note = Description of Artificial Sequence: Synthetic coding sequence
  source 1..1845: mol_type = other DNA
atgggcaaccagatgtctgtgccccagagggtggaggaccaggagaatgaacctgaggccgagacctaccaggacaatgccagcgccctgaatggagtgcctgtggtggtgtccacccacacagtgcagcacctggaggaggtggacctgggcatctctgtgaagacagacaacgtggccaccagcagccctgagaccacagagatctctgctgtggctgatgccaacgggaagaacctgggcaaggaggccaagccagaggccccagctgccaagagccgcttcttcctgatgctgagcaggcctgtgcccggccgcactggagaccaggccgctgacagcagcctgggctctgtgaagctggatgtgagcagcaacaaggccccagccaacaaggaccccagcgagagctggaccctgcctgtggccgccggccctggccaggacacagacaagaccccaggccacgccccagcccaggacaaggtgctgtctgctgcccgggaccccaccctgctgcccccagagactggaggagctggaggagaggcccccagcaagcccaaggacagcagcttctttgacaagttcttcaagctggacaagggccaggagaaggtgcctggggacagccagcaggaggccaagagagctgagcaccaggacaaggtggatgaggtgcccggcctgagcggccagagtgatgatgtgcctgctgggaaggacatcgtggatggcaaggagaaggagggccaggagctgggcacagctgactgcagcgtgcctggggaccctgagggcctggagacagccaaggatgacagccaggccgccgccatcgccgagaacaacaacagcatcatgtccttcttcaagaccctggtgagccccaacaaggccgagaccaagaaggaccctgaggacacagccagcaaggccgagagcgtgtgtgatggccaggccggccagaagaccagcgagatccaggcccggggcaccaagaagaagcacctggacagcccccggctgggcctggccttcaggaagttcttccgccacaagggagctgagaagagccccaccaccagcgctgacctgaagagtgacaaggccaacttcaccagccaggagacccagggcgccggcaagaacagcaagggctgcaaccccagcggccacacccagagcgtgaccaccccagagcccgccaaggagggcaccaaggagaagagcggccccaccagcctgcccctgggcaagctgttctggaagaaggtggtgtgtgagagccctgtggagatcatcaagagcaaggaggtggagagcgccctgcagacagtggacctgaatgaaggagatgctgcccctgagcccacagaggccaagctgaagcgggaggagagcaagcccaggaccagcctgatggccttcctgcggcagatgaccagtgacagcacagagaagaccatcaccccacctgagcctgagcccaccggggccccccagaagggcaaggagggcagcagcaaggacaagaagtctgctgctgagatgaacaagcagaagagcaacaagcaggaggccaaggagcccgcccagtgcacagagcaggccaccgtggacaccaacagcctgcagaatggagacaagctgcagaagaggcctgagaagaggcagcagagcctgggcggcttcttcaagggcctgggccccaagaggatgctggatgcccaggtgcagacagatcctgtgtccatcggccctgtgggcaagagcaagtacacaggaaaatgtgtgttcagccacgtgaagaagaagtggcccttccaggagtggagctactag

SEQ ID NO: 145338 - DNA, 1755 bp, synthetic construct
  misc_feature 1..1755: note = Description of Artificial Sequence: Synthetic coding sequence
  source 1..1755: mol_type = other DNA
atgggcaaccagatgtctgtgccccagagggtggaggaccaggagaatgaacctgaggccgagacctaccaggacaatgccagcgccctgaatggagtgcctgtggtggtgtccacccacacagtgcagcacctggaggaggtggacctgggcatctctgtgaagacagacaacgtggccaccagcagccctgagaccacagagatctctgctgtggctgatgccaacgggaagaacctgggcaaggaggccaagccagaggccccagctgccaagagccgcttcttcctgatgctgagcaggcctgtgcccggccgcactggagaccaggccgctgacagcagcctgggctctgtgaagctggatgtgagcagcaacaaggccccagccaacaaggaccccagcgagagctggaccctgcctgtggccgccggccctggccaggacacagacaagaccccaggccacgccccagcccaggacaaggtgctgtctgctgcccgggaccccaccctgctgcccccagagactggaggagctggaggagaggcccccagcaagcccaaggacagcagcttctttgacaagttcttcaagctggacaagggccaggagaaggtgcctggggacagccagcaggaggccaagagagctgagcaccaggacaaggtggatgaggtgcccggcctgagcggccagagtgatgatgtgcctgctgggaaggacatcgtggatggcaaggagaaggagggccaggagctgggcacagctgactgcagcgtgcctggggaccctgagggcctggagacagccaaggatgacagccaggccgccgccatcgccgagaacaacaacagcatcatgtccttcttcaagaccctggtgagccccaacaaggccgagaccaagaaggaccctgaagatactggagctgagaagagccccaccaccagcgctgacctgaagagtgacaaggccaacttcaccagccaggagacccagggcgctgggaagaacagcaagggctgcaaccccagcggccacacccagagcgtgaccaccccagagcccgccaaggagggcaccaaggagaagagcggccccaccagcctgcccctgggcaagctgttctggaagaagtctgtgaaggaggacagcgtgcccactggagcagaagaaaatgtggtgtgtgagagccctgtggagatcatcaagagcaaggaggtggagagcgccctgcagacagtggacctgaatgaaggagatgctgcccctgagcccacagaggccaagctgaagcgggaggagagcaagcccaggaccagcctgatggccttcctgcggcagatgtctgtgaagggagatggcggcatcacccacagcgaggagatcaatggcaaggacagcagctgccagaccagtgacagcacagagaagaccatcaccccacctgagcctgagcccactggagccccccagaagggcaaggagggcagcagcaaggacaagaagtctgctgctgagatgaacaagcagaagagcaacaagcaggaggccaaggagcccgcccagtgcacagagcaggccaccgtggacaccaacagcctgcagaatggagacaagctgcagaagaggcctgagaagaggcagcagagcctgggcggcttcttcaagggcctgggccccaagaggatgctggatgcccaggtgcagacagatcctgtgtccatcggccctgtgggcaagagcaagtag

SEQ ID NO: 145339 - DNA, 495 bp, synthetic construct
  misc_feature 1..495: note = Description of Artificial Sequence: Synthetic coding sequence
  source 1..495: mol_type = other DNA
atgctgagcaggcctgtgcccggccgcactggagaccaggccgctgacagcagcctgggctctgtgaagctggatgtgagcagcaacaaggccccagccaacaaggaccccagcgagagctggaccctgcctgtggccgccggccctggccaggacacagacaagaccccaggccacgccccagcccaggacaaggtgctgtctgctgcccgggaccccaccctgctgcccccagagaccggcggggccggcggggaggcccccagcaagcccaaggacagcagcttctttgacaagttcttcaagctggacaagggccaggagaaggtgcctggggacagccagcaggaggccaagagagctgagcaccaggacaaggtggatgaggtgcccggcctgagcggccagagtgatgatgtgcctgctgggaaggtgtctgtgccccgctgcatccacctggtgctgaatgcctgcagcggggccctgatgggctag

SEQ ID NO: 145340 - DNA, 753 bp, synthetic construct
  misc_feature 1..753: note = Description of Artificial Sequence: Synthetic coding sequence
  source 1..753: mol_type = other DNA
atgtccttcttcaagaccctggtgagccccaacaaggccgagaccaagaaggaccctgaggacacagccagcaaggccgagagcgtgtgtgatggccaggccggccagaagaccagcgagatccaggcccggggcaccaagaagaagcacctggacagcccccggctgggcctggccttcaggaagttcttccgccacaagggagctgagaagagccccaccaccagcgctgacctgaagagtgacaaggccaacttcaccagccaggagacccagggcgctgggaagaacagcaagggctgcaaccccagcggccacacccagagcgtgaccaccccagagcccgccaaggagggcaccaaggagaagagcggccccaccagcctgcccctgggcaagctgttctggaagaagaccagtgacagcacagagaagaccatcaccccacctgagcctgagcccactggagccccccagaagggcaaggagggcagcagcaaggacaagaagtctgctgctgagatgaacaagcagaagagcaacaagcaggaggccaaggagcccgcccagtgcacagagcaggccaccgtggacaccaacagcctgcagaatggagacaagctgcagaagaggcctgagaagaggcagcagagcctgggcggcttcttcaagggcctgggccccaagaggatgctggatgcccaggtgcagacagatcctgtgtccatcggccctgtgggcaagagcaagtag

SEQ ID NO: 145341 - DNA, 1155 bp, synthetic construct
  misc_feature 1..1155: note = Description of Artificial Sequence: Synthetic coding sequence
  source 1..1155: mol_type = other DNA
atgtctgcccccatcaagctgcagaggaccaagacccaggtgcgggccggccacttccgctggcagctggaccggggccgcacccagatcaagccccagggcaccccccggcccaagaccaggagcagcctgcccccaggcatcccccgcttcagccacctgcggcagggcgagcaggaggagaagctgccccccagccccaggacccccttctttgacaagttcttcaagctggacaagggccaggagaaggtgcctggggacagccagcaggaggccaagagagctgagcaccaggacaaggtggatgaggtgcccggcctgagcggccagagtgatgatgtgcctgctgggaaggacatcgtggatggcaaggagaaggagggccaggagctgggcacagctgactgcagcgtgcctggggaccctgagggcctggagacagccaaggatgacagccaggccgccgccatcgccgagaacaacaacagcatcatgtccttcttcaagaccctggtgagccccaacaaggccgagaccaagaaggaccctgaagatactggagctgagaagagccccaccaccagcgctgacctgaagagtgacaaggccaacttcaccagccaggagacccagggcgctgggaagaacagcaagggctgcaaccccagcggccacacccagagcgtgaccaccccagagcccgccaaggagggcaccaaggagaagagcggccccaccagcctgcccctgggcaagctgttctggaagaagtctgtgaaggaggacagcgtgcccactggagctgaggagaacaccagtgacagcacagagaagaccatcaccccacctgagcctgagcccactggagccccccagaagggcaaggagggcagcagcaaggacaagaagtctgctgctgagatgaacaagcagaagagcaacaagcaggaggccaaggagcccgcccagtgcacagagcaggccaccgtggacaccaacagcctgcagaatggagacaagctgcagaagaggcctgagaagaggcagcagagcctgggcggcttcttcaagggcctgggccccaagaggatgctggatgcccaggtgcagacagatcctgtgtccatcggccctgtgggcaagagcaagtag

SEQ ID NO: 145342 - DNA, 678 bp, synthetic construct
  misc_feature 1..678: note = Description of Artificial Sequence: Synthetic coding sequence
  source 1..678: mol_type = other DNA
atggccggcaccggcctggtggccggggaggtggtggtggatgccctgccctactttgaccagggctatgaggcccctggggtgcgggaggccgctgctgccctggtggaggaggagacccggcgctaccggcccaccaagaactacctgagctacctgacagccccagactacagcgcctttgaaacagacatcatgagaaatgaatttgagcggctggccgcccggcagcccatcgagctgctgtccatgaagagatatgagctgcctgcccccagcagcggccagaagaatgacatcacagcctggcaggagtgtgtgaacaacagcatggcccagctggagcaccaggccgtgagaattgagaacctggagctgatgagccagcacggctgcaatgcctggaaggtgtacaatgaaaacctggtgcacatgattgagcacgcccagaaggagctgcagaagctgaggaagcacatccaggacctgaactggcagaggaagaacatgcagctgacagctggcagcaagctgcgggagatggagagcaactgggtgtccctggtgtccaagaactatgaaattgaaagaaccatcgtgcagctggagaatgagatctaccagatcaagcagcagcacggggaggccaacaaggagaacatccggcaggacttctag

SEQ ID NO: 145343 - DNA, 477 bp, synthetic construct
  misc_feature 1..477: note = Description of Artificial Sequence: Synthetic coding sequence
  source 1..477: mol_type = other DNA
atgcagaggactggaggaggagcccccaggcctggaagaaatcatggcctgcccggcagcctgcggcagcctgaccctgtggccctgctgatgctgctggtggatgctgaccagcctgagcccatgaggtctggggcccgggagctggccctcttcctgaccccagagcctggagctgaggccaaggaggtggaggagaccatcgagggcatgctgctgcggctggaggagttctgcagcctggccgacctgatccgcagtgacaccagccagatcctggaggagaacatccctgtgctgaaggccaagctgacagagatgaggggcatctatgccaaggtggaccggctggagaagagccctgcccctgtgcctgtgacctatgagctgcccaccctgtacagaacagaggactacttccctgtggatgctggggaggcccagcaccaccccaggacctgcccccggcccctgtag

SEQ ID NO: 145344 - DNA, 570 bp, synthetic construct
  misc_feature 1..570: note = Description of Artificial Sequence: Synthetic coding sequence
  source 1..570: mol_type = other DNA
atgcagaggactggaggaggagcccccaggcctggaagaaatcatggcctgcccggcagcctgcggcagcctgaccctgtggccctgctgatgctgctggtggatgctgaccagcctgagcccatgaggtctggggcccgggagctggccctcttcctgaccccagagcctggagctgaggccaaggaggtggaggagaccatcgagggcatgctgctgcggctggaggagttctgcagcctggccgacctgatccgcagtgacaccagccagatcctggaggagaacatccctgtgctgaaggccaagctgacagagatgaggggcatctatgccaaggtggaccggctggaggcctttgtgaagatggtgggccaccacgtggccttcctggaggctgatgtgctgcaggccgagcgggaccacggggccttcccccaggccctgcggcgctggctgggcagcgctggcctgcccagcttcaggaacctggagtgcagcggggccatcctggcccactgcaacctgcggctgagcggcagcagtgacagccctgccagcgccagctag

SEQ ID NO: 145345 - DNA, 636 bp, synthetic construct
  misc_feature 1..636: note = Description of Artificial Sequence: Synthetic coding sequence
  source 1..636: mol_type = other DNA
atgcagaggactggaggaggagcccccaggcctggaagaaatcatggcctgcccggcagcctgcggcagcctgaccctgtggccctgctgatgctgctggtggatgctgaccagcctgagcccatgaggtctggggcccgggagctggccctcttcctgaccccagagcctggagctgaggccaaggaggtggaggagaccatcgagggcatgctgctgcggctggaggagttctgcagcctggccgacctgatccgcagtgacaccagccagatcctggaggagaacatccctgtgctgaaggccaagctgacagagatgaggggcatctatgccaaggtggaccggctggaggcctttgtgaagatggtgggccaccacgtggccttcctggaggctgatgtgctgcaggccgagcgggaccacggggccttcccccaggccctgcggcgctggctgggcagcgctggcctgcccagcttcagaaatgtggagtgcagcggcaccatcccagcccgctgcaacctgcggctgcccggcagcagtgacagccctgccagcgccagccaggtggccggcatcacagaggtgacctgcaccggggccagagatgtgcgggccgcccacacagtgtag

SEQ ID NO: 145346 - DNA, 612 bp, synthetic construct
  misc_feature 1..612: note = Description of Artificial Sequence: Synthetic coding sequence
  source 1..612: mol_type = other DNA
atgcagaggactggaggaggagcccccaggcctggaagaaatcatggcctgcccggcagcctgcggcagcctgaccctgtggccctgctgatgctgctggtggatgctgaccagcctgagcccatgaggtctggggcccgggagctggccctcttcctgaccccagagcctggagctgaggccaaggaggtggaggagaccatcgagggcatgctgctgcggctggaggagttctgcagcctggccgacctgatccgcagtgacaccagccagatcctggaggagaacatccctgtgctgaaggccaagctgacagagatgaggggcatctatgccaaggtggaccggctggaggcctttgtgaagatggtgggccaccacgtggccttcctggaggctgatgtgctgcaggccgagcgggaccacggggccttcccccaggccctgcggcgctggctgggcagcgctggcctgcccagcttcaggaacaagagccctgcccctgtgcctgtgacctatgagctgcccaccctgtacagaacagaggactacttccctgtggatgctggggaggcccagcaccaccccaggacctgcccccggcccctgtag

SEQ ID NO: 145347 - DNA, 627 bp, synthetic construct
  misc_feature 1..627: note = Description of Artificial Sequence: Synthetic coding sequence
  source 1..627: mol_type = other DNA
atgacaggccgggtgtgccggggctgcggcggcacagacatcgagctggatgctgcccggggagatgctgtgtgcacagcctgtggctctgtgctggaggacaacatcatcgtgtctgaggtgcagtttgtggagagcagcggcggcggcagcagcgctgtgggccagtttgtgtccctggatggagctgggaagacccccaccctgggcggcggcttccacgtgaacctgggcaaggagagccgggcccagaccctgcagaatggccgccgccacatccaccacctgggcaaccagctgcagctgaaccagcactgcctggacacagccttcaacttcttcaagatggctgtgagccgccacctgacccggggcaggaagatggcccacgtgattgctgcctgcctgtacctggtgtgcaggacagagggcaccccccacatgctgctggacctgagtgacctgctgcaggtggacagcctgcggcctgccagcttccccacctggggctgtgacctgggcgtggtgaccagggtggtgactggagtgtacccccgctgcctgcacgccagccagtggcctgtgtgtgccgcctgccctgtgaggaagttctggagcgtgggctag
